United States Patent Application Publication US 2015/0086982 A1 - sequence listing, part 3

SEQ ID NO: 34 - DNA, 4657536 bp, Podospora anserina S+ mat (residues 3,105,025-4,657,536 of 4,657,536)
  misc_feature (5979)..(6128): n is a, c, g, or t
  misc_feature (10388)..(10745): n is a, c, g, or t
  misc_feature (12025)..(12066): n is a, c, g, or t
  misc_feature (19150)..(19263): n is a, c, g, or t
  misc_feature (20294)..(20310): n is a, c, g, or t
  misc_feature (20622)..(20660): n is a, c, g, or t
  misc_feature (22070)..(22096): n is a, c, g, or t
  misc_feature (22346)..(22376): n is a, c, g, or t
  misc_feature (23427)..(23782): n is a, c, g, or t
  misc_feature (441648)..(442416): n is a, c, g, or t
  misc_feature (443511)..(445238): n is a, c, g, or t
  misc_feature (447109)..(447165): n is a, c, g, or t
  misc_feature (511365)..(511560): n is a, c, g, or t
  misc_feature (513553)..(513810): n is a, c, g, or t
  misc_feature (515916)..(516101): n is a, c, g, or t
  misc_feature (518341)..(518440): n is a, c, g, or t
  misc_feature (519756)..(520450): n is a, c, g, or t
  misc_feature (521964)..(523042): n is a, c, g, or t
  misc_feature (558685)..(558708): n is a, c, g, or t
  misc_feature (560073)..(560110): n is a, c, g, or t
  misc_feature (581622)..(581771): n is a, c, g, or t
  misc_feature (587762)..(587911): n is a, c, g, or t
  misc_feature (605885)..(606034): n is a, c, g, or t
  misc_feature (613192)..(613341): n is a, c, g, or t
  misc_feature (622411)..(622560): n is a, c, g, or t
  misc_feature (633743)..(633892): n is a, c, g, or t
  misc_feature (652067)..(652216): n is a, c, g, or t
  misc_feature (673489)..(673638): n is a, c, g, or t
  misc_feature (724985)..(725134): n is a, c, g, or t
  misc_feature (759502)..(759651): n is a, c, g, or t
  misc_feature (761346)..(761495): n is a, c, g, or t
  misc_feature (798726)..(799664): n is a, c, g, or t
  misc_feature (810776)..(810919): n is a, c, g, or t
  misc_feature (820266)..(820292): n is a, c, g, or t
  misc_feature (821912)..(821931): n is a, c, g, or t
  misc_feature (847571)..(847720): n is a, c, g, or t
  misc_feature (851454)..(851603): n is a, c, g, or t
  misc_feature (870192)..(870341): n is a, c, g, or t
  misc_feature (914046)..(914195): n is a, c, g, or t
  misc_feature (915963)..(916031): n is a, c, g, or t
  misc_feature (922575)..(922724): n is a, c, g, or t
  misc_feature (924227)..(924318): n is a, c, g, or t
  misc_feature (932796)..(933686): n is a, c, g, or t
  misc_feature (946696)..(946845): n is a, c, g, or t
  misc_feature (1074482)..(1074631): n is a, c, g, or t
  misc_feature (1084434)..(1084583): n is a, c, g, or t
  misc_feature (1102479)..(1102628): n is a, c, g, or t
  misc_feature (1108570)..(1108719): n is a, c, g, or t
  misc_feature (1113530)..(1113679): n is a, c, g, or t
  misc_feature (1116391)..(1116504): n is a, c, g, or t
  misc_feature (1133793)..(1133956): n is a, c, g, or t
  misc_feature (1159209)..(1159358): n is a, c, g, or t
  misc_feature (1183821)..(1183865): n is a, c, g, or t
  misc_feature (1207271)..(1207420): n is a, c, g, or t
  misc_feature (1252230)..(1252379): n is a, c, g, or t
  misc_feature (1255026)..(1255094): n is a, c, g, or t
  misc_feature (1256281)..(1256430): n is a, c, g, or t
  misc_feature (1259422)..(1259571): n is a, c, g, or t
  misc_feature (1266498)..(1266647): n is a, c, g, or t
  misc_feature (1288953)..(1289052): n is a, c, g, or t
  misc_feature (1291564)..(1291713): n is a, c, g, or t
  misc_feature (1314568)..(1314717): n is a, c, g, or t
  misc_feature (1326835)..(1327247): n is a, c, g, or t
  misc_feature (1352733)..(1352882): n is a, c, g, or t
  misc_feature (1367959)..(1368108): n is a, c, g, or t
  misc_feature (1451100)..(1451249): n is a, c, g, or t
  misc_feature (1546359)..(1546508): n is a, c, g, or t
  misc_feature (1556987)..(1557136): n is a, c, g, or t
  misc_feature (1825135)..(1836134): n is a, c, g, or t
  misc_feature (1899091)..(1899240): n is a, c, g, or t
  misc_feature (1901382)..(1901531): n is a, c, g, or t
  misc_feature (1928486)..(1928543): n is a, c, g, or t
  misc_feature (1938762)..(1938911): n is a, c, g, or t
  misc_feature (1948982)..(1949826): n is a, c, g, or t
  misc_feature (2036834)..(2036983): n is a, c, g, or t
  misc_feature (2066537)..(2066577): n is a, c, g, or t
  misc_feature (2068131)..(2068338): n is a, c, g, or t
  misc_feature (2099409)..(2099477): n is a, c, g, or t
  misc_feature (2101930)..(2102079): n is a, c, g, or t
  misc_feature (2103992)..(2104100): n is a, c, g, or t
  misc_feature (2110956)..(2111045): n is a, c, g, or t
  misc_feature (2112162)..(2112311): n is a, c, g, or t
  misc_feature (2137000)..(2137149): n is a, c, g, or t
  misc_feature (2144273)..(2144422): n is a, c, g, or t
  misc_feature (2151824)..(2151973): n is a, c, g, or t
  misc_feature (2186006)..(2186155): n is a, c, g, or t
  misc_feature (2189689)..(2189838): n is a, c, g, or t
  misc_feature (2211646)..(2213003): n is a, c, g, or t
  misc_feature (2234707)..(2234856): n is a, c, g, or t
  misc_feature (2259741)..(2259890): n is a, c, g, or t
  misc_feature (2319798)..(2320561): n is a, c, g, or t
  misc_feature (2323399)..(2323724): n is a, c, g, or t
  misc_feature (2419526)..(2419675): n is a, c, g, or t
  misc_feature (2671005)..(2671154): n is a, c, g, or t
  misc_feature (3021240)..(3021389): n is a, c, g, or t
  misc_feature (3040215)..(3040258): n is a, c, g, or t
  misc_feature (3041342)..(3041447): n is a, c, g, or t
  misc_feature (3056490)..(3056639): n is a, c, g, or t
  misc_feature (3068603)..(3068752): n is a, c, g, or t
  misc_feature (3131200)..(3131579): n is a, c, g, or t
  misc_feature (3136870)..(3137019): n is a, c, g, or t
  misc_feature (3138065)..(3139235): n is a, c, g, or t
  misc_feature (3145790)..(3145939): n is a, c, g, or t
  misc_feature (3163068)..(3163574): n is a, c, g, or t
  misc_feature (3191713)..(3191862): n is a, c, g, or t
  misc_feature (3335101)..(3335250): n is a, c, g, or t
  misc_feature (3338156)..(3338305): n is a, c, g, or t
  misc_feature (3377833)..(3377982): n is a, c, g, or t
  misc_feature (3424848)..(3424997): n is a, c, g, or t
  misc_feature (3439805)..(3439954): n is a, c, g, or t
  misc_feature (3448104)..(3448253): n is a, c, g, or t
  misc_feature (3464040)..(3464189): n is a, c, g, or t
  misc_feature (3603053)..(3603202): n is a, c, g, or t
  misc_feature (3747443)..(3747592): n is a, c, g, or t
  misc_feature (3788888)..(3789037): n is a, c, g, or t
  misc_feature (3818315)..(3818464): n is a, c, g, or t
  misc_feature (3823471)..(3823620): n is a, c, g, or t
  misc_feature (3846519)..(3846668): n is a, c, g, or t
  misc_feature (3853709)..(3853858): n is a, c, g, or t
  misc_feature (3861796)..(3861945): n is a, c, g, or t
  misc_feature (3872573)..(3872722): n is a, c, g, or t
  misc_feature (3896049)..(3896198): n is a, c, g, or t
  misc_feature (3913722)..(3913871): n is a, c, g, or t
  misc_feature (3926668)..(3926817): n is a, c, g, or t
  misc_feature (3934968)..(3935117): n is a, c, g, or t
  misc_feature (3951244)..(3951393): n is a, c, g, or t
  misc_feature (3982365)..(3982724): n is a, c, g, or t
  misc_feature (4019307)..(4019363): n is a, c, g, or t
  misc_feature (4024217)..(4024366): n is a, c, g, or t
  misc_feature (4051932)..(4051966): n is a, c, g, or t
  misc_feature (4055593)..(4055742): n is a, c, g, or t
  misc_feature (4061730)..(4061879): n is a, c, g, or t
  misc_feature (4066632)..(4066678): n is a, c, g, or t
  misc_feature (4095467)..(4095616): n is a, c, g, or t
  misc_feature (4105134)..(4105655): n is a, c, g, or t
  misc_feature (4111701)..(4111850): n is a, c, g, or t
  misc_feature (4214761)..(4214781): n is a, c, g, or t
  misc_feature (4329412)..(4329561): n is a, c, g, or t
  misc_feature (4399393)..(4400413): n is a, c, g, or t
  misc_feature (4400797)..(4402078): n is a, c, g, or t
  misc_feature (4417332)..(4417481): n is a, c, g, or t
  misc_feature (4446312)..(4446461): n is a, c, g, or t
  misc_feature (4646252)..(4646401): n is a, c, g, or t
gcctattcgagtcttcacgttggaaaatccactatcgtgaaaaagtattaggaactagtacccgcttgagcttcgatgaactgacatcagagagcttgaaacatacccgatagcagcaggacgtgacggctccctgaagggacgacagacgtagccacacagataaagtcgtctagtgcctatggtgggatgatcttgcccctctggccagatatcttggtagaaccttcgtcggtgctttttgactacctctattaggaaaggcctggctttgaggtgaacaccgctctcgattatgaccctagacagttggcgattgcaagtcaggtgtccgattgcaagtcagaagtccgactgcaagcgaccttgtgtgtttgaagagacccactggtttgattcaggtttggcgtctacatgggtgatatggtagaccatcctctcgaccacgcggtgaaagcaaaggactggttgatgaatattgacatcaaacctcttgcaagcttcttccacggtcatggcaggagtgtatgacaatgcaatgtccccgaggtccgctagcaatgcaaaatggtgcatcacaaatgaagtctcgtacgcggaagcgccaagttgaagtggtgaataacctggttttggttcgacccgaggaatgtccatataagcttcgaggcaaagatctgtcagatctgggtcttgttttccgtaatgagcagcgatggccgtgaagtgctcaacgtctatcatgcatgcaaccacaaagtctttgagatagaactccttgacctccagtctgtcgtgcagcatctgccgcttcatcagggagatacttatccgtggtgattccgggcagttcgccattctgtatcattcgtttgacgcttgggaaacgctggtggaactccttgaggaagctcgctgaatgatggtctttccaggacttgaagttggggctcagaaatttcccggtggaggtgtcatgccggtatccgtcgtcatacatgaggcaataggatgcagggacgccaacactggtgagcaccgcaataccgctgtcgtccaaccttgggtccatactgtcgcaattgagatcttctaccgtgacaaacactgttagttaagacttgtttgatgggaatattaagggaaaaggcaaaagcctcaccaatgaactggtaacttgtaccaggtttgtttgatagttggattggtgtcaagttggactttcgggattccaaaagaaaagaaaacaaacagggtcagtttaaatacctctgcaaaaccatgatgaattaacccttaattcttgaagagaaaagtcttcatggcacccacctggggttgggcgccgtcacttttcgaaccatcctgctgctgcaagctcacaagcgccactggaaaacctaaatgtgagttcaaagatatcaactgcataccggccatgatcggcgtggccacttgcaactaaactcaatgtttccttgagagctcttatgtacctcggaaaatacacagataagaaaagcttgatcgaatgtgctgattctaagtggataatacttttgggggctctatagagttctcgtattcttctttggggcagactttcataatgaactgtcaatgaacgagaagtttataggcggggttttcaataattgccctaattatcctgatttctaaaatacacttacactcaacactctccaagtcctgacattccaccagctttctttcaagtccatcatgctggcgtcaattatatccccgttttagccaccgacagctctgcgcttctccttagatctacgggactgaattctgtgagctgtgatctgactcctgcaagctgagacctcactagtgcgagctgggccgtgactgtgaaccagagctcgtttccggataggatagtcttcacgtcaaaaagcgatggttgtcagtgatatgttgattccttttgcatcttcgcaccgacacacgtgagtaaggtagatagacttacccccaaggttcaaattggtcacgtgcgccgctagacacgagggcacataaaagtttatcagtgtacccttatctaccatctgacaaagtgatatcaagatatttgctcaggatacctgacgaattcccaaaccatgacagcaatgactgaggttacatgctctagcttggcccacaatgacacatgagcctgcaaacacaatcaacctggacagcccgatccgatctattacccgcctgatgttcccttcgaattatggctccttcttcagactttagaatctcattggcagccaagatctgatgattctcacggcccgaagcgtgcctggtggaaagccgacaccgacacgccatccgggtaagaggcgtctagttcccttccattcattccattccccacattcaacatgatatatgtcgtttgctgtttggactgactgacccaagatcatgtgagtctggggtgggtcagctaccaccgacctgcgttggcaccatgacacgttgggcaccaagcatgcaaacccgagccgaagcaggtctaggagcatgcaaaggttttatgaggcggccccgataggttgaaagtcagatctgagctttcttgtcatttggtatgagccagagcgatcaagattgttgggtgacagcagccggtctggtgccgactgtcgagtggtgtgtcatggccccgcttgcaacgacagcgctcatatggggaggggcctctcttccggcagcccatatggttgaagtaaacagcatcgccactccgctcgttggatcttcggatgaggttggccgcttcgcgctacccgctagaccgccgttgttcccctgtgcggctctttctgtcagtccactggtacttaataggttgacccacagctatgcaggtgtctctgacttcccttcattcaccttcccatactctgggagtcagaacctccttgtaatcaaagtaaaccgtaagcaacttgttcgtaccatggtgtaacccttctctgatgtccttcaacgaacataggtagccattaccaatgacacgggctgctcactgaaccgataatggcttccaaaccaagagaatataacatcccagcacaccccaatcgggatttctggtcatcactatggccgacatcctcctctcctcccgcgaaagccacgacagtcgagccaacgccgacctatagcgtccccaagggttctcgtcgtgcaaagacacccgtcatacccgaagagccatcgaaatcaaaaaaatcaaaacctacaaggacaaagtcaaagtcaaagtcaaagaaaaactcaacatcaaagggtcccgggtcatggtcggaatggtacctcagcgaggacaacgagtacttttggcgtgcgagaaaacttccaaatggtatgtccgcatatcaccccccccttttcccgtcccaatccactgacgtcaaaaccctcacgtccagatcaatgggattacgaaaaacaacccaaaccagaaccacctcaacccgagatccaacccctcccacatcctcacctggagccaataacccagcaaactcaattaaaaacatcaccagaacccgaaatcaaaccactccctcaccctcacctagaaacaatatcccaacaaacccaacccaccaccaccatcaccccccaaccagacccccaacccctcccacacccccacatgcaaccaatatcccaacccagctcccccaagataacaatagaagacacaacccccttatccacttcttcctcttcatccccctccccatcgcgaaccccctctccccaatccaacacccacctcaaaccccccctctcccccgccctcaaatcccaccgctccggccgatcagccctcacaaaccccaaatcctcctatcccaccatcatcacaaagtccacaggccgcccaacagaagcaatcaccacctccaaccccagccctcgaacctccggcctcgccctcacaagaatagaatccatctcccccatccggaaaccttcccctttatccaaaccccccaagacagcctcccagcaacaaccagcacccaaacccccaaaagtcgtcaacccccccgctaaaaaatcttcgtcgccaaaaaggccgatcgggccggtaatgtggctttttaccgagggtaggtcgagaaaggggaagtcattagcttcgccgccgccacccgcgggaggggggaaggaaggggtggatgggggggtggtcatcactaagaacaaggggactggcgtctcgaatagtgagctggcaaaaaagaaaaagatgctggataggaagattagagaggggaaggtggtggatacaaaggttgatagtaaaaagaggataagggcttggttgggcggggtggagggggaggaggagctgattcctttggatggggaggggtttcctgtttatcggtagggaaatggggagggtgggttgtctcggggaaaggtggaaagtggtgctggatagataccaggtgtcgttcgcttgaaagggtccaagtggtttcttttgtctgttttgatggtggatagcgctgacctgatcagagaaacaggttcagcgggtggttttgaatcttgtcactcgttttgctgtaggagtgatttcttttgtttgagaggtttggatgatacccccttgttgatgatagttttgcattctttgagtataggccaggaaatggcactgttgacataccctaatataacaaatcaatattctaaacaatagtcgtcagcatgacgccagtttaataattcccctctgtgaactccagcgcagcccacctccaagtctatacaccaatatacctctatcccatctcccagcacctacaacctctccccacccgtgaccccattctccttcattttatcctcttccccaaccccaggctccatctccccacccatccccttctcctccctcctcgactcctccacctcctcctcacccctctcctccctcctcatctcaatctcactcggatacaccctcctccccatccctaccacatcaacccatttccacttcgccacctccacccccctccgcagcacatcccccctctccctctccaacctcgactccccaaccacaaccccattccccctcaaaaactgcaccgcagccctcacattcaaactcaacaccgcctcgggcgtctccgacccgaaagcctttttcgtcaaccaaggaaacaaaaccgcaaaatccgactgactcaaatgtgcagatttctctatataaaacaaatacggcgccgggtggtcaggcgactccttcacaacctccgcggtcggatcagcagacaaaaccttcgccgtgcggtgcaggtgcgtcccccatttgaaaaactgatctgattccaccgcgagaatcttcgacatcttttgctgttcttgagacacagaatagcacggcagcgggagacgatacagcttgtcggacgcggccgataaaagagggaaacaccacatatccagcaagacagccgggttcaaaccgttgatttgtgacatgatagccgagccaggccgcggggtgaataacctgccgtcctcaaaagactgcagagcaggatgggacgaataaaagactgatttgaggaactggaccatggtcgaggaaccaaacgagtggcccgcaaagatcactttgccggggtccaagatgtcgagtttgttgtgcaaggcaaagagggccgaaacaggggtgctggtgttgaggttggaggcgatgactttgttgtcgttgcggtcgatggcgaggatggcttcaaagatcatatcgagttcccagaggcggatgcggagttgggagtcgcgctgggcccagatctcaggggtttggttgtgcgggattcgtaggtaggcgaggggggtggcctttttgggcgtttgggggtcgcggatgagggtgagagctgcgctctggtcgcgatgttcggggcagatgacgactactccgtgggaggctagggagccggcgagatggctgtaggcattgcggttacctcctaggccgtgtgaaaatatcatggttggccatcttgagctggaatgctcagctgggggagacagcaaaggagcattcttgatggctgggatggtggtccagtgaagatgtcggggtagaaatctgttcaagggtttagtaatatttccagatgcaaccttttaaaagaacttacgagagaacagaggcagttttcgagccgaggcccagaaactgggcataggcctctatgtgaagcctttgaggcgcgggaagccaactgatgtattttccctgagcctcagctaccgtcgggtaaaatattctgaatagaactgtgtgaacgtctgcggcaccttcgggttttttgccggctggcagcttcgatatgggaatttcgacatctacagtgccgaccctgtaggcgccggtgtactcgggaaacccgggaacagggttgagaagggaagacaagagcgacattctatggtgtgttcagagaatcgttaggtgagaagcgaagagttgcgccacggccagctggctgaaggactgtatttggctattgaataccagaaaagtacagagttaacgtctagaaattctataccgagcaagaacctaggtaggcaggtggcagtgcagttgcgaggtctgagggtgtaatcgtcatgctcagccgaggcaaggcaagtgagcgtttgccttgcaaagagagagccaatcaacggagactagacgtgataaagcaaaacactacgagtttgaagctgttgagcaagactcactgtgacggtgaaacaggagagaagttcgacatgctaagaatctgatcctcttcaagattcccatcggtaccgtgcccccacacctccacaagtgacgacagtaagctgcgcgccaagagatcttgcatccattgggaatcttggcaagctcaaggtggatgtctttctccccttgctgaaccgcttggagacggccacgaggaagcggtgggcgattcgacgagtctgaactcgagaggaactgtacaactcatcgctattaccaatagatagattgctgaagaggtcatgtgtgctctaaagatcactgcggcaggtcccgaggacagctgccaggcacccgattgtcgccaaagcaacggcagtttatgacagcgtaccgctgcgataagataagggaccaggcacgaggccacccgccgccgccgccgccgcccggacatggatcggataagccacccgccagaccaaccttaagctcggccgcaaccagtcatcctgtttccctccctcaactactttcaccacttccgccacaagctcaactttcattcatcctcaccctcctcgattgcgctatcaccgtcaccatgactcgtcacactcctgccttcatccgggcccgcgattccaacctctccatccgttccatggccatggaacaggcgatgatggcctcgcgcgcctctcctgtcgccaatgatggtctcaacaaggtcgacgccaaagagcttaagcccgaggccttcaccaaaccatactgcgagttcatgaccgagaaccccacagtcttccatgccgtcggctacttcaaggagaagctcgcaaaggctggttacaaggagctttcccatcgcgatagctggattggcaagctggagcctggtggaaagtactatgttacccgcaatggcagctctatcatcgccttcgctgtcggcaaggcctacaagcccgggaatggtgctgcgatgattgctggccacatcgacgctcttaccgcccgcctcaagcctacaagcacgaagccaggaaacaatggatacgttcaattgggtgtcgcgcaatatgccggtgctttgaacgagacttggtgggacagagacctgagcattggtggccgtgtcatcgtcagagaccccgacactggcaagacaacggtgaagctcgccaagcttgactggccaagtaggttctttgatcaacactccatacctcgaatatgcaaagactaaccaagtgtcaccagttgctcgtatccctactctcgctcctcactttggaatcggcatgatgggccacaataaccgcgaaaccgaaaccgttccaatcattggtctcgacaacagcgacgttcgtggtgcctcgaccacctcgtctgaaccccctctcggcggtgttggttcctttgccgctacccagccccccaagcttgtcaagctcatcgcttcgcaaattggcgtccaagactatagcacaatcctcaactgggagctcgagctttacgactcccagccggcccaagtcggcggtatggacaaggaattcatttttgccggtcgcatcgacgacaagctctgctcctgggccgccttcatggctcttctccacgccaagcaggaggaggaggagggcatcatcaagctcgtcgctctcttcgacgatgaggaaattggctctctgctccgccaaggtgctcgtggcaacttcctccctctgacagtcgagcgcgccgtcgagtccctcgctgccagagatggcaagactccctttggcccaggcctcatgggtcaaacctttgccaactcgttcctcgtctcctccgacgtcacccacgccgcccaccccaacttcacccagaccaacctcgcagagcactcgccacgtctcaacgtcggcgttgccctctgcgttgacgcctctgcccacatgaccaccgacagtgtgtcgatggccattctggacagaatcgccactctggctggcaccgtcaaccagcgccacatgatccgcaacgacagcagatcaggcggcaccgtcggcccaatgctgagcagcgccatggggtgcaaggctgccgatgtcggtatcccacagctgagcatgcacagcatccgcgctactaccggtagcttggatcccggcctcggtctcaagttttacaagggcttcctggacaactgggagaaggttgacaaggagtggcgcccttagattttttttgcgatggatatgagtgtaatgagagaggagaacatgtacgaatgatggtctgatagcgatgttgcatcaccgatgataatacccatttcaacaattctagaatggcacatttggtggcttcctacatggcatggccatggcacgtagcaaagcagcagaagatggatggcagtgatgaaataataataattttggtattggaaacaatgaaacatgaaacgatgcttgctccccttttgtaaagttctacaacgctcccaatgagtgagttccagctcccaagtaagttcaaacagtgcaaggaagccaacaaccccgggtacgatgcatccatccatctatccctccctctttcatgcaaccaaccgtttcagacagtgccaaaaaaaaaaccatgagtgtcatgcaatccccctcgacgggtatcactcacacatagctaatcactctcactccccgcattaacccccctggccctattcaccaacccctccgcctccctaaccctcatcctctcctcctccacactccccgtctcgtcatcctcatcgtcatcttcctcctcctcttcttcacttttaatctcctcatcatccccctcatcaggtctcgcgctgccccgtctggccgtggacgacggctccgaccccaacggcaacctcttcttctcaaagtcctgcttgtgcgcctccgccatggcctgcaaaatcgacttcttcccaatagtatctgtataccgtctcctaaacgccgccgccggaccgctttcctccgcgggggtgtcactaactgcaatgctctgtggagtaccacctccaacattggtaggagtccgatggaggacctgagatgccggtgtgcgagggggaatagtagatggttttctgtgatgctggcccaacgggcggatctgatcttgttgatcaacccccggagtggcagggttgatggcagctggacctaacagaccagctggtggttgttgttgctgctgggcggggggcgttgtatcctccacgctggaagtagaggtattcaaatgataaggtaagggcgtgtcacgggaggctttgtactgcgctacgttggcgcagtgctcattctccacacggagcaaggtccagataccccttctgaaaacctccgcaaaggcgacaagaaacgaaacaatcgtcgagtgctggctgtcgtgggtgaagatggcgtaaaagatccaggagaagcggaggataggatccaaggtcatgatgatgtagtatatgctgactggacgcaaggcggtaatgctccggagcagcttttgccgagcaccggcttggaggagtgagaaatccataaacagatcccagatggagcagtagatcgcgttgaccgtgccaaaggtgatgaagagactcaagttggcttggctgttttcgatgcggtaaagactcaggaacacggcggtgaggatcgtcatggtgtatttcccgcagttgaccagatgaggaaagacatttttggtgtcgtagtaacgcctgatgcactggagggcacgccagatgggtggcagggcgccgaagaagcccatgaggcgggaatgagacgagttgcactgctctgggtcgtaccaggagttggcgtagaggcaaaagaacagttcgatattctgaacccgagggtcagtattccatccagccgtgcacggttatggtagcaacttacacaggtggcataggtcaacgaacaccagatatcgcccagaaagaaatcacgaaactcgactgggtataaacctgaaaggagaagccgatactagggtcaagtcagctcgccatccagacacaaaaagtgaggggaacatacatgcgagtacaagaaccacctcctggccttgtggtgaagaataggtgccggaaaaaacaggatgcccagggtaatgcaaatcagaacgaccgggtagtacaagtacatctcctcccagtcacccaacctcgaaaagttgagccacatgaaaacgccgaggagcgcaaagaagaagctaggaaactcggccacctgcttccagtccaaaaagttccgttggtcaaactcaaagatgaagggatagttgaccttgtttttggtccacatgcggcagtcgagagtgaacaggatgaagaggaaaagcacgaggaaataccctccgtacagctgcatcagatatgcagtttgtgttcggaggtcatcatcctcgctgaacaaaagctctgctccatagatcaacccctgaactgcaaagacacctccgagtccaattgtgatgccgctgcggaacgcgctgtcagaggagtccccggcgcgcttgttcaagtttcgaagctttccagccgcgatcttgtggtttccacgctcaaagtagcgggcatagagatcctccacagtccgaatatgtccatcgagaatgtcgctgttgacaaaccaggacttgttcactttctcattcatgtatcggtatgacgggcgggccttaaccgccttgtcatacttcttgttgagtttgcgaaaggcagtccggttgagcagcgcgtaggacttgagcaactccaggccgcggtagaactcttgcaatgccactttgagcttccgcttcgcgcttcggtagggaacgtcgtctccaggtggtctccggacgtagtcccgcccttcgtcgacgttttgagggtgcatgaccggtgtttgtgtcatcttctggagggctttcgaattgggccccggtttaaaaaacttgcccttcaagggggcgatccaatcacgactgccgtccttgccctgctgctcaccggcgtcgccatcactgggactccgattccggcctgtctcgcgcttcttcctcgcttccgtgatctcggccgttctcctgttgcgcatttcgtgcagctgtgctcgcagtgccatcaaccgctcggtcgcctgatcctccttctccttgtaaaacgactcaatcttggccagttcgctgtcgagaaaggcgaagaagtcacgttccgcagatcggacggaatctagattttgcatcccgatttccatcttgttcccgccagtaaatctgttggacgcattccgcgtgtgtgtcgatccggtcgtgaagagccgagacatgcgttggcgaggcgtaccatctgcacccagattgaccttggaggggtcctgatagccactcggaaccgtagctaccatggaggcgcttctgtgcaacgcgagtcggttcaagggaggtgaagaaggggcaccgtgttcactggtcctggatggaactctcatcgccggcgcagggagctcaaagtcatgccgatagctcgagcgagatggcaccggaccaaagctgccatactgaacctcactgcctggggacctcgccagacctgatcgctcatcgtcccgtggagttgctaccaccttgaccgccttggcctttcctgcctcatccggctctccaccaagcagtccatcatcgttcagtttcaggggtggtggtgtgaagttgtggccgatgttgaagtagatagagggagtcttgtagtggtgctgatcggcctctgcgcgcctggccagcgttggcgtgacggctgcacggttgatggctcggatgactgccttgacgtgcttcttgccctgcttgtagttgagatacttgacgcgccattctgcatggcactcacggcattagtacaatgcctagttgtttctaccatgtgcgatatatctccacaatgcgttgtccgtcgtgtgttgtttggtccagggccgctgggggtcccgctccgtgacgatcacccagcaacgtgtgtctcggtcggcatgtgccgcgcttcgttggtccaattgcacctcacgccgacctcccaggaattgaagaatcttgtacatacctggaacagcgtcctgctcaagctcttttgcgaaccttggccatgctgtcagtaccgggatgccgtcgccatttgatcgcggtgtttttccttacttcatgacgtcaagccaaccatagcgtgcgggtcgcgggatcaggatggggatcaacacgcaggattgagaaaaagtaggtaggtaaggtaatcggtaggtgaggatacctaggagtggaacgagcgtacggtacggacggggtggttcccgttatgcgcctagagatagagaaagattggatgacatcgggcgttggatcaaagagggtgcaagttccaagtttttgggaagatggagaagagctcactcaaaccgcgcccaaggttctttgctaacaatcgcgtcccttcccagtttttctttcatcttttccacagcggcctcggcggtgtgcgcttgcggtacctgaagccaagcctagagaaaacagacccccgggagcgacggacccaccggcagggctaccctacccactcctaaccactgacatgctctccttgccgttccgcgacgtcacgacatgtgtgatataacttgaagtgaggggaaataggatctggtcgaaccctcatctgacctcacagccgacaagatatcgcattctgtcgtttgacgatgctcgaattgcggtgccggcttatccagttcctgagaaccggagctgactcggaagcggcgaaccaccattcattgggcaagtccaaccattgtctcagctattcctgtcgagctatcgatattcaagacactgggttgggggatatccggcatcctgaaccctcagccgacctctttttggtgaatcccttacaagcaccgaggcccggaaggctggtcctggctaggtaccctgcaggttctcacaagcctgttcccaacagccagtctgctcccgcgtaaaggggaaagatataagaaggtcatggctgagctcgtagctgttgtgttaggatgctcccgcaggaacgagtgctactacactagactagctaaccacgacaatcttggcccggatatgcccgcgcggatacgatatcgcgccgatttcttttcaatggcacgagaacgaacggacgacggaagaaatggcacgaggacaccaacgtcccatgtttaaagctcccctcccgcgccgggatcgccccggtcctacgcgatcggatgagaaggccgtttcccacggagggacagccccgccatcgacatgccctgggcacagaccactgtccttcgcttgcatgcaaccatcatgggcctggaaagccatctcattggtcaatgtttgtagtagcgatacaaacatttacctgatcatagatgaggggggagctcttatgcttgtccagtaggcagtgctcgttttccatcaaaagaaaggcattctgctgatacacagcatcgtgggatgcgctagacgccttgcctcgtgcgtggcacgctctaatttctccgattcttcgcgatgtgtgtttccgtcagctggcgaggtatctgccgtgcagcaacagtgttcccctttgggaagccggcatggcgaagaggccaaagaagcagccgggccgctgtggtgcaagccgctgctcgcattgcatatggtcttcctatgtcccaaataggagagcgagatcgcggcaaccaatcgctctgaagccaacaagtatgcggtataacacggaagctcagcctcttcttccgtgagcgacagcagtcaacatggtcgcccggtccggccgcggaggtggtgaatcccttcatgcactcggccactgaaagaaacgttccctcgattgggatttgtggggtttgggcgctgtgatggaatctgcagttggcatatgtatgtatggtaattgtgtgtgatgttggttccgtaatatcgacgttgcaatctgtgcctctgtgcctctccagtagtgtttctgacgttgtttcgtgagtacgccataaatcccccctcatctgtggccggcagtctgagacagtgtgcctattgtgtgccaactctgcagcaattgtcttgcttttcgacgacaaaaacaagaatgcttccttctcccaccaccatgatgatgagtgaaagatctcgatgttgatagaagaagtcaggctgcagcgcatcaaacagtggaccaccccaccccgccaatcaaccccaccatcaagacctgttcttcaagcccagctgagaagcaaacatcaatatcaacacctaaaacggcaacttctttgatagacagctgcagagggatattgaggaagcaagccactgaggtgttcaccgtggacggtatgtgcttcctcgctgcaagatagatgccggttcagagtaccattttccctcagttttttttctttcgagccttgttcagctgtgctgggaggcacaaagcccacttttggtcctagcccagggccaggtttcggcgttttgtcattttcggcggcccttgcgatttccacaattgcaatctccctttggcgtgatttcaggacgtgggatggtggtccggctcatccttcaataaaggctggatattaaggacagaaaaacaggacgacgagagacgaggaaagacggcatcatctcgaggaagacaaagaatcaaggaaggggatctcttatcagtgtggtgagcaaacagcagggaagctttgccggagcttgtcaggccgcccttgtcagtcggagcagcgcagccgcgggcactcggatcatctccacaccataacatcatcggacaaggaaccacttgcccagtctccgcagggcatgcaacgtgggagcgccaagtctcggccgctccaaagtcactcaactcaacctttttgaaccacgcccgtctcactttccccccccccccatcatccatttccacgacacaaacatctccagtcctcctcctcaccttgttgatcttcgatcccgacctgctccgcgacctcgggaaagcttcaagcttcactagacaagcgccaatcagtattgccatccgccgttgctatcatcttagcagcaccactctctcagcggcggccgcccaatcgcccttggtgaacctcggcgtggccgtcacgacaaccaattttgaaagctaaaagtcctacgacacccaccaattcgagtcttgccgtttccctggagataacgacgccatttatatccgcaccgatcgcccctctcgacctcgacgacgctctccgctcctcgcccttgcgcgcatgcttgttcaggcgtcgcatgcgcgaccggccggaacaatgcttgaaactgaatatgctcgccggcgagcccctcccatggatccggcggtgagcgccattgcctattcccattccaggacccgcacaacctcgtcgaacatctttcccgctcactttcaatcgccggccgcccctccaaacaattactacccgcaaacacatctggctcaacctcatgtgcagcatcagcgccggtctcccagtgtaaatacgttcagcaccatttccagcggcggtgccccttacagaaactccccttccatggacatcaggagatcgacctcgagccgttccggcggggcacccggttctccccagcagccaggaggctatgtggccctccttcgaaagcaaaaggctacggtatggtgcgaccgcgctcagcaggaagatgccaggcttctcgcccagcaacgcatggccaaggtgcgggctaactccgaggtggtcggagccaacaacagcccttcgctcggaccggtgagtgccggtcggacctcgaccgggctcagctctgccggcggaaaggttgcggcaaagatcagacaccacggaaaacccaccgttatcggatactccccaggaagcaacttcaacgttgtcggcggtgttcctttacgtcttagtgctacggaggtggagggcgaggaaagcgaagatgaagccaccattcaaagatccaatcaccgccggcaaggtagttccagcaggagcagcacgaccagcagcaggaaaacagcaccaccgtatcgctcgtccggaggcctcggtcaggttacacaaggtggaggaactcggtggagcccgcacggaacccccgaacggtcaggatcactggtggaggacacgcagggcgagcaacaattcgccagcgaggaggcttatgggaaagcaaagagcttcgccagcggtagcagcggcgagcgactggacactgtgcctgacctccaggcaaacagtgcacaggtggccaacaacagtgcgagaaatgcctcgttgacccgcgaaaagagtttgagaacaccagacgagctcaagagacgaggaagtgtggacgagagaacaatgactctcacgactggccgcttgtatattgccaaccccgattgaaaatgctatggagggttaatatggatgggtctttggcgttttgtttctttttcacttttgcttcgcaccaatacccctcttttttcaagggcaacgatcgttcatgggccgtcactcaaagcatagttagcgcaatggattcagtatgggtttcttctggtttcaacataacatacccgccactcgctgtctgttgtttatgctggtcatggcatgtggcatagtatacagtttggtttggagcaaatccagggccggaaaaagcaggactcggtcctcagcaaaattttcaccggatcaagaatttcttttggatacctaacgttttgtgtacacttcccctcttcatgtgacgttgtaggctgctaatcggtgctatggagatcaatcgatgacgacagaatataccagagcaacggttccccttctgagacaatagctaataaaccttgccagaggggtttggcggctattattccggattttggtcgtgatgagttccttggaagtcgatcctatatcacggggtattatacgtgactttggcgcctgcccaagaccctcagctccatctacaatagccgaacttttgagagcagctggcctcaccaccaaaggaaaaacatcgagatgccccgaactttgtattgttgaagaggcgtacagtactttgtcaatagagacaatgggaaggtgaattcgctcaaagtcaagtgctcatgacgtagagagatatatattcagtgacaggcttcaacttcaacctcctccaactctcgcctccacagtctgctgctttcccagtcacccaagtaccccagaccaagataccagccacactacccgctctcaagtccagccacagcccaagccactctaggggtaggggtagtacacacttaccttacgctaatttgacgcgttaccaacacgctctcttgattaaggacgcgcgaccggaacgcgtttctgcccaggctaaaccagggccttcaagcaaattgccaatcattggcctgcaagtgcttgctcagttcaacctctcaacaaccacatctccacctcccgatttgtatctgaacttgcaactcgcggtcgggcttctagagaaatcattttcgacatcttttctcccactgatcagttcaacatcgagcgtatacccggcattcttcaccgctggccatgatttgaaccttgcacttttcacccctctttctttcttcttacctattcgactacataccattctgctgtaataagcatcttggaccgaccgggcgatcccgaaccgcctactgatcgagagagagagagaaagccattcgaaggcattggactccagcattaccgataaaatgaagtccaccacccaggacccgagcaaggatcccaagccgaccgcgtctgcgaacaagaagaggactctgaaggactttttggagccggagggacccaagccaaagccttgcaccggaagtgacagtacgtgttggcttgatgtagcagcaacatatcgatgctgggtgttgacgaatgacttttcaacagaggagaacgataacgaccgccccgtgaagaagaagatcaaatcacccaagaccaccaatgatgattctgtggccaacgatgacgatctcgactctcctccgagctcgcccccgctcatacctcccggcttgacagcatctgggagcagcccgcccgaccgggagacaacagctcctaatacgccctcccgccccccaccagtcatcctgaccaaggcgccagccgatgggccgtccactgctagcatcgatcccacgcagaaaaccggcgaaaagaggaagcgtaccgttctgagtgctgaagagaaggcggccaagagggcggaggaggaggccaagaaggcggagagggaagctgccaagcagaagaaggctgaggaagctgccaaggccgaggaactgaagcgccagaagcaggcggagaaggaggcaaagaagcgggagaaggaagatgagctagccaagaagaagcaggagaaggaggagaaggagaggaagaagcgggagaaggaggaggaggcggccaagaaggctcgcagccaagcgactcttaccagcatgttcggcttgaagtccagcacatccaagaaggaccagccagccgtcaaatctcagagcggtgatgcgacgacctcgacagagacacccaccaagactcaggccagcggacagtctgcttatcaacgaatgttcaaggacttctatctcaaggagcatgtcaagctggcgccagcgccagtccagatggatgaggagactcgggaggtgcagactaagattcttgacgagtacatcaacggcactcggacgcacaccccttcctctcgcttcaatgccatggaggtacttgagcttccgttcaaggtcaaacgtggccgcactttcccgagcgtcaagaagatcatggctgaagtctcatcatctgagtctcggacttctctgcaagctaaccacctgcaggagctcctgaatcaggttccagtcatctccatcaagttctccgaggatgtgcggccgccctatattgggaccatcagcgattaccccaatggtcttggtgctctcaagaagctcgccaggcgcccaatccggacagacatcctccctctggcctacgactacgattctgaggctgagtggcaggaagaggatggcgaagacattgagtccctggatgatgaagatgatgaagacgaggatgaggacatggcggatttcctcgacgatgagaatgacgtggggccctcacggatggtgttttctggggggatggagcctgagagcagcggactgtgctgggaaaaccgcaagcgtggcacatctgagccgaagatgtacaagttgaggatggagtttattcttggtaagcaaccacacatttccccggtcacgccgagccttgctaaccagctgctagacaaacttgaacatcaccacagcgtcgaccccttctccgccgcctactgggaaacctccaagccggccaaatctgagacaggcaaccagaagtcgagcgcagctgcgaaggcgacaaaatcgtcatccggttcggattcgagtccaaagaccaaaaagcagtctgctacacaggcctcttgtaccacgcccacagatgcgttccaggctcttaatgctggaacgcgcaagaagaaatctgaccagccactgccccccgatctgcaggagaagctcaaggctctggtcagagagaggcccacgctgagtaaggtgggagtgattgagctctttatggacaacaatgccaattgcagtaagaaacagatccagaacgcctattctgagttgattgtcagggttggcagggagcacaaggtgaagggggagtagtagacctttggtctcaagcatcttttccatctcggcggtacatgcatcagacgtacatggagtttgggttgggtcaggtcgatatcgcataacagggggggtgtttttcgcgtttttggcgtttttggggaggatattctgcattcttcgtagtcacttggggcgtggtattctggagggactatcatcacagtcacagggcgaaaagaaccacatcttgaccttgacaattgggtcaaaatcaggtttgcatctgcattcatttttcaacggaagattaaaggggacgaggggttgtctagtctgatctgtcggttccttcattcttgttaccgcgacataacagggagttggccctttttgacagattgaggatgactggacaagatgaaaggagggatggggatttaagaggcttgaggattggggtgaaattttttctcttgttgttgtctgagaggttcaagatctgggggctctcatagctactgtattatgttcaataaaggcggcgcatagggaagaggggggggggacaaaattgggttgagggttaatgtttggcgtttaatatgccctcttttcttctgtttttcacagcgaaactaggtatcatgggaggggggggaggtagatagcgagggtatcggctgttttttctttgatttcttgaggtgagggctggtagcctgaggtattagtttaggttgataccagaaatgagtgtttttgatgtagctgtgtgaggtcattgaagagggtggtgagagaatgtgaacaatgatgtatgatgaatggcgagcatgtcaatgacgttggtgtcttggtttagtgtagtgaggtgatgtgatggctcgataaagggagtgtggggacctcgcctcaacttgctatctactcatattgcattccataacacagctcaaatccacatccgcacctccaagttcacgatatctacagtcaaaatggtcaaagacacttccaccgtcatccagtatgcaccatcacgacccttgttacctatgccaacatgcattgacgacagatgtgaacagagaattcaacgaactagtcaacatgacagccccggaactggaagactggctgacaacctctgcctccacgtccaccggctgggcaaaagatgatgggtcgggggagagcattggacacgaaagcgggagacatattgttgagatcttgagccaaaacccggagagggatccgcaggggtatgaggagggggatataccccatatgagaaaagtggtggcttattgcaaacggcatttggcgcaggagggggaggcgaagaaggatgcagaggggaggagttataagagtttgaagaattgggggcatgatgctttgaagaaggagtgagctttctatattctacagtacctggaggatttcatgtggtagaaaattgaagagtggtgaagattgaggaaagagtggagccccacaaagatcaagggtcccggcagttttccatcaaccccagggcttagcgcgtctcgcctctcactaaaaataatgatggaggggtggccgcactcagcactgaccaagccgccgcctggaattcccagggccaatagccaaccagaagctcgggatcagacgccagatcagacgggcgaacgcgcaagcagggcagggcgcagcagcatttggtgttaagaggaaacttgaaacaccagactctcaactctattttcttgttgttgttctctttttcttcatttctgttttttccccccctcccctcccgacgacgctatctcggcgacgacattcgtttttcgcgactgtttacttaccccgccatctacaacaccggtatctaattagaagtaaacaccaccaccaccacgatggctcccacaagcccaccaccaccaacctgggcaaccctcggccgcgcaaccgccctcaccctcacaccccacctcctcccccgagaccactcagtcatctccaaacgcgccctcgccgtaaccgacgcccaaaaagtcaccctcggcgtcatcgccgcctacgtagtcggcatcgccatcctctggaacgtgccctacatccggtggatcctctggcccttcaagatgctcgtcatcgcctttcacgagttcgggcacgcaatcacttgtgtgctcaccggcgggaaggtcaagtccatatcccttgaccccagagaggggggggtgacgcacatgcagggtgggaggtcaggattaactctaccggccgggtacctcgggagttcgctcatcggggcgttgctcacgtttgcggggtttaacatcaatgcgagcaaggttgcgagcattgttatcggggtggcgtttttgatgacggtttggtgggggaggagggattggctcacggtcgggacggtggcggcggcggttgggttgctggtggggtgttggtttattaggggggcggaggcgttgaggtttgtggtgttgtttattggtgttatgagcagtttgtatagtgtttgggatattgtaagtctgacaccaaccacacacacaaacacatacacacacacacacacacacacacacacacacacacacacacacacacacacacacacacacacacacacacacacatacacatacacacatacaagctgggtttgggatggggggtgttgctgacaaaggataatagtgcgatgatttgatcctgagaaaggttaatagttcggacgcgagtgtgtttgcaaagaggtatggggggtcgagtcagtgttggggggttatctggtcggtgatttcgctgtgttttatggcggcgggcattgtggcgggcattgcggcttttccgcagagtgcggagcagcagagggaggatgcgcagaagtttattccgacgaggttttgaaggggtaggaattcttgatttggggtgaggaagttgggacaacagaacagggtaatggcagagttggggtgtacgatggttacttggtcaatcaagtggatagggatatgtatgagctaatgatacccacggttttctttccttcaacagctccactggctatgttgtgggaactgagctggtgacatcttgggtttgatgggtgtgaaaacaacagctggagatcggcagaagaacaatctggatcaagggttgcatccccatccgatcgacaagccatcaacccctgagagcgaccagaacaagactcgttgccaacgccggcagtccctcgtcaaccaccaacttctccccttccaccttccaccccttcacatccccccacaaaaccccctccaccgtcgtcacattcgtcccccccaaatccacctccaccctcccttccaaatccgcataccccccattcaccaccccaaccaaccccttcttcttgtctccatcaacccacaccgccgcgtcgacgacctcaaccctctcattccccctcaccctcgttcccacccccctcggcccctcgacttgatcaccccccacaacaaaccccctcaccatcccccccgtcacaaccttggccaactgcccatgcgcctccgcaaggacagtgctcgtcggccaaagccagcttatgatccccttggcaccatggttaaaagccaaaacattcatcgcgtgctcctcccccacggtggggtccctcagccagtaatcctgcccgtggaaactttgggggttgtggaattttgtcttgggccagaggccgagccagcgttcgtgctggcccaaagtgtcgaggcgggaggggacgtcctggacgatgccgaggcagttgtcgcagccgcagtcgccgtgggtgaggttgcaggcggtgttccatttggagaaggtggcgtttatgccgatggggtagacgtctgacatgaggatgtcggcgccggagctgtactgggcgaagtggtagttttggcagtttagggtgacgacactggggtggtacgggtccagctcccggatcttggatcgggcggcgacggggaggtggaaggggtcttgccagccgtccggtcttcgtgctgtaagcatagaaacgatggggggttttcgaaaggggggttagggtacatactcatccgcggtccagtacgcaaaaagcccctccttgcccctcgcccggagaacgttctcctcgacatagctcaggttcttgtacccatagcggaggttgtacatgtatttcagatcaattccatccatgtgactcaacacctccggaatctcggcccaactggccaggggcaccatccccgtgagccccaagtctcggtacgcatcgatcagcttggtgtcgttttctcgtaggaagttgtcgtgcgaagcgtagaacccatacggtaggtacggctcaaaggtattgttcgaagcggcgttcttcacccaaagcccgcctttccagctgtcgatccgggtgatgctcccgtttgttttatccggcaaatacgagacgttggctgttgccgtccagcttggctgacctgactccggggcgccgtagagaacgaccgggtagggctcaagtctgggggggccgagatgggaaaggttgaactggaagcggttgcctgttgtgttgactggaacagttgcttgaaccaaaggggcgtcggtctcgactgagttgatggagaagacgagcctgccggcccaccgggtcgtggaattggtaggcggccagatggtgccgtggtacggggagaaggcagcgttgacgacgaattcaccggttgtttcggtggaaacgtagaggctgtatcggggctggaactggacgtggaggagagggcagccgcagggatggggagggggttcgactgtctgtccgcctgggtcgaagttgggatacctgttggtgttaacaattatccctgataagatgtgaggagagaaattacccagcttcatacaccttcccgcaccatctcggccaatctgggttatttcccgtctgttgagaattcaccggcgataccagcagcacgcacgtcaccacggttgtccatagctgtgaccaaaccatcctgcttccacctttccaaccgcgataacgttggtgtcattgaagaagaggtgaagagcggggaaggcccgtcttatgagatatgctgtgtgatattgcccacatgcaacccacactttatccgcgggcaggattcgagagacgatcgcgggctggcgcatcccgggtaacacccgcaaatgaggagctcttgtccgccgggagttgcgactgtgtgggtgtaaccttgcatatcgatcaaagggaaaggtcccgttccgacctaaagtctctgttatcatccattgttcgcttctaggagtcggttgccatgagccggaaatgcaaatccatgtcctctccctgtttgatcttgtaaatgtttggttgaagcgatctaattctcaattatgggtatcgtgaagannnnnnnnnnnnnnnnnnnnnnnnnnnnnnnnnnnnnnnnnnnnnnnnnnnnnnnnnnnnnnnnnnnnnnnnnnnnnnnnnnnnnnnnnnnnnnnnnnnnnnnnnnnnnnnnnnnnnnnnnnnnnnnnnnnnnnnnnnnnnnnnnnnnnnnnnnnnnnnnnnnnnnnnnnnnnnnnnnnnnnnnnnnnnnnnnnnnnnnnnnnnnnnnnnnnnnnnnnnnnnnnnnnnnnnnnnnnnnnnnnnnnnnnnnnnnnnnnnnnnnnnnnnnnnnnnnnnnnnnnnnnnnnnnnnnnnnnnnnnnnnnnnnnnnnnnnnnnnnnnnnnnnnnnnnnnnnnnnnnnnnnnnnnnnnnnnnnnnnnnnnnnnnnnnnnnnnnnnnnacgaggaacttcccgaacccgcccgccggagcgagcatagcgtccaggatgccgccgacaagcgtctcgttgtacttgtcctgccaggtggggttgttcgggatcgcaccaccgacagccgcgcccaacgtcattagcagaatcgttggggtcgccaggccaaagtaagagtagcaaaagatcttgacagaagacgtgtcgggcttgaggtaagtggtgaaatcggatgcgaggcacgcccaggggaccatgtacgaagccatgatcatgccataagacagaacagcggaggctttggccggttcggcagggacctggttggcgaggtcccttcctccgcagccggcggcgacgatgatggcgataaaggccgggatccaggcgtagcgctcgtagatgtgaagccacttgtagccgcagaaggagatgacgagggtgacgagggagatgatgactatgccgactgtgacggagaggttgccgtcggctacggcggagaggcattggccaccgatgacggcgatgatgatgcagaagccggtcatggtggccaggttgaggaagacgggaatggagacgatgtagcggctggggtagcggtgtaagtattttgttattgcggagggacaggcgggtagctcacccgaagctgtatctggcttggatcatttgtctcatgccggtttttggtcccaaggttgcgaggtaggccggcaggagggtggtcaacaggacgaagaacaagatgacaagggagctgtctctgagactgagcccagaggcaggtccgatcatgccaaaggcgatactgtttgttcgttctcttgtcagtttcttgttattatgtcaaatggcaaagggtactcacggcaagatattagcattcatagaccaccacaacgtgaaaatattgatcgtcctatcaaccgtcctctccttgacaggaatcggcgccacacctctcaactcaactcgcccaaagacaatggccttgtgagcaagatcacggatccgagtccaagcggcaacagggccatcgttggtggtgactgctgtcgtgttcttctcggtatcaacatcaacaccgtatggtggtttttcctccagcctgtcgtccgtggtggccatctcgactgctcgttgataagacggaaatcttggatgaaccttcaaacttgggatgaaacaacaacaaaaaagacaatataaaaccaagatataaagtcaacccaaaaaatgagtcaaccctacactgtacggataggtatcaagctgaaaaaaaaacctctcttcctctgccgagcccagatctgcttggcttagagcttcgtctctttgaggtgcaggagtgaagatccaagaccccacctccactttgatagcttggcccggggtgttttgagactgagtcaccgtgatcggggagaatggagaatgagacatgggcttttctgctgtgggactggtttgacgatcgaattgaaggactcgggcttgtagaatattttggcgtggtgatgaaagtgccgaagggtagcatcggtatctgtcgggaagtggcgacaaaaaaacggctgcgatgcgacctcgagatctggacggctcccgccatttttgatggagatatcagatgaactcttgttgcttgccatggcttgacataaaagctcaggtttccaacaaaaagcccaatgtaatggtatttcttttgttgcttgtatggttggttactttgatttgatgttgacgtgacggggtgtgtgcgtgtgtgtaccagggttggggtttagagtgcgtatattgccaggatctggtgatggagtaaagtgggacaaaaaagagaaaaaaaaacatacaacaccagggattccccagtggtcacccacctgagtactgatctggcgattagctgtttatctaggggagagcggacgggatcccgagctttcagctatctatggtcgtatgtgattgttaggctctgaatcaaactacatatctggagtctaaggtcgtccatgctttctcaaagatgctacatacaagaccatgtcaaggctattgcagaaccagagcatcgtttttgaatacacaatccccagccttcatggtcgtaccgtcaacctgtacgatgggcgtgcttgatgtcagagtccagcagtccaggcgctcaaacgtctgcactaaagcttcggcctgaagaacggggcgaaggatcaggaatacaagcgtgcttcggtcgttggacttgtcgacttcagctagtagcaaacaggtgaatgtatgttttctgttgccatcgctgttggcaggaaagaacggcatcagatgctcccgctcaactccaaaagacatgggccgtcgatattgctccctgatctcgacagtgtggaactcagtcgtggcgagtccgtcccctggatcacccaccggaacaacagtcagatcgaacagccagcctgtcaccaacaaactctgtggtagctcagacattcccggcatcgacgacttctcaaagactttccctctgtctcccctgccatcaaagtcggaccactggatgacctggccatcgcggaaagcgacatccaccgatgtgatgtaatgtttcgaatccgccgatgaataccaccgttcatccgtaccaagataaaacgacccccctccagtcctcttgaccgacctccacccgatccacgtccagctgggaaactcgggtcgccgcctcagatcactcatcttccacgagagactgacggcaatggccgaattgttgtttggcgtacccagatattccgggacatagattggcagtccgcaaacctcatggatcggtgtttgccagttttgttcagcgtgctgcagaataccccggaaagcattaagaccgtcattggcgtctgtcagatcccgcgtcatgtaattctcaataaagccgtgcagctgctcgacgtaatggaagcccggccggcccctcccttttcttttgctcgtatcgcctgcgaacacgtggaaccacagctctcttgatgagtacgagtatgggtgccagtatgtacctacaagcgcctcgacagcttgtatacactggcactcgtagaagacttggtgatcggtaaacaccagacgccggctggagagaaagccctcctgtaaggtccaaccgcgggtagcccatttggtatggtgaatgtatccgtctggctggggaatgagagtaagagtgtgattttggatgtttatgaaggggtgaggtagacgtcttgtagtggtaacgcctggcagtccatggtccggcccgtctccagccgcggcgataatggtgaactttgccgactggtaaatctgtcccatcgcatggatctgcttttccctctcgtcattgtcgccctgtgggatgcagtaccggtccacccacagataacgaccccccagattcctcaccaccacaatggcatccgagatgacctttgggaggggcccagggagggtcgagtttaccgccaaagtaggcagcccgcctggcgctgctccccacacgtagctcaaggcgacatattctgggggattaccgtccaactgcttgccaactgaagcccatgagaccaaccttggctcttgctctccgtccccaacatccccgcagtcgatgacgcggagggtgtcgatatcgtacttggaataatcccgcatgtagccatcttcacattgggaaaaccaaccgcgcaataacgagtagtcaatccggtccggttctatcaagcggctccctgctttttctttctcggcatcttgtttctcaatgaggatcaccaggtcgtggtcgtcgcgaagacatggcgttctccgactccacctgcccaggcgaagagatatctcaggcaccccgtccgcattgagatattccttgcagtccccggtataataccgagctgcccgagcaaagaagttgcataaatcgcagctctcgatcaagtccggggacaaagtccgcttgatcagtcgcccatcttcgtcggagaggtcttcgggctgggtactctgcaatttgtcgaaactgagcttttggcacggtcgacagaggtgattagccatttgctaaagtggaatgtcgccaatgtcaaatttctgaactgtgaaaaaggtcaggttggcattgtgacacggaggagccaaggatttttggtgtgtgttggtgcctgagaggcagctaaaccaatcagagatctcgcaaatgtgtaaagtcagaaagaccttgccaaggtgttgttgtagctgctacctacctcatttaggtatgcaggactcctcttgtaaaatcgtgatagttaacgtagagcaggaaaaaaaaaaaggtctcagccttttgctcaccacctggtcgacttctctctaagctcaccacgtcggttgacatgtcagcgatggcgggcacgtcaacgtattgcctgtgactgggaagaagatggcctcggaaagcttgagatgagggcaagcaccgagatagggatggatgcacggtctacctatataccagtctcctgtctgatctttctttccgtgttcatgttcatcattcacagttctttcgtgatacaccagaacctttgtgctaaaatctcaccttccgaaccaagcaatgtagaatataacatagaagaaaagacccatccattatctttaaaggcctatcagctgtctttaaatgtcaacctttcacccctcaccattaatcctacatcacaatctcttttattctcgcccacaaacataaccggccacttccccctccccctattaaaccccatgtccagcttcactcccccacaaccctgtcacacctaacactccctgcacgcctcattgatactgtttcattttgccaagtattcacgtcgtgagcgtccacagacagtactgcccggtcgcgtgcactgccgatgcctgtctcatgacactgtacaaaaccactcctttcgactgccggtcacgctcctacgagctgccctatccaaaccctgggaaccgcctgaaggacatcaggatgactaatacagcggggggctcagagaggctgcctacattgggacgcggcagccagctctaggcgagaccttgcccccggggacacgggacctgtggttcagagtctatacctcgaaccgctgaaaggggctcgcggcggactggctaaaaaaccctcctaccatgaagattgccgaccccaactgagaatccccttgagcgtccactgatcctgtcctgttcctggcccacttctgccaattatnnnnnnnnnnnnnnnnnnnnnnnnnnnnnnnnnnnnnnnnnnnnnnnnnnnnnnnnnnnnnnnnnnnnnnnnnnnnnnnnnnnnnnnnnnnnnnnnnnnnnnnnnnnnnnnnnnnnnnnnnnnnnnnnnnnnnnnnnnnnnnnnnnnnnnacagattttgaaaacacgccccgaaaatacggcagggcaacaggaaaatcaggcatcgcagccagtggaaaatcctgcaccgtacacgccgcgtcccgcccacaaagcccacccccatccaccctctgaaccccaacctgcctagccttcaaccccttagtgcaggtcacattcccataattctcaaccttcacctcgctccccgtaaccacgaaccgcaccacatcccccgcctttgcagagaaattcccaaaccccatcccgtcctcatcagcaggtgaagactggtaccacacccaaggagtctgctccccgcctatggtcccatcccaaaagatatccacccccgcacggatgaacctattgttgggacagagagcggaaaacgagtcgatgccgatgtggaaggaggctgcgtacaggcctacggtgttgttcgctgttgggccggtgacgggcatggaggcgtgggggattgtaaaggtggcggtgacggaggctacttttcctgaggggggggaggggagatgggcgccgccgagggttgattcttctgactgggaggagaggatacgggcgccttgggagggaggggagaggggcggcttgtggaggaggcggatggggcgggtgttagtgcggatggggagggggatggcggttgagagggccgttgaggcgagggagagggttgtgaggagggtggtggacttcattttgagggaaggacaagtatggtgtgagttgtttggtgtgtgttgactgttggtgggtgtaagtggtgagtgatgatgcaagtcaaacgagtgatgatgcgccgcccccttggaaagtaaataaccaaaaactaccaacaagaaaaacagaaaacacaaaagaattttccgaaagttcaaaaagaaaaggaaaaaaaatacgacaggagaaaatccctttaaacaaaacgaaaaaaggatctctcgggtgtgtgtgccttgcagatcttcctctttggtacaacaaccagggaggggtgcatgtcatggttcgcccccccacccccgccnnnnnnnnnnnnnnnnnnnnnnnnnnnnnnnnnnnnnnnnnnnnnnnnnnnnnnnnnnnnnnnnnnnnnnnnnnnnnnnnnnnnnnnnnnnnnnnnnnnnnnnnnnnnnnnnnnnnnnnnnnnnnnnnnnnnnnnnnnnnnnnnnnnnnnnnnnnnnnnnnnnnnnnnnnnnnnnnnnnnnnnnnnnnnnnnnnnnnnnnnnnnnnnnnnnnnnnnnnnnnnnnnnnnnnnnnnnnnnnnnnnnnnnnnnnnnnnnnnnnnnnnnnnnnnnnnnnnnnnnnnnnnnnnnnnnnnnnnnnnnnnnnnnnnnnnnnnnnnnnnnnnnnnnnnnnnnnnnnnnnnnnnnnnnnnnnnnnnnnnnnnnnnnnnnnnnnnnnnnnnnnnnnnnnnnnnnnnnnnnnnnnnnnnnnnnnnnnnnnnnnnnnnnnnnnnnnnnnnnnnnnnnnnnnnnnnnnnnnnnnnnnnnnnnnnnnnnnnnnnnnnnnnnnnnnnnnnnnnnnnnnnnnnnnnnnnnnnnnnnnnnnnnnnnnnnnnnnnnnnnnnnnnnnnnnnnnnnnnnnnnnnnnnnnnnnnnnnnnnnnnnnnnnnnnnnnnnnnnnnnnnnnnnnnnnnnnnnnnnnnnnnnnnnnnnnnnnnnnnnnnnnnnnnnnnnnnnnnnnnnnnnnnnnnnnnnnnnnnnnnnnnnnnnnnnnnnnnnnnnnnnnnnnnnnnnnnnnnnnnnnnnnnnnnnnnnnnnnnnnnnnnnnnnnnnnnnnnnnnnnnnnnnnnnnnnnnnnnnnnnnnnnnnnnnnnnnnnnnnnnnnnnnnnnnnnnnnnnnnnnnnnnnnnnnnnnnnnnnnnnnnnnnnnnnnnnnnnnnnnnnnnnnnnnnnnnnnnnnnnnnnnnnnnnnnnnnnnnnnnnnnnnnnnnnnnnnnnnnnnnnnnnnnnnnnnnnnnnnnnnnnnnnnnnnnnnnnnnnnnnnnnnnnnnnnnnnnnnnnnnnnnnnnnnnnnnnnnnnnnnnnnnnnnnnnnnnnnnnnnnnnnnnnnnnnnnnnnnnnnnnnnnnnnnnnnnnnnnnnnnnnnnnnnnnnnnnnnnnnnnnnnnnnnnnnnnnnnnnnnnnnnnnnnnnnnnnnnnnnnnnnnnnnnnnnnnnnnnnnnnnnnnnnnnnnnnnnnnnnnnnnnnnnnnnnacccccccctttttatagggtaccacattcccccccttttttattccccgccaaaagggcgacaatcaattccaaacacagcagcaaacctaccaatcaacccaacccaacacactgcccgttttctttgttccattggttatggtaaaaactcgctggcaaaatcgttcaaacccatcagttggccccccctccccctcccttgccactcccccaagcccaaattctccgatccttggtagtgccgttttctaagtcgtggcctggtatccaacggcgcagcaggcacaaacggcgtggcacaacactagctgtgctcttgatcaacgctctcacccagtaatcaatcaaccctcactctgtgcatggctcggtaataagccgtgctacaatctcgtcctgtcggtcttttgccaatacgaagtcttttcgttttctagaaagatttttttttaatatatatatatataaaaagaaaaggcgcagaaaagcaagccacctttttccaaatcagttttctagtctctccctccccccgtcatcccaaaaatcgcgtgtgctgctgcatgtcttgtgcgacccgcgtaacgtgcaggctgcagctacgcggcgcccgttgtatatacacgggctgtcttcatgcaaggtaccgtcttttctagccggcttaccgctcgtgccgctcgtgtcaaacttcgtatgttcttccgttccccgagcttcattcggtgagagaagggtccggtgtacggtgagctgagaagccccgatgatgaccaccggctagaatatccaaaggcaaaaagggccacgccaacacattgtacaaaaccaccccccgagaaaccgaaaggacgcgagaaagcctccgttcctcgcacaaggttctcccctcctcctccacctcctcccccaaaggctgtgcatgtgtaagagcataaaacctgtctttgtgatgcaaacaaataaacacaacacaacacaacagtctcctgtcgtacaacatcatgcaatgtataagcaaagctagataaaaacagcagcatcaaaacagtatccacaagttcagctgatgccaacgctttctttttgtctcgcaacacaaatcatataccaaagcccttcagagcttagagctcaaccttccaatcactcccaatgctcgcacccaccctcttgataaccgcaaagctcgccctcccggcggccttgtcagcaggagtaaactccacctttgccttccacgcccccttcccgctctcatcaacaacatccacctcggtcttcttcccccacaccttctcctccgcccccacgaccacgatcttgtccaccctcacctcattgtacttcttgagccactccccttgcttgacgctcttggtatccctgccctccttatcaaccgacgtgatggtcttggcggcgccatcgtaaacaaacctgcggttgatgtactgcccctgttcaaagtcatacgagtcgccgtcatccacgtacaactcgccctccgcgtgctttccgtccttgggaatggtcaacaccaaagtgtagtcatcccacttctggagctgcgaagagcggcggggaatgtcacggcgggggaaaatatggccaccacgcatcagaagggggagcttctccagcggagcggcaaccgtgaccgtcttcccggccttgccagaggcaacgacattgtaagtaaagtaatcgtagtagacttcgttgtcagggacgaagatgtcctgagtctccttgttctcctcggtaacaggcttgacgagaaggccggtgttgccgacgaagaattggttgtcgatggggaaaccggcctcttcgtcagggtgagtgtagtacagcggcttgacgatgggagtgccgtcgacgtgggcttggtggaaggcagtgtaccatgatggcaaaaggctgtaacgaaggcggagggcaccagcgatgatggtgttgtacggctcccccatgaggtaaggctcgcggcggcgggcatcaatgtgagcatggccgcggaagaaggggtagaaagcaccggcctggtaccaacgagtcaagagctgcttgtcagggttgccgaagaagccaccgacgtcagcgccggagaaggggaagccggcgatgttttgggacaaaatcatggggatggattctttgagatggccccactcggcagtgttgtcaccggtccacatggcaccgatgcgctgagagccggcaaagaaggcgcgggtgaggacaaatggacggcggagctcgccaggcttgcgggttttgagagcatggtgtgtggcgttgtggaaggtcatgccgttaaggttgtggacatcacgatgctcccagttgccatcatgaaggttgtccttgggcatggtcgtctcgggaccgttaaagaccgaaggctcattcatgtcgttccaaatccaggtgttctccatggagcctttgaacgaggcatacttgaagagggtagcccaccactcacgggcggcaggcttgaaagcatcaatccagtgggagctgcctggccagcaccagccctcaaagatgttgccatccttgttcttgacagccaagtccttggacttgagctcggcaacgacggggtagttgtcggtgttcttgatatgagggtcgatgatagtgaccagctggcgaccgtggctctccaactgcttgcccatgccgatggggtccctgaagctatgctcatcccaggtgaagtacttcttatcatccgtgtactcaatatcgagccaaatgacatcatagggcatcttgaacttgtccatcttgcggtcgacatccttgacatcctcgtccgagacgtagttccagcggcactgatggtaaccgagggcaaactcctgaggcatggtggtggtgccggtgagctcgccatatttggcggtaagatccttgggggtagggccaaggaaaacaaagacgtccagaagaccactttccgagaaccagtgagtgtgggtgctggttttggagccaataccaagagacagggggttcttggagtccttgcccttggtgatatcgacccaggtctcggcagcattgagccagaaaacaccaacgctggagcccttgcggtgggcctgcatgaaaggaatggagccataaagcgtcatcgggctgtcaagaatgtactcgaaaacgtcggcgttgtagagcctgtagggctcgctgtagctgccatccccgccgcgagtggtcttcagtgacagagggccggtgtgagaaggaatgccgtagacatgctcgaagcccgagaaggtgatatcgaggccaacactttcggggccacgaggcttcgaatcggtgttgctgccaaaggactcgtcccaccaggtgctctcgtcctcgcccttgggttcctcctcctcctccttcttctcctcttccttgtcctcctggttctgctcgccctcgggggtgtccttgttctcaaccgctggcttctcaatcttgggcctccagtgctccacgttcagcagcccctggtcgttgaacttgatctggctgactccatcgcgcttaaaatcgattccaaagggagcgaacttgatgacggcttcgaagttggaggtaggtccgtacttgacagtgagctgtgacttgtcttcgaaatccaccttggcttccttgtcaagtgttagccctccaacaataacccatttctcggcttcattgtatcgctccttccgggccttgctgtcatggcgcagttcgatctcgcccttttgcctcttctcttcatcaatcgtaactcgggcggtgccggattcgaggaaggaaacggtcaatggaagccggacggtgtcgccattgtcgttgatagtcttcaatacgacagcttggtactgtccgtccttgaaggacccggattcgggaaggatagagtatggagacgaccacgagttggtggagaggacgtggtcagcaagcgctcggtttcgcgagcagaagcccgactgggcgcactttttgaaatcatgttccttgacggcaactgatacagaaagaggttaatcacaatgttccagagaatctagatacccaagaccacctcagttccctacctgctggtgtaatgacgccggaaagtgtagatatcagcccgagataagctgtccacctcccggacagcgggcctgagaggtgcatggcagcggctagcgacgctcaaggcgctgtcgcaaggcactctgggtgtgctggaaaaacaaagagcaaacgcgataaaaaggagtgagatggccttcaagccctcacttaatgcatccggtaatcctccgaaatgcagcaaaagaaaatataaaaaaatgcgatggcttctgccccaggttcagtgttgggatgctttgagttggcaactgcttcaaagctcccaatctggattggccacctttctcctgagacagggaccgggcccctgctggcgctccgcccatagccaaccctgctgccaagtggcacattgcctggcaccctggccgtacctaaccctgaatgatgactttagccagcgctggtggacattctcgccattgggctccaagatataggctgtacatcgttgaagacatcaacaagccggacgtgctttattcttttcgttattggagactgaacctcgtcaataaccattgctgtttcgttggctatcttccagaccaccccctatcaataagccaccttcaagcatcccgacgagagctacctagttgcccgaccgcctcgagctctcagaaagatcgggtgcctctgattcgacccgtcatgccgagtacagacacagctgttccgagacgacagcagcagcgagatggcggcggcggtggttggctggcgaggtgtcggggcgtgtttgggaacgagtctcctgcattctatgtcctcctaatgtgggtcgttgtgttaacagctgtggtcttttctgacggcttcgaccccacctcgtcccgagcctcctcagctcttcgggctccagcggcttctgaacaaaattccttttttccctcttcctcctctcctcccccaccacttgtcaattctccagcagactctcaagaaccagccaaaatgtccaccgagcagacgtaagtctttcccccccagcttttgcctctttctgagcacccatcgccctgcttttttcgccttggcttgcccctcgattaccccgccatccttgttctctcgtcctgattctaccccgccatttcgcattctcatgaactgacggtgaaacagcttcattgctatcaagcccgatggcgtccaggtacgcgcgagcacggcacagcttgtcgaccatgtttgatactgataatcggtgtagcgtggcctcgttggtcccatcatctctcgcttcgagaaccgtgggtacgtgaactccaccccaagcttgaagctctctccagctctggccatctgctgacaaacatcacacgcagctacaagctcgttgccctgaagctcgtcacccccggcgaggagcacctccagaagcactacgaggacctcaaggacaagcccttcttccctggtctcatcaagtgtatgtgacaccctgcgatgcctactgctgcacctccagctgctgaccgctacccctccaacagacatgtcctccggccccattgccgccatggtctgggagggccgtgacgccgtcaagaccggccgtgtcctcctcggtgccaccaacccccttgcctccgctcctggcaccatccgcggtgacttcgccatcgatgtcggccgcaacgtctgccacggctccgactctgtcgagaacgccaagaaggagattgccctctggttcaagcctgaggagctcaacagctacaaggctgctgcctttgactgggtctacgagaaggcctaactaagcggttcgtttctgagatagaaactgctgcttgcccgtatctgcggcaagggcaatttgactggtcctcttgattatatgtagcacgttagagctctggaaaatagagaccgatttgagttgttcacatgttttgccaatgcttgtgtcttgtctttgaattgttgagcgttatctttcgagaatggtgacaaccaaccctaaccctttgcctctggcgacttggtagctttgggatatcacaagctctcttttccataaccagcctacaaatcgcactttccaacaaccaaccaccgaaccaggacagtcaacctctcaactctaacccaattcccccttggccgtaacgatgcgcccccaccacttttccaatccctcctccgtcagccccgccgcccaatccaactcggaggagtcacacgacctcgaaacagcagcacctttcccccacctccaccaccgcagtcgtcagccaaactctcccgcgcagaaaagattctgtccaaactgccacgccccttgcaaaaatacaccacctctttacggtccgcgcccactacgcacgtgctcgcgtttttgatactgcatgagattactgccattgtgcctttggttgggctggttggggtgtttcnnnnnnnnnnnnnnnnnnnnnnnnnnnnnnnnnnnnnnnnnnnnnnnnnnnnnnnnnnnnnnnnnnnnnnnnnnnnnnnnnnnnnnnnnnnnnnnnnnnnnnnnnnnnnnnnnnnnnnnnnnnnnnnnnnnnnnnnnnnnnnnnnnnnnngcacttgtgtcgttcgtcttggttgtaccggccgatactactccttaggtggtatgaaatgatggattccatttcattctccacggtctaacgcgaatacctcctctagcactggatgtaaagagcggatgtgtaaaaaatatgataatggagcattggagggagaatggtagatattagctggtgatggaggttgttgtggcgtgggcggtttgcaagtttttgttgccggtaaggattggggttagtttgtgggggacgccttggttggccagggggattgggaggtgggggggggttttcaagagggggggttgagggaggatggattgggatgttgtttgcttttagacggtcacacgggtgggcaaggtgaagggttaggtaaagtccattgcttttctccaccaggtggttatgccgcgggattccatggctgaggcaaagtcgttgattgcggagagttcaaagaggccggtgggttcttgggattggttttcgggggatagtgtaagggatggtttggaggctaggtggaagtctttgtagcggagtctcttgggtattgatgagttggtgggttagaagagaaggggaataagggggcttacctggacagttcccacccaggacttcacaccttgttcgctgcctttgcagtacatgatgcctgggcaaccaccgcttcggaggagagcatagacctcgaactcacgagctgctttacggaggtgggcaacctttttgcgggaggtgatgtggtgagttcggatcaaggcatggtagaacggggtcatcatcttgacctgatatcatccacctgatctcttgaggagtagttgttgaaagggttgccctggtcgtgaaggttgaaggtggacagtgcttgaatgataccagtgccagttcatacggtctttgggtgagcaagtgaacatagacatacagtacgaactacgtcataccaactctctcacacggttctctttcacgtcttcacgtgcccacgtgccgcatgccaagccattcatccagttgttcaaccaacgcgactcgtgcctaaccctccctctgttcgagttgtgacagaagtgaattaggacagacaattggagcctgtcagggctgagcaacctgctctcgatccttctgcttctgcctacttgagggagaacttcaaggacatagctccagcgactcgacgactggcgtgttgtttactaacaaataaacaaacaactgattcgatacatgtcattccgacttcacttcagcatgatacttaccacctcctacctataaatgtatacatcctttgttaccggccattttgaaggtccaggacggcatcgctgttgccggggctatcctgaataaacagaggagggaacggacagtaactgggagaaatgagctggcgcagcatctcaagccgaggttgggagtcaagattggcaggcagacgtggatcaaagggaggagtataaagcactgcttggacatggtgcacgggaggattagctgtgaggagaaagctggatggcgaatactgccagattcacattgacctcagcaaggggaaggattgcacacagatcttctcgaagagcggaaaagactccacgcgggatcgctctaagctgcataagtaagttgtcgttttgtagagttcaacatgggctaacatgaacgacagtgccatcggggattccctacaaataggccagccaacatgccctatcacaaaggggtgcatcttggaaggggaacttgccgtttacagtggcaaggtaggtttgcttccgtgcttacacacacatcattactaacatttcgcaggaacatagaattctcaactttcagaagatcagaaagcacattttcagatctgggaccttcattggaactgcacaggattcacagtatgcttctcaccgacctcctctttgtcggggtttgtgctgacatttgtagggcacattcctgggaacacctcatgattgtctactatgacgtccgcatgcttgacgacacaccattactttcagtcaaaattcagagaggttccaaaagctcaaggaaatcattacgatcatcccaagccactcggccctggtcaaacggattcttatcgactgtgacaggcgtacagccaaatcggacctgcgccgtgcttttgccgagtgtatcacggccaagggagaggggcttgtcctcaagtcagatgacccctacttcgactttgacagcatgcgaagaccctatagatgctgtgccatcaagctaaagaaagaatacatcggcaactttggagacattggggccttggcaatagttggcgcccggtatgacgcttcaaaagccagaacctacaacattcctcacctcaagtgggcacacttctatgtgggttgcttggaaaaacagggaggaggttggacggtttggcaaaaagccaaagtttgtggtgaccaacgtggttgaactcgatacaacacaactggccacgatggtggcttatgccaacccggaatgcgtattggtggatgacaactgtcccattgacttgcggaccgagccaggcatcgatgaggggcgacgaccggtttttattttccccacgctacccgtcgtggacctccgctgtttttcttttgacaaagaggggaacactggtttctggagcccatggtttcctgtcgccaccaaagtacactgggacagaaccttccacgacacaatctcttttcaacagctgcaggaattagcagaagaggccaggaacatgacagcccctgagtacactcaagagattctcacttggatcgccaatcttcaagggaatcgagtcttcgagccagtccaccgcaaccacctctcagcggtccttggtatcgtctcggaacaccatgtcccctggcccccggggtgatgtctcgcctcgagttgaccgccgcgtcccaatcggcgctgccactttgagcccccccttgtctttgtcagcctcatagactgcaggccgttcccaggggtatgatagtgcagcaggtaagaacatgaaccatagtcgaaatgattggtttctaacagtgttcagacgaaggcatcgaccgcgaccgcgaccgtgatgtactctccgaggacgctcacgacgagaatacttggcaaaatcggacacgatcaattgaggcctcatgcgggctatcatccttttcagtcctgctgtctccttgcatagccaactttccgtatgttggagatttactcagaagccatggaatccatgagcctgtcatagatgccaatagctggaaggaaaaacggttcgcctcgacgaaaagactggcgttggttgagccccagcgacgtgaggctactcaggccttttttgacgccattacatcgctcgagttgaggaaacgaggcttggatgagcatgagtatatccccatctttgattggagggtgttggagaggttggagacggaggaggccaagaaggggatggaggcgaggggagaaggatgagaggtttgctgttgctatattatggagaaggggaggtttggggagatttgggacaggtttttgcaggggtttgtttgagtgtttgtttttgggggatggatcaggggcatggacatacccaggaggcatggatagatgatgagttttgtagaatacgggttgcatgatggccaatggagattacaacggcggattgcctgagttaagcagcttttatgcatatatctgtgttgcaatgaaatgttcgccgttaaaaagtaaaactgccgtgggtgaggctgaaagtggaagcccaccctcaagcattaaagtggggccagctaggcaaggctgaaattctgggaaattcaacaagctccaccgcgccaactgcgacgcttgcttgttcaacgcgacaagcttcccattgacgacaattcaccaccaccaccgatattcgcaacgaccaaatctgactatttccacctctgcctgtcgcgcacttactatcacatcgaaccaaacgccatatcaaaaccaaaaatgacctccacaatcggcatccccatcaaactcctcaacgaggcccaagtcagttcttcccctcctccccccttcccaatcatcatgctaatctgtctgtttgggtagggccacatcgtaacactggaaataacctccggccaaacctaccgcggcaagctcatcgaggcagaggacaacatgaacgtccagctcaaggacatcaccgtcacggcccgcgacggccgcgtctcccacctcgagcaggtctacatccggggatctcacgtccggttcttcatcgtgcccgacatgctccgcaacgcgcccatgttcaggagcaggaacgtcagggggaggggtgtcgggttggcgagggggagggcgacggttagtagggctagggcgagcggggggccgcctaggggggggaggtaaaaactgggaacgcgatgggaagaagagatatggaaggggagaaagattcgcgtgtggctgggtttatggatggattgtttggtttggcgtttagggactttttttaaaacatggacagcggagaagacagaaaatgaaagatgttatggcgcggatttaaaacatatcatacagcagtactatatacatctcattttagcgtccctccaggcatcaaccctctttagccaggcaatcccctgcccctcaccctcaatctcatccccgatctttcacaacctcctcaaaacctcgtccgcctcctccaacacctccctcaccctctcccccctcccgccacccaccccttccgtcttcacccccctaaacaaaacatcccccacccccctcgccacctgcccctccaccctcttcaccgccttcctcccctcctccctcacctcctcctcccaataccccctcgcctcatcccacctcttctgcatcctcttcaacgccaccaccaaccccaacgcagcaatagcaccacactcatacgccccaaacccactaaagtacaccaaccccgccagcaccgagcccaaccccgtcaaactagccgattggacgaccagcttctgcgccaacgcctgcaaggcagggaccgtagtctcaagcagatactgtctcgtggacgtgatttgaacaggccatttcccatggtgttccatctcaaccgcagtcggccccggtgtcgagaccagcttctcttccgggtcgacaggatagcttatcgcggggctgatggtgggaaatgaagcagctactttaccagctaggtagaccacttcctgctctgccctcggcaaaaaataagacgtcaccagctccgacgtgttgagcgtgacatcatccgctctccaaaacagtttccaccaactaaggctgcgccagaggtggttggaaaaagcagagtcaagccgactctgcagttcctcgtgggccgactgcgcccaagagacaatctcctggtcgaggcgcctgatagttgcttcgatttcgacgagattggcctggttatgctgggagagttgctgttgtctttcttgctgttcaaggccctctttagctcgggaaagaatagacccgatgaggtgctggactgggggcttgatcttgtcggttgcttccgtgttggctctgagccagtcgcggatctgcttgacgttgccttctgtccagagctcgctgaagacttctgctctgccggcgcggagggcgtcaaggccttcgatggcggcgaaggagtcgactgcgaagaaggggaggctgctgttggggtcgaggaggccgtggggttgtgatggggaataggcgtagttttgtgattgaatttcgagctcttccttgaccgcggtcccggatttgaggtttactgcggttttgatcacagaggaagggttggacttggcgagttcgagagcgttgagcgcgcctctgagaccattgcctactaataacgtcatgtgtactgctgaggggaccagagttgtttgcggtgttgatatcactgcggtgggcttggttgtttgtacgccaggtacaagaagctctgcctccaactcctctgcggttttggttgcttgcggcctgaactttgccaacaacagctcgaggttattccggcccaacgttggtgagtaggccgtgatctctggaaatgttgtcggcacttgggtgtccggtgctgctgtccccttctcagatgcctttacccgcacaatcaaaggttcctctgccaaattgtggcgttccagctgtgtctcccatgccgcctgttctccaagctcgtcggcgagggcagcccgtaataaactctttgaagcctctgtgttctcgtgtccattctctctaaccgggttgagtatcgcaacacgtattgactcttgtcccggtggctccgacaaattgcgcaaggcgaggttcaaacgttcgctcttgacgtattcggggatctgtatttgaagctctcgaagcagacgagctagtttcgcgcggggtggttcaaccgcttgctgttcttgcatttgtgtcgcagacggtatcaaggtctcggtcgtatggaaactgcgtgcgccaccggccagcaatctggtattctgttctcgcaatggcaacggtcgtcgtctcgtagtagtagtgaggggtcgtgtagacaaggaacaaaacaggcatatcgacgacgtcctcgttctcccccaggataataatccctgattcttccccgctatctctccccccagcgcccgtttaagcgccaatgtcggcgccatggcaaattgtcgtcgccagaattccgtaggtgatgatgtccacctcaaaatcgcgaattatcacaacggccaaaatgccgagctacgtaaggtcgaggtcaggttcaggctagctccccccggcccgccccaaaactttagcgtgatttttgccggctctttccggcagtttccctgccaagccggccccccaaaccccacccccccaaaccacccccagacttttggggaagctttcaaagccaggtaaccccctgtccatcaaccaccaccatcaccaacgccacctttgtatttcctcccccccctaaacattcacgttaacacgaacaacaacaacaacaacaacagcatcctacgattcaccacctaaaccacgagcgcgtcgtagtatccccccccccctcagtagacctgcccccaaccagaaaatggcaacctccaccgcccaccgccgcctcctccaagaataccgcgccctaaccaacaacccccccgaaggcatcaccgccggccccgtaacagaagacgacctcctccactgggaagcgctaatccaaggccccgaaggaacccccttcgaaggaggtgtctttgccgccgagttaaaatttccgagggattaccccctcgcgccaccaacgatgaaatttctttgtgatgtttggcatcctaatggtagccctcccccctccccgaataagatagtattggactgatgatattgatggaatagtctacccctccggcatggtctgcatctcaatcctgcacccccccggcgacgacccgaaccactacgagcacgcgagcgagcgctggtccccgatccagagcgtggaaaagatcttgattagcgtcatgagcatgcttgctgagccgaacgatgagagcccggcgaatgtggaggctgcgaagatgtggagggagaggaggggggagtatgaagagagggtgagggagggggtgaggaagagtttggggttgtgatgagatgggaagatatggactttggtttgagttgggttggtttgatgttataagcatggcactggttttggtgtttatatggcgtggggtgggggggggggttgggttttaaaatctactggttataatagcggcatgggaaggggagagtgatacatagcggatgggagtatcatgtgttttttgttctttttgcaaatctacccacctggtcaggtctggggttggcacatggtgtgttgctcttctcccaacaccgttggccaaggggactgctcttgctcctgccttgctttttataggtcagggttctggagcacctagtatctgagagtaaaggagtgctccagactggatggcgcatcggtcaaccgcgacagaacgtggattccttcgcaccgccggtttgggtcactctgatctctcggaaactaactcccatccagtgaggccttgagctggaatgccttagttgacggatcgattccttttgaggttcaattttttgtggttttcctctagccaacactatcatccacgacttccgcgagtttggtcaagaccaacccatacgcaacatgcatgatcttctattccatttcttttactctacgcctccctgaagaaccaactccatgctttactcccaataactcccaataactactacagcttattctccgccttgaacttatcccacgcctcattcagcgtgctaaacaccgtcccggcaatcatcctaacctccgtcgtcgcgtcttgtgcaatctattcccgatcacgttagccaaccatctccacgttgcctcatccaagaaaaaaaaaatcgtaccttatcaggatgcgtcttagcaatagccttcatgtaaacaaccttgactttgttcgccatcaccagctcatgcaacccaaccttcttccacccgctcccctcccatagcacaccatccaagctcgtgagcaacgcccgcaagttatccctcttgccatccctccacgccgcgatcctcgcatcgactttatcagccagctggaacttctcatccccttccttctcagcagcttgattcgcctcccgcagtctcctcaccgcctcggcgcttttatgaccggtagcagccgctggtctcggacgagctggggcagaagccggtctcggagcgggtttcggcgcaagcgccttctggcagcgttgcctccccgccgcggcggtggcaccaccaagaccagcctcaacacacgtctgccagacggcgagggcgtcagcccacttctccatctgctcgagagcttccgctttgcgggtgagggccttgccgtacagctcgcgcatgtctcttttttcggtggtgccggtttcgctttggacctcgacgtgctcgccctcgcccctgcccgggccaatgagcttgacggcgttgtcggcgtcctcgaccgcctggcggggttcgccggttttgagggccgtgagggagcggttgcagagcaggaggatggcgagggggtgttcttttggaatggcggcgagagaggaggcgtatgaagcgtgggcggatgcgtagtcgccgcgcttgaagtgggcggtgccttggagacggtgttgggtggaggactggagggcgattgctgatagtggagggatctgacgtggcgggcgagcaggggctggcttgggcattggtgatgaacgggctgctgctggacgaggggcgggtgacggttgaggtgatcgagatggagctgtgggtcgcggctttggtgctgaggaggcaccaaacagcaggtcttcttccggctgcgccggtggtggctgtggctgtggtgtcgtcttcttcctgcgtgctggactgacataggcttgagcaccctcgtcctcggccgcaagcctgccaagtttggcacgtggatcgagaactggccgggagccttgctgccactttggtccttgggcacccgatccaggccggaccgggagggctggagatctgtcacgcgatggcgcgttgctggatggtcgactgtcgacaccggatcttcctgttttcctcgggggcggcccgccaccttccaacatcacggcttcattcgtgacgtcgggcggctccctcctggcgctccctcccgaatgatcctgggcagaccgcatccatttcggttgattcgggtcaccatcttgctgaagttcggcgacggctttctgtacctttttctggcctgttttccaaaggctgttggccgtcttgaaaagagtggtacctacggcagcagcagttttcgcaaagtcactgtccaccatggaagcgggagattggttgtctctacttcttgaggcgtgctcctctcttgcccaagcaggaccaccattccgtgattgactagaagcgcgctcgccaccgcctctggagggctgttctcgcgagccgctttgtccctttgacttggcctgctccttggcctggcggtgggcatcgtccagaagccagtttacagctgcttgaacattgagcccagccccactttcagtaagcccccttctggcattttcaggggtaaatccgtagtccaccagctgagcaaccgctctgtcaaaagggtcatctgatggtctggatggtctcgagggttgtggcggcggtggtggtcggtcatcctcagaatccgaagatgaatcttcaatggcctttccgggttcgggctctcgcgagaatgtcggagctggagttggcttctttttgacctgatccactggcttacccagatcccccagaatgtcaaagtcatcaccggcaggaggtgggggcgctggggtgcttgatttgggcttgagctggttcagcccaaacgggtcgtcgtcgtcgtcgtcaccaaatcctccagaagtgggagccacagctgctggcttaccccacgcacttggattgctcaagtccaagtctggcgcgggcgaaggagtatgggaagcgggtggtgggtagtggctcgagttatcgaccttggtgctggcattgaatgctgcaaacaaatcctcatctccctctgatatgtctgttccctttcgtaatccagattgtacggtcggtgtccctatttgtggcggtggagctagccctggtgaaggtgtcctcaaagagctctgggatccagagaggttccgtcccagcgagtccaagaaacgtccatccccaaagctcgactgggcttgtttccttctctcctcctcctttcggcgcttctctgcctccaactgttcctgccgttccttcaagctcaggttcgcgttactcttggcagggccaaagttgaggaggttgctgaagctgtcctgcgcgggcttggcggtgggaggtctggcgccagcatttccggactcctggactgacagcggcgtgttgcgccccgagttgaagggcgaaggagtcgggcgcagcgaagggtagaggttggaggtcgtggggttcgagatcggcgtcggttgttgcgcgggcttcttcccggcatcgggagctgtccaggtcaggtcgacgagatcatccatcgtacaaagtgatttcggaggcggtcacggcatctggcgtagttggtgaatgactgcttggatcttgaacagggcacacaaagagacaacacgtagtttgtttatcgtgaaccatgcaacaagcaagcaatgtatgttgtagttgatgcgccacaccaccatcaatcaatcggcccctatggaacacgcatcgcctgaactcatccctgaatgcatgccacctggctgaccctgcgtgaccccgctagctagccagcgtgccagccagcgtgccagccttgggcgctgaaggggcagcaataaggtgcggcgcaaatgtggggtcccgtaaaggcaagtcggcccaccagccacacctcaccaccgacgtcaaactccgaagagactgtgcacggttcacctggctttcaggggaagaagaaggggttcagatgccaagacgaggagggtgtggtctggttgctttgcagagtgcaaagacggggaatcgtgcctcgcatattttcaatatcagatatcaccataaataaacaccgtcatccgaacagccagcagcgaagctttagtgatcaactaactgcctgtcttcttggtgtggcactaggaatagatttggatgaaggcatcgcagaccatcacaccatccaacatcaggctcgtactcacacatcattacactcgcacttgcacatccaccgccgatgtctacaaccaacctttatcaacacgtgatcacacttcccacgggcaactgcgtcaatgttgatgcgatgcgatgtgatgtgatgtgatgccaccgctgctgaggaatttatgagctcttttttcttgttggaccaaggaacccgggagagctcgatgaacggttgatcccagtgatctcctagctgatcctcagcacacgggagcgaaattcaaggagaggggaaacggcaaataacgagcggcaacacacggcacgacctgctctgtttcacggtccaccatcccaccaacggctgggctcatcagcaccaagaattccctctttggtagcgccggcaaagggaaaggtgagcgaacatcagaaaaggggaaacaggatgccatttacgaggaaatggtgtttcttgggatgtgccgttgagctctgggcaaaaagacgccatttgggcctctgattggttgcaggtgggcgtttgggatcgggtgaaaaccctggaatgacttttggcgcaacgacaagcttgaaactcgtttcaggaaccatgacctctcgtcattggcttgacccaaagcccctcgcattttatctggcattgcagggtcggcagggctcaagggtaccgggataccccgcttgatgcaacgggggagagcgcgccactgcggccaccagcgaccaatgcggcgggcttgcggcgactctttcatgcaacggtcttcctactaggtgagcactgcttctcctatccatcaatctgatacgaacaccgacaccgctcacctcacttttcactggaccatgcagactgaccaaaaactgttgtgaccaggagagagcggttcaacagcggcaggctaacgcaggtacagcacatgtgcttccaggctgtgtgagatggatgcagccaaggtgcaaggtgggtgatgatgatgattgcggtggagttgtttgcgagagcaatgagattggacggcccagcgagagggcaattacagcttgtccgacccagcatgcagccaccgggacgcagagataacacgtgtatctggtatacctagcagttcaaagatcacaggtgctgccgtcgtttctgccctgacctcccgtaacctcacgacccgaaatgaagtgctcggtctgtggtatatcttgtcttgtccaagatgatatgatagctgagcacttttttgctgtcttgctgcttccagaaggcggcggcatttcctctactcctcctaccaagacccccaagactcttagctcattatcatgggccgtctctgttaaacacaaacttgataatacccaactacaattattagcagcacatcccataccttatggtgacagatccttggagccaggttcaccagcgtccccttaatcccaactgttaaggtcttggtcacccccacccggccaatcacagacggcctttttgtggctgagagccgcttcgggaaagagcgtcctgcgtatacagcaaggggtcccttcccctgtcccgaattccaaggcccccgttttcttcagcggcttgggttttatcttcagcgtgggcgcatgtcttatctgccgtcctccctttgcgacagctcccttctctcgcctttttgcgaacgaacctccaacccgaccgagtctgttgacctggatctccatccatcctctctctctcttcctctctctctctctcccgcaacaacactcccacccaccgctcacgctcacttccaactttccctttgggaaaaccacactcatttcaaatactactcattcattcattcacatttcatttctttttgtgtgttgttttgcgggcctttcgattcttggtgctcttcgtattttctgcgacttacttcccccccaccacgacaacgacaacgacacagtttccgacaatctgatacagaacccagcgcaggtgcctcctcacggtcaactcgacgtcagcgactgcttccagtaacctccagaattgaggagtggaaatagacgtcgtcacgggcttgctctgaatatcgggtggttggactgctgcgtgccattcctgacaaacgacaactcgcctcgactggatcgaattggtatgttactcgaaaaaggtcactcagtcagtcattgcatgacagagccaactttcattggccgccatgcaattttttccatcaaagctgaccagatatctgtctagatttgtcgaaacaccaggatcgttttgtcgtcaagtccccttagcatcttgcctcgaggagtttctgcaaggacggtactttcggcagcaacttctgaaaagcatcaattttcgacccttctcacactccttaacatcgcaactctttttgtttgcaattccaccagagtcattcttttaaacccaatcatcatgaaagtcacaaactctctcgccgcggttctcgcctccgccggcctctctgaggccttctggcgcatggagtgccgtggtcgcgcaggcttggcccgtttggatcccattgtcgcccctggcagggtttctcagcacgcccatgctatctttggttccagtggtgagtcttgcctggctatgcgatttgaacgttgagactttggcggatgcaagtagctaacggggtcagtacaggtttctccatgaactcgggacacgctgagctagctgctggctcgtgcacctcgtgcgccgctgtcgaggacaagtcggcctactggtctccccagatgtacttcaagcacgaggatggcacctttgaggaggtcacacaggcgggcggtatgctcgcatactatctcctcaacaaggacgctggcaatccagacaagggtgtcaaggccttccccaacggcttccgcatggttgccggcgacagcaaccgccgcaactactctatcggcagccgcaacttcaaggatgccgatcccgagaagtctctatgggccatgctcggcgaaacgagccaggaggatctcgcccagcgtgctgtcggcttcaactgcctcgactacaataaaacccccgagggtgccttggtgcgccactatctccccgagaagggttacctcgatggcaactgccccgacggcatccgtttggagctcatgttcccttcgtgctggaatggcaaggacttggactcggccaaccacaagtctcacgtcgcatatcccgaccttattacggatgggtggtgccccaagggatttgacaccaagcttcccagtctgatgttcgaaatcatctacgagaccaacaagttcaagggaatccctggcgagtttgtcatggccaacggtgatgctcagggtatgttttgatgttttccgaacttgaacaagtcactgacaattgtaggtttcggtttccacggtgacttcgccagcggctgggacgaggagttcctccaggatgctgtcgagacctgcactgaccccagcggtttgctttcggcttgccccttgttcaaccttcagagcgaggatgagcagcgccagtgccagattgagctccccgaggatctcgtcaacgagaaggtcactggaaagcgcggcaaatctcttcccggagatgttcctatccgctatgggccggctcctgctaatgtccaggccccaggagcggaccagaccagccatattccggttcccaccgtcacctaccagcctgccgagtcctctgcctaccaacccggcggtatcttcaacggcgacgcccccagctccaactcgagctcaagctctgaggaggtcaaggtcactgcccttgctcagcccgagcccgagcctgagccgacccctgctcccacccctaccccctccgaggctcccctcccctccggctacgaactcgttcgcaccgagtatgtcaccaacggcaaggttgtcagcaagattgtcgtcatcgagaccgtcgagtacgtcatgctggctgctgccaccgagattgagaccgtcaccgtaacagccactcttgatgcccagaaggctcgccgcgggctcaaccacctccaccgccacaggcacgcgggatcgcactaaaaaggcgggattgatttctgccttgtagtgttatgatccatgatctaccagctgcacatatgggttatggtcacatcttttttctatctcgcccagtctttttgaagaacaggacttgcggggtggcttttcttcacttctcttcactgtggatactaggggattattttgtggttgtgtttttctgacatggaacctggtatggggaagggggggtggtgtgggttaaatgggtggaaaaatgggagcattcagcgaaggcttttttattttatccagcattatgaaatgaaattgaggaagttttcttttcttatgaactattgcctcttgatgtcatgttgttatgtgaattcctttttgcttaaacttgaagaagcctaacaactgccgggttgttcttatccaaaccagaggcctgctgcaggaggaggatatctgcaatgccgttggggtaacactttatcacaaaagcctttctcagaagactttttgttaccagagtgttctttattaaattaaacaaaaaagattaaaaattaaaatataaaaaaatataaaaaaaacaaagtaaaaagaataataaaaaaaaaggtgactctaacgtgtatctcattgccatacatcatcaaaccacaccatgacagtcaaccccccaaccccccccccctacctcctcctccttcccccctctcttccctgaagatctggcgccagactcagctgcatgatctctggtcacccccctcaacctcaaaggctcaaataaaaccaacaagtcaacaaacaattgtttatatcaacatcactctacctaccttacctccaccaacccatcccgacaaaaaagaaatcccacatttcactcatgtttacctcatttccctcccccattccagtgcccatctcgcccccatcagtatgtcatgacggcatgtctcaactccccctcggaccccccccccacccaaggcctggaatggcgttgctcagcacgactacattcctctctcttttctctcctctctgcctgaccacccgacaccctttacttaccacccccgtcgcacccacataccannnnnnnnnnnnnnnnnnnnnnnnnnnnnnnnnnnnnnnnnnnnnnnnnnnnnnnnnnnnnnnnnnnnnnnnnnnnnnnnnnnnnnnnnnnnnnnnnnnnnnnnnnnnnnnnnnnnnnnnnnnnnnnnnnnnnnnnnnnnnnnnnnnnnnnnnnnnnnnnnnnnnnnnnnnnnnnnnnnnnnnnnnnnnnnnnnnnnnnnnnnnnnnnnnnnnnnnnnnnnnnnnnnnnnnnnnnnnnnnnnnnnnnnnnnnnnnnnnnnnnnnnnnnnnnnnnnnnnnnnnnnnnnnnnnnnnnnnnnnnnnnnnnnnnnnnnnnnnnnnnnnnnnnnnnnnnnnnnnnnnnnnnnnnnnnnnnnnnnnnnnnnnnnnnnnnnnnnnnnnnnnnnnnnnnnnnnnnnnnnnnnnnnnnnnnnnnnnnnnnnnnnnnnnnnnnnnnnnnnnnnnnnnnnnnnnnnnnnnnnnnnnnnnnnnnnnnnnnnnnnnnnnnnnnnnnnnnnnnnnnnnnnnacgctcctttagcaaccacactccttcaatcggatcccatcataaccacagctccaacagcagcaaaaaatgccaccaaacaacaaccccccccccggctccggctcagcctcccaatcccttcccccttcctcccttaaccccctaacctcggccaccggaatagtagtcatggtcctcataaccaccatctccctcggcctcgcaattgccctcctcctcctctacctccgcaagcgcaaacgctccgcccaccgcagactcgccgcccgcttaagcggcatgcctgagatccgcgctggtgactccacagaagctgaacggtcacacatcaccacccatgcccatcaagagggtagcagactccaaaaatggggaagcaaggaagcgttcgaggttgttgagattagtgcgccgagtctagcgagtatggctattgacgggggggggcagaaaagggctaggtcgcttcctgttttgtggggggggaggagagggagggggatgttgaggcggttgacggaggaggaggaggaggagagggggttgagaaagaagagaaagggggggaacaaactttcgaggagccaatcgtgtgcttggcctagtgagatgaagaggctgggcgagggtgacgagaacaaggcggagggggggttagtgaacgaaactactgctgccgcgggggttgagctgcctaaacggagtttcttccggggcgggtcgttgaaggaaagaggggagagggggtcctggccggtgagggagttgaccggggggttgtcgagggtacatcacaccgttcatgggtatccttccggcggtgtgtctgcgtggggacggcagcaggaggagaaggagagggagattgggcttgggagtgataagatcagggggtatgggtgtttgaggttggggcctgggtttgctgatggggcggggagggtgttgcctgagccgcctagggctgttgtcacggggggacaagggggaattgtgaggagtcatactgttggggctatggttgggagttgtggacagcagcagcagcagcagcagcagcagcaacaacaacctcaagtgcagccgagcgttgttccccctcctccgccgcatcggtcgctgcctcagacaccgccgagggctgtcgcgaggaggcggtcgagggcgcagagtaccgattcgacattgtcggagattttaaagtcgacggagaagaggttgagggccgggagtgcgactggtggtgttggtcggggaaggcatatgaggatggggtccttgaatgctcgaaccgtgtcgatggcggggacgagtcaagagtgcctgctgccgaagaaggggatgggtcacaaacgacaggactctgaggtgtcggccgtgtctgagtctgatagcttggctggtgaggagagcccgattgagaacccggctggactgacgtcgcccagtcgcagtgggctggttcgaaagccagcgcaggagcagccccaacaggcagaaaggcaggtggagatggtgatccaatcgccaagaagctccatctcctcctcgctgtcgacagtcttcagtgaggacgagatgccagacgaggtcaaaaaggcaatcatgccgttggatggctttgtcgttgcaccccagcccgccgccggtgtccaagcgcctgccatgaacgaccctttcatcacggcgccagttcctctgccgctgtccatcaacagatgttcccccagcaccatctcggttgggttgagacaacagcccaaaacccaaggtctgttccgagaaagccttgaacggtccaccatacagcgccgaatgacactcgcaagcccaacccaagatctcatcctcgcccccgggcccagtgtaacccctggctcaacactcattcaacaacaagatgataacatcccacgaatcccagccggccctctcttcctccgcctcacaaaaaccagcaccctcagcacaatccccatcctcccacctcccgccgcccccggcccggtcttcagccaacaccaacaacgccgcaagaccctctcccccaccaaaaccgtctccttcgccgacgacctcccccgaatccacaacgtcccccgcccatccaaaaagcccggcatcaaaatgtctccctcccaacaccaactccaactccaactctccctctcccgcaacggcaacagagactcggcttactcaaccttttcggcggaaaacgccccggcgagcgtgctcaaaagatcggcagaggtgaacaacgccagcttttttgccaactcactgttgtttcctgacccgctcaacctcaagtcaacagcgacttccccaccaccaaccacagccgccggctctgagggggagggggagtcagaagatgaggacggtatccccctggcggatactgtcgcctcgctgaggaggatgaactcgcagatgtcgacttcgagtgtgacctcgctgcataatgagaacccgaagcggttttcggggactatgcagaattttcaaaagaggaagtcgattggggcgaggaattatctttcgcttggggggaatgttgacactgcgaggcggaggaagaggagtcagtcggttgccaatgggggcgggggcggtggtttgcataatagatctaactcccagcctgccttgccgcagcataggagacaggggagtcgagggaacggaggtggggcgatgaacgcctcactcagtcagaccagtttggggagtccgagggtgagtagggaggttattccgctggcgtatccggtcgagaagcggcaggaggggtgggagtggggtgggagtgtaggggcggggaatgtgtcgccgccgcataagaggaggaagccggggagtgtgcatgagcggaggcagagtttgttgagggtgagtgtgttggagacggtgacggattcgtcgcctggggtgatgggtggtggtggtggtggtggtaacaaggagaatgatggggagggaggaccgttcaagttgccggtgagggaggagtttacttttcatagtgggtatgctgggttggggggtggtgtgagtttggggcagtttgggacgccgagtagggggggtagggggttgggcccgggcccgaatagtgtggagagtttggggttgtatgataggcagggatttttgattacttcgcctgtgagggggggtgctggtggtggtgggaataataatggcgggtcgccgttgagggggttgatggtgcagcaggatcggttgcagagtagtccttcgaggttgagggtttgagtttggggtggagggggaggtttcgtatatcagcggataccacatgtttttctgttttcggtatggagtttgaaggttgggtctggctttcttattataatacacgttataatacagtttaatactcatccagctgtgccatttacatctctggccatgttctttctcctattttgtatgtatggcccctttctttgacacaccagtacattagcacatcatcgtcccaatacaacaacacaatcgtgttaacataaactataattgtcccaacataacacataatcgtctcaacataacacataaccgtcccaaaattgaatgttaatgataggcgtcacggcatcaagttacatcattcactcactcgcaactcactcaaagaatgtataacatccacagtcaaatcacatcaccaccactttcaggccaaagttaaaaatcaacacctttattccctttcctatactgaggtgttatgatcccttctccccaccctcatcgtctgagcagtagatgtccccgtcccagccaccgcaatgatcaacacatacataacctcacaaatcgaaatcaacgccccatccacttttgtccccttctctcctcctctcatttatatcctcttgcccataccaagtgaaaaagcgatgggcgtggggttatgaaaaaaaaaaccaaaaaaaaagatgaaaaaaaccgcagacaaataaacagaaagatcaacgcagacaaataaaatcaaatatcaaaaaaaaacgctctatattaaccacaacccttatctgcctcctcccactgccctaataaccctcttatcccatgaccttctcctccttcctcctccagacgtttaccaacgccggaaaaaaatcgatcatgggcgtgagcaaacggcataaaaggtgtcgtcagcaagcgtgtcttttttacaaaaaatccgacacaaagttcaatgttgttgttgttgttgttgttgttgttgttgttgttgttgttgttgttgttgtgagatgaaaagatgctgctcaaatagcaccatcatcctcgtcatcatcctccatctcgtcatcctcatcgccaccgtcgttgatgtcaatgttgtcgaatttgaagcccggggtgctagggggttgagcaccgccctgtttcttgatgcgctgggggcgagtgggtgtagaggaggcagaatcgtggagaccagggagcgcattatcgggagaagaggaagagtcgagatcgataacgttgccgttggccgcgtgctgggccacgacctggtcgttcttggacttcaacttggccctttcgccagtcatgaggttcgaccactggcccggcccaccaatctgaccagccatcttcttccagggcgagttcgccttcggcttggaggcctcctcgtcgagagcatcgtagttaacttcaggcgagtcgacgtcggaggatgaggtgacaacctcgggtgagtcgagaaccttgggcaaggcgggggaatcagcatgggggaagatgagctcgggctcatcatcgagcgaggtgacgtccggctcccccttgaccttctgcttcttggtgggggacttgtggggcgtcttgggagcaggtgcggcggcagcacgctttctggtgggagcaggcttcgcaggggaggctctggctccggtggcggctttggcagccttggtggtgccgcctttcacgctgacgccctttcgaacgctgtggccgccgttctggagatactcttcaaacgcgtcggcagggtcttgtccgctctcaacggcctccttaagcacgttcgcctgctgcttgatcgctctgaagtggtactgaagaccttgctccgtggaagcaccaaagtacttctggagatctaaacaaagtgttagtcatgtaatgtcatctggatccaagcaagcacaccttcagcccgaggacctcctctaccccacacgttggaggtgatcttggtgaaatcatactccgagggaggagggccccggccctctttatgaagctcataagcaagacgaagacccttcgcctgagcgttgacaccacggaagcggtgctcggcggccgaggcggtcatgcccaccatggcaccaatctctattcaccccaccaaccaccgacgttagtgactgctctagactccaaggcaaaacaagatgcgccgagcccagcaatgagccctctgtttacagcccgaaagtctagaacaatccggcggtgagcggctcagggcgggtcacgtgaaggtcacgcgagggaagggtaggagaagaaagaaacaaacatactcttgtaatcaatagacatgttctggacttgactcgcaatgagagcagcgagcaagcgctgttgggtttcggtactcttgaaatcggccttgcgcgacatcttgacgatgatgtgtacgagccaagatgtccagttgtaggcgggagggcgaggtcggtcgagcagagttggatgtggtcgcttgagaggcaaggtgtagtcgcagctgtttatttgagaaagtaagaaggtgagccagtgatcgaatcttgagaaaagagaagagacgcgaaggtcggtctgtagagttgagggaggtgggggagagagcagaggtgaataaaggaaaatccggcgaaagttggcagggggggagatagcttaaatagatcacgtggtgatggaagagcaggattccgccaaaggactctagatggaaagaacgatcgatgactgcggcttgtaaacagctcctcgaactcgatgctgctggcttggaggggtagccacctggctcagatgttgtcacgctctggacagaataactggcactgcgagttagcaaagcgtatactgacagtaaacttacacctctccaaacagggaataggcctcgaaagatagtcaacaggcctcaaaggatagtcaataggcctacaaagagagcaaggacgcctatcaactgtcttccgaggcccattgagcatgctccaaggcgtatcaagataccatcctccgttgacttactttttcagtgtccagttcggtatgttgtccacaacgtgggtgtccaagccagcagtatcgagctggagccagctgtttggagcctggcggtgatcgtgacttgaggccaagcggtaatgtcttccaaagctccgacgaagaaattcttcagccccaagtgagaaactcttgagaagtatcgaaagaagaggaagctcagacgaagaaactctgatgaagaagaagccctgatcaagaaactctgacgaagagaaaagctctgatcaagaaactccgacgaagcaaaaagctctgatgaaaaaggagatgacagggggatagaggcaaaaaaaaagggatagaggcaaaaaggaaatggggcaaaaggaggatagtaaacaaaataatgtacatacctagcggtgatggtgttttgcccttggccttggtgtggtggctcagtgcttgggttcctacgagagaaaagaagaacagaagaaggacagggctgcagaatctgagataaatatagttgtgggagaacagaaacgggcgcgggccggtctgtgtgttaaaatgcaggactgaagctgcggccgccgccggcacggcgatgccgtggatatgaattctaaaaagaagataatgcgtctgccgggttgacaatgttgttgatatgggtcctaaagagaaatgaaatgcggtggcggtttgtatgccgaacaatgggatgggacttgagctatgtccgctaccggctcggacgactggatgtcgttaatatgggtctcagaaaggaaaaaaataacgtcggaggtttgtatgttgaactgtgggacttgagatatgtccgccgctggctcggatgaagctgtcgatatgggtcgtggaaagaaaaagaatgcgccggcgttatatgttgaactgcgtgacttgagctgcgtcggctgagccggttggatgatattgtcgatacgggtcttgagaagaaaaagaaggcagctgcggtctatttgttgagatgagcgactgaagctcgctggataatgcgtcaatatgggtcttagaaaggcggtctgtatgttgagatgaacgacttaagctgtgcatgtcaagctagctcgatgatgttgtcaagatgagtcttaaaaaaactcaagattgtgaaggtagggacactctgtatgttgagatgaactatgtggggagaaaagaatactcatgctaagccgtgacaaactataccactaggtgtttgtctatctccttattctaactttgtgacaaggtaagcaaagacacagactcgtgcggtagagactatgcagcgagcagctaagtctgctcatctttcccttgccattcaatcaagctattcaggcaagtagatagataattaggtgctttgcttcattgtcattgtccatagaggactcgacgggcagccaggggtatacgaaaggggtgaatatactacaaggcatggagcaaatgctgagatggacatgcattgctctacgtaggtgcccagtagacttcaatcggaatgtctgatggtagtcaatggaaaggcacagtagccaataaggctgctgttacactgatgttgcgctaacatcatgctgcgatgacttttgcagtgttgatgttgaaggtaagaaaaggggtagcagtggaagccaagaaaaaagcaaaagtttgctccaagttgagaggtattttgttatagagatgaaaagaaatcagactcaactaaccgataacttaaagactgatgcttatttctgatagagctggcgattggattgttgtatgaagctgcatatgtttaaacaagcccgtgaacaaggctgcaactgaaatgggtcagtcgctgtggtgaccaaaatcaataaaggaccacatgtggacacttaccacctcatcaaaggcgtcgggttttgcagcaaatgccaactgcttaaagtgaacgcttcttaatctggcgggcgacagctgctctcggactcgcgatggggcttaaactggctgttgcagaggtgatgtcttcatgggaaaaggagaaaatctccagcgctgaggctggagattcttggtgtttctagccccactttgagagccaggggtgaagagggactggtcgcctggttgccaagaacctgacagttggagcctcgaaagccagccttgcaagttatcatcaagatgccggcattggatctatcttgacataaaacagccttctgatgcaagtgaccagcagacttgattagggaccgaaggaccatatcggcgccacggcgagttcaggatgccatcgatcagaagtcctgttctaacagagcccctgcacatatggagtgagtaggcgatgcgggtcttggcttccccaacccccaatgggttggtggtgttcaaacgtgagtgtttcaatcatcacatcaaaatttattacaagatctatataatattatgtactcgttgacatcattcatgtcgtcttttgagcttggagcaccgaagtacctctgcggcgcccgcctgcaaaaatatcggccttgggctcggcccaagtcgccgtgctgggcagctcatgctccttgatctcagttgggccttttccatacatccagtattgaaccccaagaaaggagtcacagcaggcctggaagataccgcagagcttgaacgcccatgggatggtcgtcttggaggtgaagaaccaaaacatcttcatgctgtcaccgagcagccagctggccaagacggagaaccggaaacctttgcaggaccgggacttcgcattggcgataatctgtggcagaggcagtatagcctcaacagcgagcccgatgtagccgatcaaggaagaatacccctggtacaccgacggaataggggagagcaagagctcgcaagccaccaggccgacaaacagggacattataaactgccagtatctgctcccaacgtcagccagcgatttctttacattatgatagtgtcgagaggaacacacggcttgggagacctccactgccaaaagttgaacggccgttgtctctctcgctcatttattttggcgaaggggacagcagcgtcaccgccctttgacgagggcgcggggcgatggtcgagcgcaatcttgagaagaacgacctgcatgacggtcataacaagcgattgtataaggagggcaatgtcgaatttggcaccagggtagtagaatatcctgcagggctggcgcgttagcaggaagcagccaaaaaaaaaagacacggcatctcggggaccacgaacctgagcagtgaggccacaagcatgatgaggggtatgtcgagcgagaagccggcgctcgactttgcgcggtgcatcgagtaggcctggtcactgtacgagagcagcggtgacagcacgaggaaccccggggtcagataccccgacaaggtggttaaccagctcatgttgggttggttgatattgttccgttcgttggcgagtgttgctattattaggggagcgcgggcgcggtaaggtaggcaaggtaaggtatattatattcgtcgaagggggaggacgttcgaagggacacggaggcgtctgttgtgcgctgtgcgctgtcgcaatggataaattgtaggttgcagggacggcgggctcgtagggagtgcccgagacaagaattggacgatggatggaaccggaagttgaaatatggtgttctttcagacgcatgccatccccgatgaacagccctgtaaacaacccgcagcaccagaatcaagaatcggaacaacgaagatagaaagaatgaagaaaacaggagacgcgacgggatcctccaattgcaaattttcgggcccggtctagaggccggcagggtccaacgccgaaagccagaggccaaacaccgttcaaaatccggcccaaatggatccagaattacggagtcccaacagcgcacacgcgacaccctgaccagttgaccccacgattgaccgagccgccctgaccagctgtcacagagtagcctgacagctgccagcgatttatcaactccttaatgggcagcttcaaccaccaccatcgatcgctctttcacttgacatcaatgaatcaatcactgccttgaaaactttgaacccttttacttgaaacctttcgctgtccaacttcctgcccaaaatgcgtttcatatctcatcgacttcggcatacctgcgttttattgcgaggatttgataagtcagataatgacgatgttcggggcggttcgtcatgaacatacgacctgatacaggtacctcttgtgcaaatcttcaacctctgcttgctgcaatcggctgacacagtatcaacagctccagaccggactggttggcagctcggatccttactcgagcctcacactggacagtatgatgccactacatgccaggccaatcgggccccctacttgggaccgtcagccatgtattgggatcgcagcataggacgaccctttgacaggcaatgagttccgatcactgcctctaaaaggacggcacatccatttctggcacagcggagcgcgagacggggctctcatcaaccgaaccggtgtcgacaagaatctacatcgccctccgcctcgtgactcgggataccagctcctcggatttccggatatcaagccttcaggagtcacagtacaactgctccatgtcgctgatgggaggaatgcgactacctacgcacacagtcagcagcacggttcgcctgaaaagacccttctcaacacccacctgctcggctccacgcgacttccgactatcgaggctctcctgagaccgtcagacactggacacctaaccagagacctacagacttccaaatcacctcaggctgttttcttctggtggaattgccccttagcgattcgactcccagccggggacctggaggtcttggtcaccctccgctagacccagcctacgcctgtgccgttcgttacgacgactgttcaacagttcggtgagtatgcacgctgtctcattgaatgagctgtcatgcaagagtaaccggaaaaggcacatcacggagaactcacccccacccgcatatcgctcatcacatgaagggtttggggtcgcaaagcgtcaaataggctcatctcctcgccatcctcttgaggctttgccaccatgttgcagcagagtcggcgattattgctggatggcttgcctttctggcactaacgttcaactttactgccagctcacagcagccaatggcccacgccatcaacagagaggatgggcgtgagagacagaggcctgggaacacaattaccagaacactcccctgttatcccgtcgaaatgcgcggtgcgctactgccgttcagcaagtgccggtggtgttgggcgtcaccaattcggagggtttgctaccacatggctgacaccagcccccaaccatcttggcgcgacaaaggtggtggtgagacctaacttttgcacaagtaagcttatggcctggagatgcatttcaaacactcttcgagcatgctacccgtcccaatgccatgggtcccgggagaactggacagaccataatcgaggctcattcagcgcccggcgttatcacggacgaggcgtctgcaccgaacccggtttgctggcacatctcggagcccactcggcgccattccgcggctgaagttgctggggcattctcggacctgctttttaccctacaccgacttggtctacttgcagtggtgtgccatgaagccctatttggttcgttcttactgacagcaagacaggtcagtacacactgttgacctgccagacggttacctttcagtctttccgtggcaatatgcaagcgccccgtggcaaaagctcaccaaatgatcggcccgacggcgaattcgcggacgaaggtcagcaatcgggtcccccggcgcggccttgacggcgcggagcgcccctcatcaaagcaataacctattgccgaaccggtgtcgtccgcttatttgcctaccaagtagaccatcctcagagtttgggtataccaatacccatccaagatcggctcggatatgctcagccggctcatttgcttgacatacggcgcagactctgcccctcattggttcctggccaggtgctttttgtccattatcctgctgccgacgaaggacctcaatggtcacctgttattggcgactattttcagctcactttccactcataatgctactccggctgccagcgccggttgacaagccggagcggagccgtattgcataacgttccatagtcttaccaaaccgggaacgcttctactgttggcgcgctcgcatatcacaacagtatccacgacaagacaacgtcgggactacagtatgtggtactagcttttatgcatgcatactgccgagattgctgtatgctgtcatggaggcagatgcgagacagactatcgaaactctcaacatcaaggcacccgtccttccccgccaaacatctggcgttcttttgtcagcggtagcagcgtcttgcttgcgccaaagctcaaaggaatgctggtcaagatacatccttgcgcgcttccactcgtggtctctcggacgatgtcaacaaattgtcgtgtactttctatttgttgccgaaccttcagaggagagagacaactatgcatcacgccgtcgaaaattcccggtaccactctgcaagatgccgcaagctgcattcggagttcgccttggtgagctcagctcgactatgtcatcacttggtgtatcactagatgctcattgtcactatcagataaggttggtacggatgcaagccgggttggatgtataccacctggctataagagtgacaataagctatgattttccccaaacccggggcacggctcaggatcttttattagagtctgggcaagatgcgatggtggcctggagcggcagatctagttctcgtgatatcctgtttgtcgggctggagattgggggcccttgaaagtaaccgtcacctcgtgggaaaaggcatcacctccgcgcggcggcggcctcgcgacgccgtgaacaacaggagatggtggttaattcatctgatatcagccaaccgaccctgcaggaatccgagttcgtccgattgtcccatgtcggaggaggttctccctctgtcaacgactgcaggaggaaattgcatcggtattgctcatgcagcacgggcaacttggagttcacaagagttagggaatggtgtgctgcctcccccgcttctctgcctcgcaaagttccaatgatgtggccctctcgcatagcccagccatggacgaggacctgttcgggcgatgcacggcagtctccaagttgcaccacaggatgcggaacgaaggctgcaagtgccgtggaaaagctcggtgggaacttgcctagagcttgaggtggacgaaaagggacaatgtgatgataggcacggatagaagccaaggaggaatctggaggtggggaagaaactcgcagggcaaacaaggcaagggggtcagaccgttacgctggggccgtgccgcattccctgtccagcccctcctcttcttctcaccttgacggagcgcaatgccgagaacgatgcatgatgcggcgcaatatccctgccgaggcgagagttgggagggaaggctctcctctcagcagacgagtgtgctgcggtagagctgacctggtcgcatctctgccagctatgcgaacacaggctaattgctgtttctatattgcccggtccatcgccatgacggaagacgttggaacggccacacacgaggcacaggcaacgtgatttgttaccggagcagcaatgagctgtcaatttactgtgccgctcgcaacccatcagacccatcatcacggtgaacgggagaggattgcggcgtccgcgcaagaaacgagggggacaagcattcaacgttgtcgtcgaaccgagggaggtggtgaagagccgctaaattacgcctcccgggcacagacagccgatgatgccttggccagggtctcttgggctcgatcgtctggttcactctcttgtttgggttgactgttgtttggttcctggggttgggtcgccgacctgaaccaacaagacgacgttgatgtctgtgtgggctcttcgacgttatgccaggtagtaaaagagagacagagacaattgcttcactgtcgggccaccgttccaacacccatgccggctctgctcggctgctgattggcccaaggcgagcttccagcgttgcacagcacacggaccagatcaagagtcgaaatcggtgttcatctggatggagcggtggtgtatcgggtcctaaaaataggctgcgcctctggacacattgagcctagttgccgttttgctatgtcgatggcggcgaggcggcctgttatcgccctttttttcttcttttttttcactatcccagcagcgtaaccatggagcgtcgagatgttgctccgtctgacagatagataggtggcacgctgcggcatttgcccaaagggggctgccatcgatcagggcattatgcatcatcctcaccagacagcaccctcaacaggcaaagatgacgcctcgaatccagagtgcgagtgcatcccaaaccccaccacccaagaccccagatgcccaggcgatggtactccattccgacaatatgttgcactcggctccgggctcacctcattcgtcgaccaagctcgcaaacgaacaaaaaacatcatgttgctcaacacgccaaaccgcggcattggcaacggcgatctcccactgcattaccgtcggcaccatcttcccgctccgcaaactcatccggccaatgctgcgtccatcggggctcgtggtgccgtggtgtctgcagctcagcaacagtggttcctcagcccctcgtatccggacgcaaactctaccatctctggctggcccagaatccaagggagccacaggagcgaagtcactacactagccaagagtgttggatgcagatgccgccaccggctggactcccacttgtaaattgcaacccggtgacgtcgggaagaaaggttgagcgctcttcctccggaacttgatcctgaagcggaagctgggcagcaaaaagaaaaaccttgacgccctcgtagcaacagcaagccacgccgtgttcagagacacccctcgcgtgtcttgtcccaaaatcgtaattctagaaggccagacgatgagcaatccttgcctgccaagccgtgacccccggaaagtctcagggcaacgcttccggggggcctggtttccgtgctgtctcggcgtgctgggcttgctccgtgcgttgcgccgcgccgggggacgaccacggcgggctaaccaagaaaagtgccatgctttttgtattctcgtgattggaaagaatcatgttcttacccactccggggtcccgcgggggttcggcagtcgagtcaggagaagggtacactgtatgtatggaccagccctcgctcagctgaacggtctgagacagaggagagtgacagagcagagcacatcatccgacaacgaacggtgatgcgaatggccctcatctcagccatcgtgcgtgtacagcaaagcaaaggacccaagctcacgacatatcggtcgatcttagcacggcttccctgcccattattggaagcggcagcccgaagcatgatgctgacttatattgcagttttggtagtatattggggggtctgttcgacgttgattgagactattagaaagagacaacccatcatcaacccacatgggtctagtaatgtcactctgcagacgacggtaggtacctagtggatggtgcttgctcttcaggctgcaggctctactctacgacactggtggaagtgcctgttgacgtgggcaacacaaacagcaagttacagttagagctaccagcccgtgatttcggagccttcttgatgtctggcggatctcatctcatggcgatccggccagcacacacgcaaaagacacaccatcacggacctggaggtgggattgcatgacacgccgccgcaggggaacacgaagaggatggcatagtcagcaccgcaggcaggtgacccagcatgtttgagatggatgagatccagttacctatctgcctgttgtgatgaacgacggcgttttcgccggtcaaatccaaaagaggctgacggttgggttggatgatagtggaggggcacaagatccgtctcttggcacaccatcttcaacccggcatgtgtttctgttttcctgtcgaagtcgcgtacctgggagtcgaggtggttgccgcatcactacatctgcctctgccgtatgcatacacaacacaacacacacaacacacacaacacatcataacacaggcagcctcgtctcgcctacgtcgaagtcctcaacaatatcgaaacaagagatactgcggtggtcggaggtgctggcaacgatacggtacttctcggcggcatttgtcgtccgttgctccaccgcagcgtccacccagactgggccctcgctttccccagactgttcaagggtgagcaacggggagcaacgggcgaatccaagactgggctcaaaagggccgatcaagcaactcccgatcaaatccccaagctccgccatcccgccaagaccgcggctacccatagggattccacttctcaccttgtgatccatcaccaccgcaacgcggatatacgccggtgttgcaccttggccagagccctacacgtagcatcacggcacagccagcggtgcagagatgaacaatgaaaagaccggccagttctgtggccggatcgtcgccttctagagaattccaaagcaccccctacagtaccgcgtatgtacctcggcggcacaggctctctctctctctctctctctctctagccgacgtggttgcaccagatattcctcagggaaagaaaaggaggttgaggcaggggccaaaggctcaacaaggaagacgatccaacacatctgcacgaagttccgtgaacggcaaagccttcttcaagcccagggaacatccacacccgaggcgagcctattggctttccaagaagtacacacgtttgacgatgccgccgccgccggactgcgttcaacgtcaccgtcaccgttcccaagcaagtgggggtttggagtttcggtcaactcgcattgtggccctcggtcaagctcaccttgctcctgatcaggacacaatttctcttgacttttgcgcatcattgcccgcatggacgtgtgtgtctgcgtctttgcccaccaccgacatacctatgatgcattgacctgggcaccaccatccattgctcactgcaacactgcaagccagttcatactcgacccgtaaggtgagatggtttggagttgaaaataaacgaggcagggaatcgccaaacgaatgatctcggaccccttttttacacatattcacgccaactgtccggactttcgccgaagggcaagaaaaaaaaaaaacacggacctctctctttctttctctctctcgctcttcaagtgtggttacggaatgtttctggaagggccaccaacaaaacagctcacacatcctgtccgctcagaaacattcagttttggtaaactgaccgtcagtgtagcatcggctttgttgcaaaaatgcgacgttgatttttctacgttttgttaaccaggttaccatgtgttttttttttcaccagtcttcccccccttcgcttgcttgtcttgtttctatttgggaattgcctgggctgggatgagccctgtgttttttttctggagtgaaaataaatttccgattacgattttccggtaacatcacgacattccgcctgttggggaacggggacacaggcgaaaaggtctggtgtgacgatggaccttgatggcaaggatagggctgggagggatgggtgggtaggtgtgggtgatattgagattttattgttgcgcaccacccgtgacggcatgttgtggtttttatcgatcggtttttgggggaggggtttgggtggatcatatcattgatgatgtgatgatctctggggattgtcattaacacaccacttgttacactgtacagacaaggtaaggcatcatcggttatcagcctcctcgaggcgtcgcctcggatggaagcatctcataatgggctcaataggtcgctgacgatttaataacaactcaaacggcatactatatgcatgacactaatacccttttcctcgtaaggctcgacaacaacacccactgctcttttttttcttcttcaattttttaattttaattttttttgggtgtgtactgactgatgactgccgaatggaccttgactatattgggacatttgttaatatacttcttacacatgcactgcatgtcactatagcacgccgcatgcgactatacctgtcattcagatgaatgagactgactgctgagtggggaaaatgtcttgaaaaactctccgatgtgtctcttgtctctgccttgtgaggttttggatgtttcttttcttttttgtttttgtttttggcgcttggaaagaggttacacggcaggttgacaacccgaagccgagagggaggaagggggtgagtgatccgatcgtcgctttctggtctcttgttacttttccattgcgcattcccatcaattctttttaaaaggggatattttgggtcagaatctggcatgtgaagactgagctggagatttaacagcaggtgatgtattgtatgaataccccatggctgccaagataagaaggcagcgaggccttctgtaaagtaaaacgcctcattgtacgtttggatgctgaagcaggttgaagtgggccaaaaaaaaaagaaccctgcctaggtactcaaggggttctcatgactaaaagagcatgggatctttgttaatggggcagcaagagacatgcgacgaagtcacggaataggacacatgagtacctactcgcaaggcatccttttcgacggttcaagcgaggcagaaagccaaatggaaatgtcccagccacgataagcatgaggttcaaaaagcaggtttcaaggctggcttccgatatcatcatccggcggcgttttggtccggggaaaggcccagtcctgtaggcatgtctcggcagtgttgcttctgtcgaaatatacacacgccggatgatgcattgtgcttgttttgagagtgtacattggataatgtatcacacctgggggtggtggaaatgtaaacaggctggcaagatgtgatatggatatctcacgtctcacagcatttgcaactgttgggagttttaaatcccatcgttccctctacgcgatcacgatcagataggcaagccgacgcgcccagtgaaaccacgcagatttgccctgctgagtgatgatggtgtgtggctgtcgggatttgtgggtgtgggagagtcagaaagatgatatcagcgattcagccctatgaaccgaactattggcaaggagaaaagggcgggggcacacagacacacacatgggagtgtacctatgtgagttgtatttttctgaacgtgtgaggttctgtgagaccttatcgcggcttggatggaattggtggaataataatgtgaggatcattgatgagtcttccgcctctcctcacccggttctaaacaagataccgtccgtgcttcgtccctggcctggaagtgatcgttttcggttccggattctgggaatatgggttttgttagccccccttatttttttgtcttgggttacctttttgttcggttcagggtcctcctctgaccccttcctcctcatcagtgggtgatttcgttggttcgaatcgagcgcggagctgcttaccctgttgggagatgctgatgaatgcttggcacccttctcgtctttggtgcgcttggtgactgactgttggtaccggtagtggagtgggatttcgggctacgttgccggctcttggggaaagagaggggaacacaaagccggcttttcttgtttgtcgaagcttggggggtacgctatttctgggctgggtaatcgaatgattcttggaaagaaggaattctcttttgccatgtgccagtcaatgcaacttccgagcgtccagatagtttcatgcaggcggccctttccagcagcgaggaaatttgtctgcgtggcggcggtttccaaaagaaagggggaaggggctcactcacctcggtcgatggatgtccttgtgtccggaggagtgcagtacgaagtgctcgctgccattggtcagcaaggaaaatctaccgtctctgacgaagaaacggtcacctcggcagatctccttcgcaggccggcgctgtgcggcggttggacccgcctggcgccgttggccttctggataccgtgcggcggcataatataccaagtcaatatattgactcgtcaaggcctgcacattgtcgcgcccggctccaggaacacaggatgttgcatgccggttgccagttcctaccaccacactcctcgctgtcgacgtcgacgagcagagccaacagtgtggcatatccaccgtgtcccgcgctgagcaacgaagaatgggctgacgggtggggtcgatagagagccgggagcgtgtccgcgaggagaagcctgctctgtctggcagcgtctggccggttgttgtcttcaaagacatgcatcggagaaaatgagggcgggggaaagtgcggagccagccaaccaggaggccgtgatgcagaaccatcgtgttccacgtgcgtcaagctcggctgttggacagtctgagactctgagttgtttctctctattctgccctcagcgcctcagctcctgcacgtcgacctgtcgacgagtgacgagtggctgggctggtcgggaatcgcgaaatcagccggacgatgctgctgctgctgctgctgctgctgctggcggcacccgcagccagtatcagccaacggtggcgtcgccaaaaagaccactagcgactggagatgggggagagatggcgtctgctgactggcgagagcggaccggacgaaacgggatggcgtctgcggaatcggcgctacgcaagtcccgcgcgaaccagcgatccttcatgcggcaggcgtcatataaaaataaagaggaagttccgtgcgtctcccccacctggttgagaggagatgagatgagaggatggggacagcagtcgaggcgaggggatcacagagatcagacgaaaaggggacactctcacagacactgtcacaggcggctcgctgctgctgctgctgcgtgtgcctgtagagttccaccccttgaatcccaggggactgggatcgagctaacgacatggatgccgagcccgtccttatcaggcacttgctattacatgttgtgcagggttataggcgacggccttatttgttgcagcgtgcactactgcggtagtgtgaaattgcacttatcgtgttcatcataagaagccggcactcatgacacaggcggggcaccgtgatgccacggggatcctcacccgggatggcgggcaatggagacggcatggatctgacgtccggctgttgagccaaaaacgctaggatcttgtatctgaacagtaattgttgcggtctctcgcttgttgatacacaggaggcgggtggtagctagcttaattaaatagaagtttgcgaggtttctagtttctggtaacgagagctcggaagagaaagacaggaaggatggagagattcatcaatatagaagcctactgcagagtcaaaaaagaggaaggagcaattcatgatgccgatggaattgccagtttgcagtttcccgtgctgtcaatgccctggcccacaacgcacccacctgccgagcgagccccgcctaaatttcccagcagtctccacgtccacctcctgcttattgcggcatcgcatcgcatcgccaacgacaaaagcccgcgaagacaagacaagcacttggactgtgctggtgccctggtgcgtgcggtgccggcgtgggccgtagatcggacgggcgagccccggagccccgtttgtttcccgattttgtgaaatccgattccaattacgcgattcgaatgacacgcattttttggtccttttgtattttttattattataggcttatgtcccatcagcggtgccgacagacagcagaagcgggtacctcactgcaaccctcgttggctgggcacgccctctctccttcaggcaagtcactcgcctgtgtttctctcttccttcgagagccgtcccaagacagcgtcgcagtcgcgggtcgccctgcgccgcgtggtaccctcgcgtcggtggcagaacgagttccagaacaacgcgcggaacggctggccgaccaagctgaaagggggggtacagtagggtacggggtacgtcctgatgaatgtctccaacggttctcctgctgaatacctacttcggacctacagactcaactctccccaatgctcgccagctctcgccaactctcgcattcggtgcttcaccagcgtccggcgagccaagaccacaccaagacagtgaaaccccgctgtgaggagacatctgggtgaggccattcccctgctctgtcgacaactcttggcgactgccatcagcggcgggcgctgcctggagcccctgtccctgtcccttgctggcactcccggtccatcacacactccttccttcttatcttcccgaaccctcttttgcctcgtggtagccatccatcatcgcacatcgcttcgccgccgcctggtgagatgcctcaccaccagagccaagccaagccaagcacaggcgtcgcccagcgccagagggacacccttgccatgccgactaacacaagacaaccgttctcgtccccgtctcctcacacgcccctccgcatcctccaccatcgacccacccctccggcccttcactctcactctcaaccggggagagccacacaggaggaggaagggcccccatgtaaaaagtgtctcgctgatgacggtcgtttcctctcagtcgagcttcgtggattccatctgatttcccttttgagcgccgccgttgcatattccagggtaactgtctcactgctcatctcgcaacaagaatctcagaacgagagagaagtgagagagggcaacgccatgccgcactgccgaaatccatgggcttggagctagcggtttgctggagacggggtcctccccccagtggtctggcccaccagggtgggtatctgtgtgggcgcttcctggagacatgttgaacaaaaaccatcatccaccggcccgagctgcgagctgacctgggctgcactaatcccatccaagctccgtatgacttttgtactctcaatcaacatacaaagcactgggcgcccgtcccatcttcttgttttctttcttcttggcccctggttctgctactcttcccaagcacaccttgctgtgcaccttccaacttgccctcgtccaccgtccaccgtccacatacccttacctcggtgtatcctacggcgtctagctttagagtgccgccgacagaacgtccgtctgggtttcttgctcgctgcactagattgcatacaaacaatatcgagtctagtttggctgcacataatagtggtggtctccccctaccagccccgccccccgagcgtcccgtccgttcactcctaccctccctcttccctccccggctgcagcaacaggagacaagagtcgacctggaccgacaacaacaacaccaggagcaaggccaacaaagagtgagaaacgagactgtcctggacgcacgacaaccctgtctttcgtacatgctttctgcacctggcctatctggtctaccctcctctgcctcgcagtaattgttcgttcaattatccgggatcggtgccctcctcctgctggagcttggcgtgcccatctgaataggcggtcgtgagttgactgcgccgcccctgtacacctttatccggtgaatatctagctaccggcccccttcgactcttctttgtcctactgctgcgacaaaccaccatctacaacaccctgcctcaccacacacgcacatacacacactgtattgggtgtcacagctcggacatacactcccttccatacgcctccaacttgagagagtgtgacatgacacggacataggcacggtcatagaatacaactacacaaaggcccatatcctcgacatatctctcaatggggattgcatcctgcctcgaacctcgattccgtgcggccaacccaaacaccccacccgaggtgctcacaccagactcggcctcttatagttcaagacagtccgaggagaggacctggaacccgcctgctcctctctctcctcccatgtcacactatgatccggccgtcaaggcaaacgacatgtcgtcgtcgtcgtcgtctaacaaaggcccggaagagcgcagggatacggggtccgatcataacgcaccaaggcaacagcttccatctttgagcagcatctttgggccaccaacccagattcgatcctttcactctcctctttccgagcgccctggctcctatccggccacctcaccattggatcgacctcctagctcagttccaagcttggacagaccattctcttcgtcatcgtactttccacccgcgacgacatccactgcttcacagccgcgaagtgtactggaccctaggtatcaggaacggccccagattccggccctgtcccgggttttccctggaccgctttcgcctcattcacgagaggaacagcaaccaaggccagatagccgactcgagtacacttcaggaggacaatggtcggtgcaacatgaagccagcaaagagtattcgctcggcagccgtggagaaacgacctacaggccgacggcagagagataccctgctcacctttcagggacgagtcgcgatgagggaagacacatggaatatcgggagcaattaacaccacagacaccatcgcacactcttcctgccactccgaccagcagcgccccatctgagggggcccccgcaaaggatggactgggacccaagatctggacagggacacactttctgccacggttcgtcagagctgccgaggtgcctggtgaaggaatgtgctacttttacgatgatgggagtcattgcaagacagtgattgacggggagcaagtcaatgctcactggggagtcaccaaagctggaaagccccggaagaggcttgctatcgcctgcgtcacctgccgtgagaagaagatcaagtgcgatccggattacccgcgctgtgtccagtgcgaaaagttcggccgtgtttgcaagttcaagaatgcgtgagtctagaagcctgctgtctttttctgctattgtgcatgggggcctgtttcgtatgctaaactatggttagtcctcgaggtggtcacaacgcttcctctccgtccacgcctcctgccgagtcggaggatacacggaggcttggaggtttgatcagaggccctaccgactacacacgaccgggtagccactcgagcggttctgtctcgcccagaacgacgctccgacacccgagccccgatatgcccacctctgcacccgcgaagcgtattcgaattggctacgatcactacagcccagcgaccagtgtacgctcaccgatgggaccagtgcccgacacctcccgccaatccctgccatggcggcagtcagaaacgctccctcgtatccacgaggacatcttgtgcagagcgtggcaaacagacccgtatgtgtccgatcctgaatctgtgactagcaccattgcctccgtctttgtacacacggagagcgcagcacttcgcttcctccctccgaaaccgtctttccacacatgggttcagaacagcgctcacagaaaatcaccagaagacctgatgctcgtgtatagcatcctcgccatcggtgccgtcctctcgcgggccggttcgaggagcgttgcgcacgagtacgcccaggtggctcggtacgccgcagaacgctcgcagccgtcgctccagctggttcaagccagacttgcccttgccatgcactacctcgctgtctcgagacagaccgacgcgaacgacatgctgagcagggccatttctacagcgatgtggctacagttgaacgtggaacttgaccatgtgggagaaaacgattcgagggtaaccctttggggtttgacgaggcaagaatatgccgagtgtcggagacggatattttggtcatgttgcctgatggagcggcttaacgagacgtttgcaactcgaccggtcaccatcaacaaggacgacatctttctccggctcccagcagcggatactacgaacttggacgaccgagcgccccatttcgacccgatgctgcgtccgctatccgaatcagccggggctggaatcatgtcctatctgattcagatcacagctatgtggggtgatgtcatgacatttatcaacagagcctcgcgccggggagagctctacgatgccgggtttggtgatttccaccgtcgaactatcgccacccttgatgcttgggagtcttctctgccgaaaaggctccagtttctgcctgcgaggttggagatggtctcacctgaagatcagggcccgctcatacttttacacaccgtccatcacctgacgagaatcaagctccatcggcacgtccacctgcgagctttacagcccgccacagtccatgactttatcggcgtgtctatgaaacatgctgccaaactcctcgaggtggcagtggcagtggcgcaggcacaagtcatcaccccgcccccgttcatcagcaccggaatcctcgaagcgatggacgttctttcatcaaccggctgtggatccgagctgccggggttggtcgacagatttgccgtggcgagaagcgtgctggaggtgcttgggacaagctgggaggatgccaaggttcactgcatggcgatggatcaccggctggaaagactgatcgatctgggcgactggatgggcaagcttggccgagtgggacgggaaggcgtcgaggttcaaggcacgagggtgtttgaatctgagacggaagaaggcgtggtggtgatgcggtggcggatgcctgacgggatggacaggagattccccaaggagatggatcttgtttactcgagtgttgtgatgggaaaatgatgtcggatatgagacggccatgttgatagacatggtttggggggcgactttttccattttcctttttttcccgctcttctttttttacactttgtatacctagcgggttttcgcatgggccatttttatttttattttttggtttgttattttgtttagcatgcatgcacgatttatcattgcaacggagttttttggctttatgggttttggaatttcaaaaagggatggaagggatggaaggagggaggaggaagatttgtccttttttctttttttttctcattgtctatatctcttgttgccttttttcccccttctctctcttacacacacacaagcttataccctatttttgtgtcttttttttatcacccgttttgttatttacaacacacacctactacctactaccttacctatctacctagctacatatcttgatggagacacactatcatcctgaattctttgcctcgaatgggagggcgggggggggggggaaggatgattagaaatgtaaggggaaaaaacaaaaatgaaatacaaattgcaagatttggttggatgaaaagatctgacttcgggccttcnnnnnnnnnnnnnnnnnnnnnnnnnnnnnnnnnnnnnnnnnnnnnnnnnnnnnnnnnnnnnnnnnnnnnnnnnnnnnnnnnnnnnnnnnnnnnnnnnnnnnnnnnnnnnnnnnnnnnnnnnnnnnnnnnnnnnnnnnnnnnnnnnnnnnnccctccctccccccctccccccttctcccccccctcctcccccctccctctcctcgccccctcccccccttcccccccttcccccctctccccctcccctccccctccccccctctctcctcctccccctccccctccccccccccccccccccccccccaccccccccacctcattctcctcccccccccccccccccccccccgcgcccctccccccccccccccccccccctcctcatgcttttcttttcgaccgttttctcgacaatgcccaaggaatttcttttggggcggttgggggcgtacagaaaggatcagatcgtgggaatgtgggaaggtgggaaggtgcgggagggtcacatgaaccaggccggggaaaggaaggaaggaaggaaggaatgggatgatgatggttggggaggtgagatggggctattggtggccttgtcgatagcggtaagtagaacgtggtagtgtacctacaggaggatttgggatgggtggaccagtactttgaattgtgcgaatggatttggggtcacaaccgctggaggagaaatgggagatgctgcacacgtacggatacgacagtacgcgcttggaggctgacagacgaggtagacagagatgagcgcttgagtgcaaacgtggtgataataatgttgcggggaaattcaaatgcgagtcaaccaactcgatctttcatgaattgaaactccagccagtcaaagggaggtgagagttgccactcaagcacggttgatcagagcctttcttttcggtgacgagtgacatgttcaaaaacagtgacgacgtcaaactcacgcactcccgtctttcaaaaattgaaacacccgaccgaacattcccgtgccacaaacagacattaccgcccgtagcagccctgagaccaaaaacaaaaaaaggaccacgcagcagaagattccttccttcaggcttccatgcaggattccatgcaagccaatatcttatgagtgagagagtccctgggtacatgaggctaatgcatgcagtgagaattaaaactcaaaaattcgtgtgtgtctgtgttggtttttttaaacatgcgacagcatggtgagtggtgagtggttgatagcacctgcctattttggggtggaattttgagggaggggtggtatggcggtaaggaacgtgctagagaaaaaagggggggaggtgcgatgaggttgattttagacgcgcgctacccgcacaggttttgcaggtgtgaggttctgtgggatttgttggggggaatagggagggctgtgttgaaggtacatgtggatttgaggtgggtgagtggtttctgaaacgattgaagtaaatgggttagttatcgtgagtaaatgtgacgatgaattggagggagggaatttcgaagctgtgaatatgggacagagccgaggataggtgtaaagaaggtaattctggttggatgctcttgctttggctatgatgatgatgacaaaaatcataggacgccagaaaatttctttgatctcgctccaattcaacccctcaacaccctgccaacgtaccctacaaacttctatctcatcattatccgcctttgcgtcttttcattgcagccctctccacctttctgttttcttccaatcactcttaatatatcagatgaccaggaaacaagccataaatagaagtggccataccccacggagccgccaccaaagcctaatgtgaccacctgcaaatgtgttagaataggtatacctaaacttacatagggtcgttctatggatatattccaaagtacgggccatttcttggtcatctaacctactttccgccgcatccagcctcttgacatattccgatctcaaggagcacccttaaattggggcttattctccagcatatctcttatctgcctctgcagcgcctcggaatgattttatcatagacatctgccaggtcctccaccagagaatgcgtcaagagaaacttcaccaaaggtgtgcttctacccgctcaaagccatcatgtaacggtcactccaacggcctgatacccgtaaattgatccaagggggtggctatataatgccctctagctttccgcaacttctcgcagatcccaggtctgcgtcagttcctccttgtaagtcaatgtgtctggatgttctttccccaacaccttctcacgtagctgtagcgtctgccgatgcatttgctcggcctcctcgtatttcccctggctattaagcacacgcgcaaggttgttcatgctggtaagtgtgtcgggatgctccttacccaacaccttctcacgtagctgtagtgtctgtcgatgcatctgctcggcctcctcgtacttcccctggctattgagtatatgcgcaaggttgttcatgctggtaagtgtgtcgggatgctccttacccaacaccttctcacatagctgtagctcctgccgatgcatctgctcggcctcctcgtacttcccctggctagtgagtatactcgcaaggttgttcatgctggtaagtgtgttgggatgctccttacccaacaccttctcacatagctgtagcgtctgccaatgcatctgctcggcctcctcgtacttcccctggctcttgagcacacccgcaaggttgttcatgctggtaagtgtgttgggatgctccttacccaacaccttctcacatagctgtagcgtctgccaatgcatctgctcggcctcctcgtacttcccctggctcttgagcacacccgcaaggttgttcatgctgttaaatgtgtcgggatgctccttacccaacaccttctcacgtaactgtagagtctgccgatgcatctgctcggcctcctcgtacttcccctggctatcgagcacaagcgcaaggttgtttatgctggtaagtgtgtcgggatgctccttacccaacaccttctcacgtaggttccacacttcaaattgcaacacctcggcctccttgaagcgaccctgcttataatagcttgtcccaagctcggccatggccgacataatgccaggatcatcctctctctgcagtcgttttcttctttctaaagcttgtgtgcgtaattcctcggcctcgtcgaaatatctatcgctgcaacaggttgaggcaagtctgagaatagccactatggtgtcagggtggtcctctccaagcgtccaagtccttatttccagcaccttctttcgtaacacctcagactcctctaagcgagccagatgggtgtaggtttccgcgagatcggccatggagcttgctgtatcaggatgttcattgccatataacacttcgtaacttttataaaccttctcctgccaagttgccgctgtttcaaaatcctgattctccgcacacgacagcgcgagcttggacatcttttcgagcgtctctgggtgctcttcgcctaggtcattctgaagtcttttcacgtcgtcctcgagctgccacactagcagacgttgttcggaaggtgattgaagcttctcacgcgatgcctctgacaagagctccgggccgagttctgtaacaagctgatctaggccactgtctcgctctttcgagagatttttttcttctggagtgttttcaggtgagccgtcccattggtccgccgaactatcgcctggtgagatgccttggggttgacttgtcttatcgttaataacatgagtcgtgctgtcggtgctgggagctctatcctgagtatgttgttccaacgactgcttttgcgacggtcgggagttggtagcagtagtcggcgagctctctagcgagttctcctcgccaggactggcgtccgatgggcgaatccagtgttggtgccggtctttatgtctcttcaggttgctcttcttcttccctgcataggtatactgacaacccggccagtcgcatgcctgtactcctgatggcttctcctcagagacgagctcattgtctgacgcttcccagtgtttcatggtgtccttgtgcctcttcaggttatcccttcttccacgccaccagcagcccggccaaccgcactccacccgatccgtgtcagaaatgttgttttcttgagcataatctgggtgataggtccatatatgtcggctgatgtccttttcttccgacttgctggtcgtgcaaccttcaacagggcacttgtgaggttgtatgtcctcacttgatggatcagtgttgctgggtttcgagggtttggactggttggcgatatcaggctgcgaatctgccgctgccgtacctgggaaattgacctcgtcatctggggcatgtttccagtgatgagagttatttttgtgcctcttcaaattatccagccttccacggtagttacatcccggccagtcacacgccgcgggaacctcgcttggaatgttgttctctcgagcataatcgagatggtgagtccagatgtgccgatccaggtcttttctttcggctgtgctcgcagcacagccttcaacaggacatttgcaaggtttttcgtgaattctggtgtgcttcctaaatacttgtcagcgtggtgattcttggggagtaaactgaacgactcaattacatacgcaagataatcttctcttccaaacccctttccacacgtgtggcacttgtaaggttgctggttttcagcggttaatgaatctttgtcttgatgcaggatatgctcttcatttgagtgccattccctggattcaactccagataatggagagcgccatgcaagtaatttgcccattccagtggcaccaatgagactttcctcggccatttcccctgtcacttcctcacgtttatccagcaatagctgaacaactgcttgatggcccagtgctgatgcagcgcggatcatgttggcaaattcgtcacttttgaaatcgatggccgcttcccggtgtagtaacagctgtactatttcctggtgacctcgaatgaccgcagctcggaaagcgcccccatgtcttatgctctttgcatcgatatctgcgccatggtctagtagcagttgcacaacttcgaggtgtcctaggcttatggcagcatgaagtggactgccaacggaattgtcttttaaactgacatttgcgcccttgttcagcaatagtttagtaagatccgtgtcaccggcaactacagccttcaacagtaggctgtctagtcgctgcgtttcctctgcatccgtgacaatgtctggtattttctccatttccaaatggtccacctgggttgctgttgttcgattccgggtgtcgtcaccttcagggcgatattcctctggctgaaagtcggggctattatagtgagccacgttgaaatggctgttccggaatgtcgatgtctgaaaactgggctcgcgccagctacgattttcggcatactcgggaagctgagagtactcgctgaaacgcagcggaagcgtttgcgagaaagagctttcaggtgctcctgatgcatcaggtgtaactgccttaagccaggcctcggctgactcgcgtcctagttgaactggctgaaattgtagacggatatcttcaaatttgtgtgtggccgtatactcatctggacttggcgactcctggacatttgtgtcatcaggccattgcaacgatgtttccgagaaaacttgcgaattttcgtcattccgtacggcttggctatcgctatccgcggtttcccgtaaaccatcatgttggttcttattaaaaggatccgcgggtaggcaatgatgggcaaggcgttctaaatgacctttgatgtgctcgtgcatgattttgttgtcctcgaagccagtgggacaaaggggacatggccgcaatggtttggtggatggtctgaatgcagcggccattagctctggtgagaagagctctggttttgcgtcagggtgaaatttttcaatatgagaaataaactcctcttgcttctcaaactctgttggtgccacatgattatcgcaatgccatgattttgtatgaatgttctcatggtctatccattctcggtatgagccgtagagacgatgagaatcttgacacacttcgtgggtgcattggtacggttggagatcgtggataagatgtgccctgcaggacaatcagcactaggtcaagtgataccaaggtgacaacttacttccaagccttttccccgagataccttccaggacatagtacatgacaatagggacaagtgaaatagtcgctactcaagagatctttaggcgtaggtggccactgaagcactaactggttttgggtagccggaattacagcggtggatgcgtgactctggtatgagaagacagactcgttgtcgtcaaatctgaacttgctctcgtccaaccttgtagcggaagttgcctctgaatgttcgtgtcttgaaatagccgagggggtagcaagatgaacagtggcacctggtgtatttcccgtccgaaaaagagcttcagaggtggcaggcttatttgagccagttggtctcacggtctgcgttgggtcccggcttatcctggcagtgtgttccttccagtagatgaactgttgtcttcgtcgaacgttggccatgccaatcctccgtaggaggtgattagacgccgaggcgtatttgtccaggatgtcattgtggattgtagagttttgtgaaggttgaaaagtttgcactaggtattgcttatgtcgatgaacaagaatcacgatttcgacttctgctctttcattgatatactgctccctttcatgtgctgcgatgtgtcgaaagagctcttgtgtagctctttcaggtcggtttcgagggcttctaattcgcgctgccagaccgtacaacgcgttgatggtctctgtaattccattttgacgaaagtccagttcatgagtagattcctcgctgctaacagagccaatggcactctgattcgacgacctgctactgtcgttatcggatgaactctgagtctccaaatcccgtgcttgttgttcaaatggaaggcggtcgcctttcagaacagccagggtgttctcaaggtgattaagcaaagcactgagcagacgtagtagctgggacttgaccaggacggcatcgcggacccgatagtcgagagagctatggccttgatgatgaaggcctaagctatgcgcgcataatcgaaacctttgttcctctttggtaaagtgcgtttgaagtgtgccgctgtgtaaatttaacaaactttcaaagacttggaaaactcgctttcctgcgcgatagagagccgggccatccatgactgacgccctgatcgaggctggggtgcttgctgtgctatgtttgaggtaatttgaaagcggggtctgatgttttcgcgagctgggttgaggtgactgaggtggtcatgcattcagctgaaaggtaaaggctttgattggtgcttggggttgctggcagccacacggcaatctctccttccacccccgcttcctaagttgctcaagcaagcgctattcaacggaaggcctctaaaagcagtgcgaaagcaatcaactatgtcaggcttcgaagttgctggagtggtacttggcgcaataccgctggtcatcgcttctttggagcattatcaagctggcaagggcgctgtcgcctccttcgtcaagtacggtggtttgcttgaaaacctgatcctccgcctaacgatacaccaacatctctatcatacagacattctgttccttcttcaagcggctggcgtagtagagctgaacctgcgagacgaagacacagttgcagagtgctttcgactgctgagggatcccgaagtcaacgaagagattgatgactggctaggtccgttgagtgatccattcaagcagcttgttgggcaatatgagtcttcgctgaaggcgatagtggtacatatcaagcatattcagcgactccctgatgtgagttcaactggtactctctatgcaatgtctgatgctgatgatttgcggaccagacccagaaggatgaccttggctcgctccttcaagcgaaccccccagataaaaagatcactttcacggaaagagtctcgttcacaatcaagcggggaaaattgaaagcactctatgaagagctcgatcaaagcaggctctccttggggactattattgagaaacgcaaaggcctgcaggagttctcttcatatgagccgtctccacacgccagtcgcattgtgctgaggcttacccagatccgcaatccggcatgttcgctctcatacgcccttcataagagctgctgttgcagatgtgttgggagtcacaggatacttttccgacttgaaagtcgaataccgattgatcggcaacacaaaagaaccagtcgactcctgaaaagttccactacatttaatctagtattatccatcgaacccaccatttcatcgcgggcgcttgtccatgtattgtctccagatacagagctggcagcagatgagtatggttaaaaaacactgaaaagtccatgctatgtatggctaactgatggatagccatccaaccgacagtcgaagcgtgtccccaagattaccaacagtcagatttgcaattgcagagatcccagcccgaccacgtttacaaccctccaggccaagcaccttggacctctgcaaggctgtgcgtgatacacatcatagaagccgtatgattcgactccagcttacggctgatgttctgaacatggatgacgaggagggagccgatgaaataaccacggctctatcgccttcacctgcagaaaccctgaagagggtactcgagcaagggcatctgaacgaagacacacaactgacgtataaacaacgaacaatattggcactcgacatcgcagcttcgattctccagcttcaacggaccaactggctcgtcacgccgtgggactgcaccaaaatcaagcttcttgctgtggaaaacgctagttctaccacaggaatgagtggcaagatgtttggaccttttgttgagcacgaagttaccagatctggcccccggacacgaagtatcagcaacacgccagaaccgaaggatgttctcctcgagctcgccattctcctgctcgagatatggacccatagaacactagagatgtgggctgaaaaggccgaccaagcaatcatgaccgacaccccagatcgccggctgatcgctctgattcggtggttggatgccacttcacaacagctaccgtcgcagtacgaaaccgcggctaggcaatgcgtggccatgtgtgtggagcaaagatgggcatgggatgacattgagtttcaaaagcgctttggggagaatgtggtcaagccgctgcttgatacatgtaaggtgtgggactgaataagtgagactagccatgggcatatcagttatagatgcaacaaaggttcttggtgtcaccctaattaggtacttacatgtgtgaacctcatcattctcatcaaggaaggatgtctttccattgtctatttcccctgttcgtatagtacctagctggaagtcttgaggagatgctatggtccagcatgcccttgcctagactacataatggctagatcagaaccattctatcacatacgaacatacctggcagaagaatgattgaacctgcttccgcataagtggggctccaagtagggctgtgtggcctaagtaccttatatcgaaatgaagcttccccacatgctaccgtgccttgttctctggcttctaccgggagagggtggggcgaaaggtgggtcctacaatcattggctacaaacggcgcgtcatggttgtggtaatctttggtgtggctgaataaaggcgtaacgaaaatatggtcgtctgagtgtgctcaactggctaggtagaacataaggagatggtgtaaacccctatcactcaataactgatgattccgatggtgtgaatcaccgccgacctggccagcaggaaagataaatatctctcccaacgcacatgcaactgtgtagacaacaaccatcatctacccatcaattgcagccgccattgtccttgtacttttatctcctgtttgcctgtttggccctgtttgttgtccccaggattcaccacctgggagtcattactcagagtcatccagtcagacaccacgtgtacatcagcccggccttggcccaccagttcagttcagttcagacttatcgctatcggattttatccactgctccatgtgcccactgaccgtgaccacttcgtcacacatttcccgtgtggccctcgtctcctacattcgttatccggacccgcacgaggaggtacgcttttctgatggggtagacctttaaccttgtggcccttcaagccaagaaaacgttggcgttggggggcaagcttggagagatgctctttgatgggtcagccacggagcttgtacgcctcctcgccgtccctgtccggcctcagaatcccccggagacagcctccgcgacaccaacacagacccgaaatggctgctgtgctaccaaggacatggatgggatgaaggagcacccaaaccggaaagcggacaccgaagtgatgaccagctcctcacaatgccacaagcgagcaaaaacccaagacggccataacagagccgacaccgaccactccatgatcaaccactccgttaccgacagcctcgtcatcgaccgccccgtcaccttttctacccttcctcccgaagtgcatcggctcatctttacccatatcgaatgcatcgatgacgtgtttcgactgggcctcgcgaatcggtacttgtggtcgatcggtcgagaacacatgcacgactattacatgtcgttcctcggacgatgggccaacgagcatattgtctgcgtgggagaggatgtcaagccgggcgactatcctcccggcttgttttcggctcaggagctagacttgttgcgtcaaaagacaagcgacataccgtacgactgggacgttgactgggacgatgtggcgtttccgaatgtgcccttcacgcttcaccacttcacttttcccagtatttccacccaagaagaagacgtttctctgttcggcaagtcgctggctttggctggcctctttcacgacttggacatctccaaggatcccgcttacgattacatacgttcagagatgctggtcaaacaggagacctactttccccaagaccagcagtggattcttcgaaacttgacgacaaagcagttcgtccgctcggaagccattgccctgaagccagaatgcatccacggacccgacatcagtgtcttgggtttcggtgaggtcgtcatgtcgcgtatatgctggtcgacatcctcattcactagtatgagcgatacggtcgatatctcgaggggtacatgggcagggctagactagtacttacatgttcttgcctttttcttcttttttttttcaaaagtcttggcaaaccccccccccccacagacagtttgtttacttttaaacctacactactatttccttcatttccgtagcaatcaggcctgtattctccagtacgattactacgaggcacttccactgagaataaagccaactgggcacccagagactgaagaacagacctctgaaatttcttcggataatgaacttgaagttcccgagatttccagaccgtcacaagtaggtattgatgattttgccgaatcaggattttacaacagttcccggttcatgtctaattaactcccagtcagcaaccccctccgataacccgctgccgaaaatccggcacggcatcttcctcacacattgatgtctcggacacggctcggaccaaagctagcacaccagaacaaaccggtcattggacccttgccgaccggatcgaaacaaaagtctccctcgatccggtttctgcatcgtgactggcgaccaaaaggggaaatggaatggcatacaggttgtcggatgaggttgctgccgaaaggaggttctgaagattcccgacaccgtgggatgaatatttgcattgcattgacaatgcaatgtgtgtcgtcgatccggggcattgggaaatttgaactttgccattgttgatagatgtttccaactgttttgtcctgggcaggctaactaacttcctgagaaacaccggagatgatcaagggaaggaataactcaactccgtcgagttgatcaccgagacaagaagacatgccctcacaccggtgctcttcatcctcgtcggatgatggcatcacgactgatggcaaaggccatgaaaagagacgtagaagaagatagatacgtcctgtggccctctctgatatcctgtctttccgaatcagccagacaaaagcgccagtctcgtaagcacactccggtctccccttgggactttcaaagaaccaccgccctctaccgttcaaactcgctgaacaatcgcaacgatgaaggtacgtttgcagctcactgtctatcactttcagtctataccagaaattaaccctaactgttagctcacccttctgaccaccgtctccctcctcgcggcggtcgggctcgctgctcccgtggcacccgtctctcgccgctccccagctgagttggtgcccaagtgcgtcaatcgagactaactttcctgctcgttgctcggccgcatgctcgctgcccgaggctttgaggtgccgaagatggtgactggacatgggaatgatgaggatcatgaggatgacgagggtggtgatggagacgatggtgatggaggcgatggtgatggagatggaggaaatagtggtggagatggcgacaatggcgacaatgacggcgacaatgatggtggtgacgatggcggcgatggcggcgatggcgatggcgataattctggatgctctggtggaactgtggtcgtctgtgtcgatactgaggttacggaaaccgttgatgccaatgccgaagtggttgtcgatgtctcggaaacacaaggcaccggcgagggtgatggtgatggagaggcaacaacagaaaccccatgcacagacgacaccggcgccataattgcatgtgttcaagttgacattcccggcgttgtcacggctgatgtcaacgccgtagtccttccctcgggaaccacagagagggatgacgcggcggcaggagaagccgagttgtgcgcagtcgacggcctgatagttgtgtgcgctgaagttgatcttctcggtattgatgttgatgccactgtcgttgtccttcctttggaaaccacataaggagatgttggggctattgacgctcttggccttgccatgatcgatgtaagcgttgtctgaatgaagtgtgggtgggggtacattgtgggaaacgccaataagccgtcggaatcggtcttgtgcctttcttaccggctgttcttgttgatgaaaggattctgggtgaaaagcaaagcatttgttttgctgaaggatgatttgttgcttgccggctttctgtagtcttgttttcggggggtcggacctaagttgaatcacacgccatgtagttatttcgtcgcatgggcttttaagtagttttaatgatataattcgagtcgatgataatcgatagagttgattttggggcggtataatctgttggagctgtgttgcaatttgtcaactgttagaggccctccctttgtttgtcaagccatgggctcgaggcacttggcttcatttcttgatttttgccagcctacatgtaatatcacaccagcgagtatgattagcacagatttaaatgcacagtttctagttcattttctaatgctcatctcatcggttcggaagttttatctagtaagacctctgccacttgtctgacagctctcggcagctgtcatcagccaactgcctaaacacccctcaacaccacatggcctctccccgccatcaccaccggagatcacaggtcaacgatccacgcggaaaggttcacaaacatacctggtcactctcctggtttcattacatcgcttctcatctcactcagcttcctcccggcaatctaattgccttcaaaatggcaccgatacccccaccacacctccctcgtgtcatcacttactatcaaactcaccacacgccatccggcgaccccatttctgtcctccctttgcttcaacactccccagtccatctcactcacctcatcctcgccgcgattcacatcaacgaggaccccaacgccctcaccctaaacgaccaccacccctcccacccccgcttccaaaccctatgggccgaactccgcatcctccaagcctccggcatcaaagtcctaggcatgctaggcggagcagccaaaggctccttcacccgcctcgactacccctcctccacccccgacttcgaaaaatactacgcccctctagccgccctcatcaaggagcaatccctcgacggcctagacctagacgtagaagaggaaatgaccctaggcggtatcatccaccttatcgatcgtctccgctccgacttcggcccagactttatcatcactctcgcccccgtggcagcagcattgctaaaccatcaacacaacctcagcgggttcgattacgaagcgttggaggtcatgaggggcagggagataagctggtataacacgcagttctactgcgggtggggtgactgctccaacccggtcatgtacgagatgctgctcgtcaaggggtgggacccggagaagattgtggttgggctggtgaccaacccggaaaacgggggtgggttcgtcccctttgaggtgttgggaaacgtgatacctctgctggcggggcggcacccgaggtttggtggggtcatggggtgggagtacttcaacagtttgccgggcggcagggagaggccttgggagtgggcggagctgatggggggttacctgaggggtaggaggagcgtggacgatcagggcctgaagcaggccgaggaggatgtcaagcgactgagagagaaggcggaacaggagcggaaacgaggagcggcggctgattcggatggtgaggacgggaacgaggttcaggttccggtgccgagagatttcgagtatcactcggatgggctattggaggacgaggaatcatcagagctaccatgaatccttttggtcccgacacaagatattctgtctaggcgggacaaaatcagaccacttttacccagatgtgtgcactcgcagacaagcttaacagtgccaagcagcaccatcggcaccagccaaggcaaagggggaaggaatctggaagacagggtccaaggcctttcagccaatcacaggtcgtggccagctgtcctgtccccttcttgctggggcttggaattttgagtggtgcgcattccagtgtacgggtaggctgacaagacgtgccaagtttagggaaggcctctctgggaatgatggaacaatcatatgtggatttagctcaagatcccaagaaaggctgcagcatttcaggatcgaggccgctaaactatccactactgtgggctcacatgaaaggtacagacagacgggacggtcaacaaagccgtcgaccacgaacacactattttcgagtcacatccgttttgacaatctaaagcttttacaaaataaactcggccctccatgtgtcgcggcgctgaactttgatgtaatgtgcggtgtgggacaatagctgcggatgatgccggtggctgggcgggactgatgatgacgggatacgtcgtatttcttttggacatacgtcaaccatctgaatggcgctgcgcgaggaggtcgcggaggctcaaccgtcgctgtgccgtaaacgccacgtacgggtgcgacgtgatgtaatctaggggtccagctgttgttgaacaaagacgttttgtttgtgacgttctagagactgatagaaaaaggcgcggaaggcgccgttggatggtagttggatggtggatgggcctatgactccattccatgagtcgtcgctgccgggagttaaaaagagaggctgatgtcaaagccggagctctgatgtcagttagtcagggcatcgctgacgatggttacagccgctgccaaaacactcggtgaaattggcgcgtgttagacgagccgactgcaaaatgaacacttttggtttctttcagcgaaatggaaatgattgtcgtggcgactggtctggacctttttgctgacggcagttttggagcaattagatcaggaaccgtcacggctaacaaagatgttgacgaggtcggaggacccttggggttgatttgtggggaaaaatcgtcaagctcttgcctgtttgatgactgacaggggtgggagctgtgatgtcatcggcacgatttgcaggggtcttacgccttgcatgcatgcacgagtggcgtcagaatccgatgtctcttttccagcggattgtttttgccctgtgtgcttgtgaaatcatcgtcagggccagcgccgctttctttcttctctcaaacacaacacgcgaagcaacactgctatgtgttcctcccgccacatcatcacatcataggcctttgcctcctgtcaccgcctgttgtgcgccaatttacccatccctagctcacgcatgccaagccgcttttgcaatgacctccgtccggcgtgccggcgtaagatttcgcgcttggcaattaggaccccgtgtggtctcgccttgactaattgaatgggaatttcaacgtgccgtctctagactggactctgaatggcctcagtgggatgggcaaacatgagaatgccatgttttgctcccccccgtgctgccactgtgccaacttttcccctgtccaagcgccgttttcctcggccattggctcaccatacccccttaccccctcttgctgcatgcagggcagagacatatcagggaccctggcttcaatagcagtggaaaagatattgctcacatgagtacatcaacaacttctcctaacgttggccgagtacagatacctctcgcgagatgaggttagggaatagctatcggcactctgcatgagccttgcagaccggaacaacaagcattcatggttctggggcccgcttttgtcttgtccaaccactgacatcatttcaaaccgtcatcctttttgttgcggagggtgggtgagactgctgatcccatctctcgcttgccttggccaccgacgtagacatcctcgtcatgtacccaggactctctcttcgtcagtgctgtctctctgggaccactgaaacgccgtctcccacggctttagtcgtcacatctcgcctccgttatctcaccccccaactctatgatcagcagggtcttgcctttcctggctcccgctgtcttcccccatccacccaacttcttccgtttcccgtcattcatcctctcactgcgtaattgccgccgcgcttcactaacaggctggggacaccaagtcgatgctgtggcactgatctaagacaggtcggccagccgcgctgagcaattgttctgtggtaacacacggccggccaaagtttacgtcgagtgaatccggcgtaaacgggaagacatgttcagtccccgagtgatgggttcaaacggtcataagctacgccataactggcagccgtcctacgtctgtcatggtcacccccatgttcaaacggcgctcatcaccgctgatcggtcataggtttaggggtaagcttgcatctgagggtagcagcactatcctcttccacctatgaggtggtgagagagacggggcccccttcttgtcgtgcctttgtgagattggttccggcgggtggtggtgtgggaggatcgtggtgacgacgggtgtgagacctctcttgtcccgactgctctctctgagggtccctgcccgtccgccgcgtggaccccttccgcttgtcaatctgcccttcgaactttcccccctcccccgtccccacaccactcgtaccccttcccgcacaaaaagtgccattgattaccacccggccccaccaaatctcgccttaatcagatacactccaagcacctacaagccaagctctccgttataaagcctggcgacccctcccctccgtttcctgttttttttcattccgcatcttagtcacagactaataaacacaatcaactcttggctgctgaagcctgacaaacaataaccgcaaacttcttctccttgtcggcgttttccttttgagtagctctcctgcagtctctcatctcttgcaaaaaatttcaacgtgagcggcactatcatcaccatcatcagctctccaaagaaatcatcaccacccacaaagacataacccgcaccatgcccaccacccaaaacgcctcttactccgtcggcctcgccatgtcccccccaccacccagcgacctcggcagctacgcccgctccatgcaccaacacaccaagcgccagatggactccatctcccagacctccacctcccccgagaggcgctccccaagccagagcaacgaccgctcctcgggcacaaacagcatgcccaacggcgtatcgaaccagaggagaaacccaggcgattacaactaccagtaaatcagttgtgacgcatcattgccgtgagggagaaagaaataagcgtgaaaatctcttcatttcttcgttttctatcgggctgggaagagaagaggaaaaagcgtaacaaccattcttcagcatcgggtttcttttcttcttctgggccggggaaaacatgacgctggttgttacacatgacacatatctactaggatgtgtgtggtttcggaatggatatgatatggggcgtatacgagttgggggaaaaaaggttttcggttgtcttctcccttctcttctcgaatacttgcatatctgggtctctttttttttggaaggttgtcctttttttgctcatcacctctcgtttttgttgcgagcatggcgtttaatgggctgggaatatcggtggggattaagcaatgattttccctggagttgtcggtttgcgaatacgctctcgatagatgattttctttctctgttctgagcatgaattgatgatggaggtgggatggtacatcaaagtatctagtacgcataagcaatcaatatgttaattctcggtcaattctttggctgggataatctcgactcactttgttctttttttaatgtgaatttcagtgtgaatcaattattattgtaacggatgtgctgattctgtagccgggtttcctagccaactatgtaagcacaccgtgagctctatgtaacctgtttccctgggtggtaccattctctatctcacttccgctcgtcatgtaaaagtgtgctgtgtgccggtaaaacaattattcctctcattaccccatcggttgatttggcagggtgccgctcatatgcaacttcaagccaccttcttcttcttgatccctaatagcgcggcgtggtcctttttcctcttaaccaccctcttaaaactcggcggtggcatatccgtcgtatcggtccccgctgtcgtcgcagctgccgtcgcagctgccgttgtcgcaggtttaaccccctcactcaacgacaagcttggccccccattactcccatccacccccttctcctccccttccggctcctccacaatctcctccaacatctcctgcctcctcgcaaactgaaacgccctcctcgccgcctcagcatcctcctcctcctgcctcctcctctctttttcctcctcggtctccttactcaccaacccctccaacaaatccaccccctcactcttcgccttctccaacctcgcattccgactcctaatctcatccaacgcgtccgccaccgccatctccctcttcgcatcctccgttttctgctccaactccgccatagcattcttctcctcctcccctgccgcctccgccatttcccgttccaaccgatccaacctctgctcatccgtctcatcttccccatccccattgtccccatcatccaaccccctcttccacggatccgtgttcctcttggccccctgctcaacagtataatcctgattcttgggatcagtcttgaacacaatctccgccgagcacctcgtgcaccggatgtaaaaccggtaaatctgtatagacaagtatttttcgtctggtcgggtttctttgcgcgcgttgaatttgcggccgcggtacatgtactccccgcaggcggtgcagcgcatgctgaacggggccatcaggcgcacgacttggaccttgggggtgttggccgcggatttgggcttgcgggttcgccctacgagggaggggtcaaagtcgggggggtagtatttggagaggactttgcgttcggacattgcggcggcggtggtggtggtttaatcgggggtggcttgtcaggttgtgagtggttttcggcgagaggatgtgaagaaggatttcgaagtagaatggtggtgcgaagcgtaagaagtcgaaaattcgggatgcgactgctgggttgggaaagtatagagttgtcggctgcggtcggttgtggttggatgtgcgattaaggtgctggtgccacattgaggctgaaaatggggcgccactctcgctgggagtgcagggatcacggcgacaagggtcgggtgatatgggttagggttgacaaagcacttcgctcacaaacattacatggatcatggtaagcaatcggctgaggaacctcagggttcaaattcacgctatatatcgtcatttccgttctgattgcttctcagtgtcacattcgccttcagatatctctctgtacccaatacgcgcttttggttgcatggccttcatctcatcatcagccatcccatttcattcctccacctcccaattccacgccatctagttcagcagcaccttccaaatggcatcgctatcgatgaaatcatggtggataatgttcaccaaccatgaatcacccctaatcttttcaagcagcttttcactctccgaccccttcccataaatcttggcccattctccccagatcccaaacgcctcctcgctccaggcccggaaactgacctcttcaataatcgtgggcgtgacaatctccttgccggggaaaacaccccacgtcacggcattggtgctggcctccttctccccctctgcctccaacgagccagcggtatccgagctgacaaagtcaccggcggcgttgatggcatagaaacatacatcgtccttcaggtctgggtgcctaagtttttgttcgagcaccttccagtccgccgacggaatgaagaactcgacaaatgccttttgaaagacgaacccgtttgccggtccccatccaaaggtgggatcactggaccgaaggccgttaaccgccggctgcgaggccaacgaccaccagcccttggagttgagcttgatgagctggtcgcgaatcttgtcggtttccgggctgaatccttcttcgctccacggaatggttgtgagctcgcccttgaggtggcggataaagacgttgttgatgtcctcggtcgtccttggagtgccccagatccgaagtgcctgggccaccgtaacgtgcaggcttacaccgtagccgtcgatttgaccgtaggcgggagaccgagcatcgccccatctgccgttggggaagtcatcccacgtggcttcacggcctagtacgccttcgccctctgaaatagccagtgtgttagcgcgggaattgatgggttctgccggaatgctagcctcctgtgctgtcgcttcccaatcgggataggatgtggatcgaccctggataataacccgatccctgggatcagagccaatcgagccctttcgtcttccatcatcggggacggatccgttgatgcgaagaagtcgaatgtccggtagagggttgtgtctcacagcggactgaagctcatcctcctctggagtttcgggagggatcaaccctgttctttcgacaatgaacgatactgccttttccaggttgagcgtgtaaaagtgaaagcccttgggaccctcggccgtcctgcccttgatctccttgatctgctccaccagttcgctgacaatatccacccccacctccttgactctttcatcgtcacccctgacggcctccagacggtccatgagcgcatcgggtatcttggcgtggctgagctttgtcgtccttttgatcatttgataactctggataggcataagaccagggataatcacgatatccttgaatgcaccgcttggatgctcccgaagagtcttctcgaaatgatcgtacgctgcaatgtcgaaaaacaactgtgtcatgagaaaatcggctccggcctgcaccttctcgacgagataaggaaggtcatgctccaggctctgaccgaggggatggctttcatcggcatggccttccggataggcggcaacaccaatgcagaagtaatcgccgtgagtcttgcggatataacgaacgaggtcgacggcccaatggaactcttcctcttcgtcatcgtcggtctttggctcgttgctatcacggtactcggctcttcttggcgggtcgcccctgagggcgaggatattgcgaatacccaaagcctttgcgtcctccaatgtcttgtctatcagcttccggctcatgttggtgcaggtaagatgcagacatgttgtcaggctcagctcccgctggcagatctcggcgagctcgagggacttggttgctgtagaaccgccggcgccccaggtaacgttgacaaagagtggtcgcagggccctcgccatccgatcgagccggtcacggaggttggagaaacccatggccgtcttgggcgggaagaattcgagggagcagtagttcgtctcggcgggcaaagccgcaatcttgtctgtgattttgtccatggcgtggttcttgccagcctctacaggcaattccaaactgggaagaaattcacccattggggttgaaaggggagatggatggcgggcagctgtgtgctctgacaataataaggaggggcgggagctcctgggtggcttcggcggatgctcggagaaggagaaccgctacacaaaagatcggatgaaagtggctgctcggtgcgctggagggttcgatccctgctgggaatgctaggaatgtattcgagaagcggatggttcctgactcgatgtttgttggcccagttactcgactacgagctccttttcaatgttgcttctagcaagaatttcccgtggtcaaggtgcactgtttcattccagcggcgactagtcaaccccaccttttacgtaggtgacgtggggtacaagcaaacctccttcccgcgatcgcaacgcctgtcagaatgtggggtttctatcactctgggcgcctcggtgagacagccaaccacatcggcagttagtttaggtgcgaggaggcatagtgattggtgaaggtctgtcatgtggtcgtgtacccggatctgaattacacgtcccccacttccaattatcgatcggatgagaacgtgctctaatatttaccattgagaatccccaggagggcccaggaggactgtattgaagctgactatgggatatatacgtgggggggcctagggagaacatggcattgcggctttacccgctaatggtctgacatgtgcttcgatgccgagtcttggttgagacattgtacgtgtcaagttgaattctttgaaaacctatacctgtatcagcaataaaagcgttagctcaacagcctggcagagcctgcgggatgacagcatgtggtgttcagatattcaggaattgccatggtatcgtcaccctaaacacacggcactgctgaacctctatctacgatgtaaatagaggctcgaccgttgttgagtaggtttaccggattgtttaattgtcatcaggttaaaaaaaatggacagaaaagccagacacgtagggcaatcgacgtaccaattgaaagtcgagagcgagcgtgtgtaatatatatatatatattagagaatccaaggttatcaaatctggtctacgtggcagcaagtaaaaagacaagtgggaaagagaatgtctagtgcttcaggtcatcaccgcatcatggaaccgcgcaattaaggggcactcgtgacgatggttttaaacaagggcttcgtagagttaatctcgactcggcaactgagatcgccaacagcatggggtgcgtggtgatgttggtgatgtattcacagttgatggtctttgtggaagagaagaaaagagaatgttaaaattggcggcgcgaaatttttctttgtacgagactcgactggcgaggttctggtggggttctttgtgccggctgtcaccgcccgtaacgttctggtggtcggcctggttttggtgctcccggcacggtggcagtggtggtgggctgcttttgccggccagtcatgtttttttggcactaaaatgtggtggagacgtcgcgaagacccgccacagtgcactgcctgttgctttgggggccctctcaagatttgttcttttccaccattgttcgagaactgagaaaacggcttctgacatcccaccacgcttccctgatgctctaaaaccctgccgcccaaccttccaccttcacgcataccttaataataggatattctcgtgagaacatcgcccagacatccatcccgccactgacgccaactgccacctactaccaccatcaaaccgcaccactacctccaaaggtcctcgagacgaaacagccgcccgccgtgttaatcctcctcaacccacacctgacatcacccacctccctttccgctcgccttcccgttcgaataattcatcactgtgagcgtcactgcgcattaatctgagcacttgcactgcaacattttgtgctctcggggcttccaatagtcgcccttcgtgtctgttgcaccacaggccgaactacaccagaggttgctgtcgatcattgaagggcgtggctggtgcttgctcgcaagctgtagacactctttagacacccccttttcccctagtaccggtttccatcttctccatggagaacatatggagtcgccgccccgggtgagtattttttttttcttccatcgtcttcactttgtccaagctgttcggcggggtcaaccggagctgtcgtgctaacgtttttggatcacaagttcgagcaagctctccctctctacttccggctccggtcagggcgacagcccctctggacgcaacaactctttcaggcgaatcggcggtgatagctcttcgctccagaaaaccaaccccttcagttccataaccacgccgggaggcggcttggcgtcacctacaggcggcgcatcgaatgccttcggcctaggatctggcgcctttgcctcttttggttcggcgaagacccctaaggcgactggaaatcctttcgagtcgtctttgggcgctgctgtcaagacacccggtgcggagaaatctgcaaaggagggtggcttggctggcaagtctgtcggccgggtggcatccaacgcctccctgcttgactctgccaggacgtcaggagcgtcagtccaccggctgcgtgacagctgggtgttctggtttcgcccgcccatctccaaggcgaacgggtttatcgagtatgagaacactctgcacccaatcgcctcggttgatacagccgagaacttcttcggcgtgtacgggcacttgaagcggccgtcaacactgccgctggtatcggactaccacctcttcaagaagggaatccggccaatatgggaggaccaggagaacaaggcgggtggcaagtgggtggtgcgcctcaagaagggcgttgcggaccgctattgggaggacctgctgtttgccattattggcgaccagttcggcgaggccagtgaggaggtttgcggtattgtggtgagcatccgtaacggggaggacatcctcagcatctggactcgttcgagtggacagcgggtcctgaagctccggtaagtttatatttcttgacaagctacactgttgcatcctacttattctgtcgtcacagcgaaactatgcgccgagtcctgtcgatgccaaatgacaccaaaatcgagttcaagagccacgacaccagcatccagcagcgcactgctattgaagagtcccggcgggagaaggcggcgaacaatcaccacggtgacaagcgcaacaacaagcagcaacattatcagcagcagttgcagcagtcgaatgacgaacagcagaagaacttataagtacagcccttttgcaaccttatgtagcgaagcgagcgcggcctcgggtcccatcctagcgtattatgatggcctaccgaagagaaatcccaaaagaattccgtccgtggacaaaaaagctttccaggcattgttgtgtgtgtgttttctctttctctttctctctttaccatctctatgtcctgtgtgtaacaacatatttccggttttgtctttttcatcgagcaagcattgtttttggacagtcatttttctcaactcgccgttttctccttctgtttggacttgtagcagtagcaggcagggatgattggtgtgggcggtgtaagctgtgattttctacctggtgtgtgggaggaaacggccagggcgaaaaagggagagcgggtgggtggtgaatgctgtgggttcaatggttgaaatgcgcgaaatgacttttgggatatttaggaagggggcggggaaattgtcgggaaatgaatggattgggttcatcatgcttcgagggatcaaggcgtgcagcgcgtgatttagcgatttttgcaaaagcaggaaaagaaatattttgaagtatgggcttcgtcatgtatgttgctgctagtgttattgctgacaggaaatatatgctgttgtcttatcagtaagtgtcgggtacatcaaccgccgatgataaccgtcaggtactagttctcatccacatgttaaagtgtttgggagttgaatttctctatgcaatttttatgtgctacatttcccatgtttgctgctttttcctagctttttaactgcttccgtactgtaatctggtatcatcaatcatcttctacaccgtaccattcaaccccaacctctccatccccctcatcactcctagtcacgccatcctccccttccccttcccattactccccccctgcaccttaggcctatccctcctctcccaaacctgcagatacgtctcccccagataaagcagctcctccctaatcttctccacaaacaaatcctgcgccaccacccactctccctcccggctcttatccctcagctgcaccttccacgtctttttttcctcccccaccgcgctatccgccacatcctccttctgcctcaccgcctcgtgcaccacattcgcgaccaaatcataccatatcggctcccccggctggcagtgactaggatcaggctcaacatacggcccgacatccaaattcctcgcgtcaaacgtcacaatcgttgggttgcgctcagagacaaacttgtttttggaaaagcgcttcacatgaaaaacgaggaacggcgggagggggtgcattagtctgtatcgcttccgctgggcgttgagttcctgggctttcacgccgttgtatttcgccaggagtaaagacagtgggacttgaggaataatgttggcttcttgttcgtcctgaaacaaaggcgcgggagggaggtccaaggtgaggagtaagaaccgagagatgtccgtttggacttgggcagactcttcaaaccgtaacctgtcactcgcgtcggctttggcggtgatggcttgggattctacttttagctttccctgaaggatgtgctggatgggggaggaatgaggttttctctttgagccgcctaggccgaggtggaggttgttgagataccatgataggaattccaccgggtcggattgggccgtgagggtgaagcgtttgttggagcggagggagatttcttgaaggagctcgtggggggagacgtgggatttgaaggcgcgtgggttccagattttgcggaagaggattgaggtccgtttgacgagctcgtcgcgcttggagaggtcttctagaaggaaataattccgtagcggggagacgtgggagagggattggactatgacgttgaggtagtcgttttctttgatgttgttcattcctacgaaaccgggggtgtattctttcccgaggagggttcgggaggtgcgaggtttgcgatcgaactcggcgacttcttgtcgggtgtagcgcggatcggagacgtatttgatgtcgtcgagggacttgctcatgacttcgtatccttcgggtaacacgtacaccttttgggtgctcatgttgatgtagacgtggtggtcctcgtcgagcgcgtggaaataggcgtgtgactttgggccacggccttggaagtatttcccgcatactaagcatgcgtatacgttgatattggacaagctgatggaacagagcttttcgaaatcaaagtcgaggacgttgcgatcgatggtgtcgaggtacaagtcgtcgtagcctgctgtcggtgcagcttgtctgatgggcgccttttcctccacttcatcgtcaaaatcatcgccttcctcctcgtcttctatccgttgcagtccgttcgtgtggttatcatctccgtttgcgctgggggttaggctcttggtgtagtcgtcgaatctggacttcttggaggctggtgagcctactagctcctcgagagcttctgacgcctgacgcttcgacatctctgtatgtttggtgtatttatgcgacttggatgatggtgcatgccgtcggccgaacgcgaaatgcgcttgttgaggcgttgatggacgttgtcgtgctttttccccaagaggaccgcgaagttgagcatgggcctcaggtcaatcaattcaatcgtcggagcagccccaccaaagctttggccgccacacaaccttggcacggccttcgtgtgacgcttgcccaaataggcagtttgtggactaaatttcgtgcgcgtctcacaccagagaggaggttgatggccaggggatacaatgtaggtatactatggtggaaactactacgctatcagtccttgatcccaacctccaacatctcggccagcagatcccacttcacggctgcctgttccttgctggccctcgccacgcccctgagccccccagcaacgaacctcaggtgtctctcaaaatcaccttgatactccttcaacaagagatggtgcggtttcccctcgttaacctttgcgctctgtttgattttccactccagaccttggttttccttgtccgagtcttcgtcttcgtcatttcttctctttggtttcggtgttgctgccgcacatttggccttggctttcactggtgaggtgtaaggagaagagatcaccgataaccttgtaatctcatgttcctccttctccagcctcgccatttctactttctgcgcgtccgcaaccttgatagccagatcgaaaatgtccagcatgcagtcccgaataggctgcaatttggcgccatggcatgcttcatggatgattctgttcacaaaggtggcatgggctttgatcatgtcgtccacatcccccgcatctcccaagttagctcttagttttgctgtgttaggagccagcacgagtgtcgtcaagtaggtaaggatggcgtcgcagaaccagaggagtttcgttcgcagcatgtagtattgccccattggacccgtcgcagcgaggcttcctcgggggtggaaattcttgactggatgcttcaagacatgtatcgctctgcggacctgcagcaaaaaggtgaatatcgtctgatatccctgtattgactcctctgtgactacaacctgcactggccagttcagacgacacccaagacggatagcagggaggttgactcgaacagagctccggccagcaatggcactgtgaacaacggtacgaggatcgatttcggcaaagatgcgatagttgtcgatagatgccgagaaagcctcctgagcaatctcggtcaacgtaaaacgatctttccagctgctgctaaagttgtcgaggtgtctgaagacagccgaggccaaggcgtcggatttggagccgtccgacatgaggtatacttcttcaagcatgtctagactctggagcagtccataagagttgtagagtagctcttgaagagtggccgctgcagtgtggtgcttgctctggatccaagcatcaaaggcggcgctgaagagctccgaaaagggggcgaactccaggtggtctgggcaaacagtagcaaagtccatcctgggttcgtctgttgctcggtatttgctggcggccgcatgtcgcttcatgtttttcaacaccacaatacttttgcccgcagtgaatattctgtggatagcaggtttgagaaaacgcggtgcgtgcaggtggccttctggggagcgcagcaagttgaactgtcccttccaaatatgaggcaacggaagcttggtagaggactccgacacaaagaatgttcggtccccggccagaagtcttccttcttccatccacaggcgaattggcttgagatagacctgaaaacagtcgagaaataaaccacctaaaagatggtaggtgtcccggtgcgcttggagctgagccatccccgccgcatcgtatagtagctcaagatatctgaagccatgagtgtttctttcctcctgaagctggcggatgatatccgagagcgcatagagtggtttcagaatcggctgcacttcggtcaagatgcccaccaagctcaccaccacatcctccttaatcgcaacatatctgccttgaattctcgccaacttaccgtcgagcgaggtcagggccttttgtagagaactctcaaagacctgcaagagaggcgactgtgctttccttttggaaaaggctcgtaaaggtgcgagcttacgaccgcactcagcaaaggagttaaagagagcggttgatgcttccgttgaaatcccctggagctggtagagcggacttgggctacagtctgcatcgaaaaaggttgtcggtaagccactaagcataaacaacacctctcggagcaactgcaatgttgatatggtcactttttcaggctgttctcctccattttttgttgaagcgtctcgccatgacagtgcttccctgacttgttgcagcagctcttctccttggggtttgaacgcactgtccaatgctgtgcgtggtgctctgtcgtctaccgaggaagctgatgtgagtgattcaacggaagcgaccgttctgaggtcggcgacgtcttcgtcgtcacttgaatctggggcgtggcggttgaagagccaaatgtctcgttcctgtacccaaccatcttctctagcaatgtctttccatgttaactttggtgggggtatttcctcgggttcaatgagcgcgtcaagcgcagtgaggtcagtcttttgagccggctggtcggcgagctcgaggagaaagtggaagacatcaggcgtaaatttgttgtggtgcggttccagtgcctcgagtcgcttacgaaaagcatctgcaagtgcatcccttccaacgacacggaaacgttcctccaggcccttgagtctgtcttcgacctcaaactgattggtcctaagataggtatggttgcgaagaagacggagaacagcctcccgaaaaatatctcgggtctcttgatcagacttatgtcgtgttagtcaaactgaggatcacagccaagccttggtggaacttacttcgggaatcccaacgatggcgtccaccagttcatcggtcgaggcacccagttgcgcgagaaaagccatgctgatctggtctccctaagcggagcattctgccaacacggatttcagaaacccagatgccgcctcaaggtcaaggggtggatgcaggctctccgctggttcactgcccggggatgtttgttgttttaagctttcttgggtgggacgcgaaacgggagaccactttacgcggtaccctagttacatgctgaagtggtttgggaataaccgacacgagatgctgcaacaccataccttgtgttccaagtccacacgaggtaacgtaatggaaaagagaccagaggctctccaatgcgaggcttatgatgtttatatctttttcgacacaaaagagagttaagaattgtcaactggtcaagtcttccagaagacttgaagaaccctacgcacgggccacgaagataagagctgatcgtcccttatcgctgacatcaaaccgcctgccgccccttttcgtgaatttttcggcccgcatctggttccactgcgctgggcgctgctttaattgccatccacccagtccaacgtgccgaagggaccagccaacggctgatttgaacgacgcagtttgggtttggcgtcgcaaccatcaaccaacaaaagacacacgcgaccgacgcttcaaacacgccgtcacgaccattttgacctttctaacaccgaaattacatcacaggctccaaggccgtattcgccggcagttgacaccgatacgagaaccccacgacataccgacccctcggcggattcgcaaggatggccattgctcgccccgtaagggtcctgggctttgcggccgtggtgatgtggttcttcttcatctggcaggtcctgaagccgacatcaccaccaaaacacaaggtcaaagagatcatcaagtcattcgaacgagatccaaacctagaccgtacgccaaccccgttttcgatacaccatggcatcgcgcgctgacactgctattaaacagcaacgggagagccagaaggcattttagttcacgcatccgaggaatatgcacccggccccgcgggcaccgcccgaatcaatgccaccctacttgccctcgtacgaaatgaggagctcaacgacatgctctcctccatgcgcgacctcgaaagaacatggaaccacaagttcaactacccctggaccttcttcaacgatgtccctttcaccgaagaattcaagaagaagacgcaagctcttaccaaagcagaatgccgctacgaactcatcccgaaggaacactgggctgtccccgaatggatcaacatggacctctacaaggaatccacccagattctcaaggacaagaaggtccaatacgccgacatgatttcctaccaccaaatgtgccgctggaacagtggcctcttctatcaccaccctgctttggccaatacgcagtactactggcgcgtggagcccaaggttcacttcttctgtgatgtcgactatgacgtcttccgctacatgcaggacaacaacaagacctacggcttcaccatcaatctctatgattctcccgactcgatccctactctgtggcccgagaccctgaaattcattgccgagcaccccgagtatgttcacgagaacaacgccatggactggctgacggataaggtccgccggccagaccataacaagaaggctaatggatactcgacttgccacttctggtcgaactttgagattgccgacatgagcttctggaggagcaaggcgtatgaggattacttcaaccacctggaccggactgggaatttcttctacgagagatggggtgatgcgccggtgcatagcattggactgggattgtttgaggataagagcaggatccactggtatgttgtcactctaatgacttttgtgggatatacgctgacgagtgaccgacaggttccgcgatatcggataccaacatatccccttcttcaactgccccaactcgcccaagtgcaagggctgtgtgacgggtcgcttcacggacggagagtcgttcttgtatagagaggactgccgaccaaactggttcaagtttgtcagtcaagggtaatgagcttgacgccaacgtggctgcactgtatacattttgatcatcgagatccttggcttctctggacgggggttttattttggattatgactataatcatgcactcacacgccacacaggggaaggcatttgggaaagactgagcgacaaaacaggtgtctggcgcaagcggggattttgactggtttattggctattctaatgacgctgttacatatacatactacgaaaaaggggggtaacgttaggggtggaagggaggctacacggtttggtgtagagggcaacaaagaattatgcaagaagtaaatgcatacagcatgttgtgtgagagaggggcttcactgttcatgttttactaggttaaatagaagaaaagaagatgcgacaaccaaacctggctaatgacgtctctctagagctcgccatacacgttgaccaccccactggtacccccaacacagaattggttcccaaaacccccttccttccacgcgatacaactaaccacattcttcctcgccttttctttcccatctctcccgatagtaacctttttgttactggcatcaccaccccaaggcaccggcaccgtggcgaccagctttccagtgagcaaatcccacgcccaaatcttgccctcctcctgactggttgttcccgtcacccccgccgcctcggaagtgagctcatcccccacaacaacatacctctcctttccaccaagacaactctgcactcttaattcagtgtttttccaacccgggtgctcgtacgtctttaagcaagtcccatcccggcgatcaaacagccgcatcttgctgtccaacccccccaccagcaccgtttttccatctttagacaaactcaagctcgtgaccggcgtgccaatgacatctgtggtacaccgtcccatacgaatgtcgtaactcctcactctgccgtctacactcccggttatgacctctgggttcccattttgggggacagcaagagaagtgatcgcgtctttggcgtcgctcagtacttggacaggtttgttgctgttggatttgacgtcccagattcggacggttgtgtcgtggccgccggatatgacgaggctgtcgtcgtggccggagaagaggactgcgtttacgcggccggtgtgggagtgggctgtggaggctgagccgaggcggcggagggggagggcggtggttacgtcccagaggaagacggtgcggtcgccgccggaggaggcgaagcggtcgttgagggaggagacgcttaaggagaggacttcgtaggtgtgggcgccggtgtaggtttggatgaggcggccggtggggggtgagttggggaggggggagggggtggtggaggtggggttgtagaggcggatggagcggtcggaggagccggttaggatgtaggttgaggggggggaggagtaggttagggcgtggatggggcctggtgagggggttagtaagtggtttcttcaaggggaggcgggtcaaggtcgttgtgaatgtctctgtctgtctaatcggcgtgttggcgggtactcgtggaggggatgagggagaatcagcatggcatatgggggggatgagtggccctaagacagcgatgatctcaaactgttcatcgtggacagtcagatagctcaaggcttgaagtggggctcagctcatgtaagcccatagggagatgcagttaagggggatcaatgttgtctgtaagtacacagaagggtgtcatcaaaagatgatttgttacctaccattggacccgacaagctgggctacaggccgtgtgggaaattcagacatatttcttgatatccagatgttcttcagtcccttggcgtgaacctccaccaccagtcgccccccaagccgctatcactccctccgaagcgcaaaccagacgatgtgtaatactaaagaagctgccacttttgttttataaaaaatatgctggtgtggtatccaaccaagggcgccgttctcttcggtatgttgacttggtttgggtttagtgatgatacgattgagcaggccttgcaagcgattacagagctttcgtttgtaaacacatccggagcggtatagacgggtttgtgttcatcagccggatgactactgcagagacagtttaccgaatgagtgggtgagatggtggtgtgtgtggtacaagtcaacatgtgaggtcgttgtgggacccccacttttctgtgaactgagcgcggttgaaagtggggccgttcagctctctttggcttgtttcttggcccgtgagatttcggaattcggaggtcaacggcagtgtactacactaagtatttgctgtggtcagacaagtcccgtcccttgtcagatcctaattggacttggaaccaatcattctatcgaatacatcaacttgcaattgagaactagccaactctagtgtcagctatgcagcgcttatcatcgataataactcgacttcagcctgctcaaacctttgacttccaattcctataaacctggaagtccttgcatcagaagttgagaaagggaaagaacgatcagcttgtttgtctctttccaatctctgggaaggaactctccggatgggacatgtcccggtcggtacctccactttcaaaggatcagatttagaaacccccctccgagtgggtgaatttacgataaggtgatacccaacagatcaatcaagtaccaccccttttttggctttctgccgatatgcattctgcgtgttccatgcatggcgcatacatctcaggcataccgctgtgggtctttccactggcatctatcaaccggcaccggtactatggatcctatcagcagagtctgtcaagaacataacatgcaacagcatggcacactctctactagcgtcaatacaacacggtgacacaaccttatcgctcccctactatcgatcatctatttacatatacttccacttcttggctttcttggtccttttgccctccaaattgtccgatcctgggatttctgcatcatccatgcttcctatctgggtaggtgcattgtcagattctgtcaccgcctcgaactcgttactgacatttttttctcttcaggggcgtcaatgtcaccccacgactgccctgctgccgtgatcctgaaatacagtcaaaagaagcccccgctagtggaggctagcgcctgcccaccaacccacgatgtcgcagagcagaccacctaagaccgcaagcgaacagtctcgcccgctttccacccgctagttatgggcctgaatgtaacggcaaaccgttgctcagcactaaggcccgttgtacattatcatcacaacaggcagcaagataccggccagtcggctttgacgtttgtggctgtagccatggtgcgatttgacaagacgatgacaaccgcatttttcaccttaaccgagtatgccataaacactagtttggtagctaagtgtccttatcggtttcgcctcaaagatacctcgcagtctcggcacttacaacgcccctgcattacatgctttgaattcctgacttgtctcgaaccgaggcctacgctctatcactcgcaggaataaaccatccgtcagacatgcatcttgagacagacgcacagaatcgaagatcgactcctgcagcgatgagaagcccctgtctattcccaaccaaactatcaggattcaggggtgtgcttcctgcttattccccgactcatgggatgcttcccggttgtatataagatggcttgagcagcgttgctctggaatgctgtttgtcgcatgacaactctgcttggttgatttgctttctcccaaatcatcgttctggtctgacataatcacctctatccacgctgccgtgtctcctatacaatggctcgccaatatgacaacatcatatttgacttgggcgatgtgttattccattgggatgcaagcactgttactgcccttccaaagaaaaccatccgcgccatgatgaataccaccatctggctagattatgagcggggcttcttgtcgccggggcaggcacacaaggtatgtaggttctctttcaccctcaagatgcatgaacaatgctaactccggacctcagctgttggctaccgagctaaagaccacaccagagctagtggccgagtcacttgagcaagctcagttgacactccgccctgatgctgagatgacagatctgatcctgaagctcgcagcagcacgcacaagatcggggcaagccaaggttaggattcttggtctctcgaatattgccaaagaccacttcatcggcattcaaaagatccaattcccgtggcatctctttgatcgcatctttacttcctgcgacacgggaatgcgcaagccagacttgtgcatctaccagcacctgatcaaggagactgggatcgaccctgctcggactattttccttgatgaccgtgttgagaacatttttgcggctcgtagtctcggtttgagaggcgaggtggtcggtcgtctgggacccgaaaggtcgcagttagttcgtcttcttacgaacctcttactgcctgacgacactataattcgcgccgaggggttcttgaggtcccgagcgggtaaccacctctctgagttcgaagggaaggacgtgtctttccgcgacaacttttcgcagcttcttctatgggagctcacgggaatggaagagcttgtgtatctcacctggccaagccgtccatcacctgaggtatcttcagcttcgtcaccggtcgataccatttccaatccagactccgccgtggagctactcctagacgagagcccctctagctcgtcccaaaaagttaaacccgccaccacctcgtccccgttctggaattacttctcctcccaaccagtcctcacaaccaacacgttccccgccgacgcagataccacgtcgatcgcttacctcagcctgccagaacagcacctctcttcggtggtgccgccatcagaagccatggccgccatggcagccaacacgagcgccgatggtatcatccaagtctactttagctcttcccgtccgcacacctgccctgtagtctgcgttaatgtccttcggttctttaacaagttttcttctactcccgttgaaaccgacgatcgcctcaagcccactgttgactttgtcatcaactcgcttgctaacagggcgtatgttcacggcagcaggtactacgtcccagaggcgtttttgtattttgccgcgctgttctacaatgagtgcaaggggagttcacctggtttgtgggggaggttggatgagcatatgaagggggctttgttggaaaggttgagggtatcggctgcggggaatacggctgcgctggcgatgagggtgagggcttgccaggttgttgggttggggagggaggtggcgaggggggattttgaggaactgttggggttgcagaggggggaggatggggggtggccggcagggtggttttgcaggatggggaggacgggggatgcgattgggaatagggggttgactacggggatggtttggagggttttgagggattggtcgtgattttggaggacagaggctccagttgggtgggggaagttgggcttgtgagtagggggtaagtaaacaatgatggaggtgttggccggggaacgcgaaaaggggcttcaactaggcacatcaaactgtttatattggaagagaatttagagaaaatcatttttccatccatatttcgttcttttcgaatgatatacataattccatggtgtttccatgtcttgtacctatggggaagcccaatttaaagtgtttgtattgctacaggtaagctcagtaatgacgcttttgggctgtgtaccacctttgtgctcccaaccaaactgcataggtaccttagatagccacgcaaaaactctcgcgctgcatgatctcataatgctcttcttttttcacgacaaatattccctgataacccataccgccacctatcaatttcagcagtcacgccttccatcaccaacaatatgcccaccaaaatcttctccatctccgcccttatcggcatggtcatatcggcagccaacccgccagatccctcacgcgagttcgaactgctccaagcccgccaaccagaagaagcgcccaaactggccaagtcaggaacagggatgaaaagttgcgttaggaaggtatctggatcgtgccttgaagctgtagccacaatatccccattagttatggcagtatcaaataaaagagaacgaatgaatcctccagccaggctacactgctttgtggctgctaattgtgtatcctcgggcgtctaaggtagatactgatggtgaatgccaagacttggtgatggggtcatgtggagctcaaaaatgagcaaaaacatacaacaccagggattccccagtggtcacccacctgagtactagtctggcccttggcagcttatctaggggagagcggacgggatcccgagctttctgccaggtatggtcgtatgtgacaattgtggctggagttagagtttatacaacaacaatggtttgtgcctggccgatatgaaatgtgatggccgaagtttgaggggaacgtacagcgttctgtttcatgtcgaggattcctcgctgatcctatctcttctaaatctgctcatgattcatgaactttgaacttgtcgccctggttgttgccgccctcgttctaggcgctaaaattgaccctcacgcctgccctggttgctatgcccgacacagtaacccgccctttgaatacatgccatgatatccgtttgaaattgtgttccaatcacgattctctcataattttagtgctgagtccctgagttggtgtacctacagtaccagagacaaatttgacatctacctcaagctaccaatcctaagtatcaatgatcctatcatctatccccaatcaagaaaccacttacttcttcgtgcaagcccaaaaaaaagtgcggtttgtccaaatcccccgctaggacttacgcaaaagatacagactcagattcaatatgcgtgccccttgccagacctccaaagaccaaacctgatgtcattcgcaacaagttgtttgggcattctttgcaggatttcatcaccgtcatgtttcttttacttgccccagtgctccctttaccgcgcagacctcagctaccaaggtgatgtcatgaaagcttagggggaagggtgtcctccacctctcccgcctgccttccaagtgcccacagtcccttcctcccatgacaacctcagtacatcggcctatccccgttccatcctacccccagaacgagccaagcacaccatttaagcccaatcaaagccgcttggtaccatagaaagcgggcagatggtgtaatgcgccaatgatgaccaaaaataatccattcattctaatgggatgagggttcagtctcaagtcagacaaattcttagaatgaatacggcactggggaattgaggcgctggggaattgagggcctgggggattgttggactgggggtttataactcaatgaaacatctcaagaaagaaacattgtttcttatgatgagaaaaacaaaggtttaagttctgagacgcattctttttaataaaccacgggaagcatagggtttgtgatggaaacgtacctttgatgattttgtccctgcggggaaaaaaaagaaatggcagagtaagacagaaatttatactgcattggacctgtgataaagtttgctcaattgtgtttaagcttcatgacgcgaaatggcggtggcaatccggcttgcgcatgttaagcgccttgcagctgttatcagtcagcctcacgatgctgaggatataagcttcttagactatatgttgatgttgggacgtacgaacaccttgtcgagtctcttgctgggccccaatggatcccatgtttcttgtatagacatatttctatatggatatattgtcccctgtgaatataattgaataatatccatgaatgaattgttaataagcattgaatccaataatttacactttaacagtaatttaacaatgaaaagatgaaagcacatgattcacctgttatcatcagaccggctgctcgaatccactgacgggacttgagctgagttttgtgggtggcgacatatctgaaaacattggggcggttgttcaaggatgggtacctcaggtacctcctgaggttcaggcaggacactttaagttccgatcgatgccaccgaaattgggtagaagaccaacaatttcacatccgtgagggtgctctctcccatcttccttacttgccgaaacagtacattcatgacccctgacgttcgccatgtgcagcatcaaaactttatcctattcttttctctcgtgttttcgccatgcagtggacagccttcgccaagtatcgttcaactggatcttgtcttccccagaaatcagtcgacataccagcccacatacctctttctgtggtattcgccatccacaaccctagcgttctctggcccatccactggatgtttacatggccgcttcagtcactaacgccaactgcgaatggaactgatcttggctcagtcgacgaaagtgagatttttgggtggggcgatcctgggaactaccaaagcatcgcgtcagacccttggctgctcattcccggcgtaaagaatctggtcaactcaacctcgtcacagttcctcctaatagtccccctgacaatcagccatatttgtgaacccagcgaatcacagattcctccaggggccaaggggtggagccgctcagtcgacaacgtcatcttcttcaacctctcgaggaacggcatcttaccggacgttgagcgtgcgggatcttgccctttgccagttggttccatgagcttctatacagtggtaaaatacccctgcccagtgcagccggaactttcacccgtcaaggactgcgcctacaagatcgacccaagcacacattcaagagtggaggaaagcatgctcgtgagtttctcgtgtaaaggcacggggatttcctgtcccaacaccactggacttgtcgggccgtgttgaaagagctcgactgctttccgaggcacatggactgaaagatggttggaggacattgttcggggccggtggggtggggatgtttgggctgttacttgaacgccaccatgtaaaacagaccctcctgcctgcagcttcggcttagagtttcgtttgtgggtcgctgtggctttcatatattgtgaagcagcccctcttttgtgcagcttcaaatttcacaaggtgcctgcctcgttctcatcagtcattctcatcagtcattctcatcagccattctcatcagtcacgtttcttgatttggaagctgggaacgccacacaaacaaaactccacacgatcttcttctgctttacgagatgttggattgtctcgaccggtgaaaggggggatcaatggtcctgttcattcccaaacaccgagaaaaaatgtgaatagtggacacgtccagaggcatgaagatggacaagtctgagcctcggggaattagttggcatgtcaggcggaacggagcccctttctggagctctctgccatggacatcgaggaacctcgtcccgaggagctaccgagaatgaatgtcgtccgaacgccaaccgcctctcgaaagaggatgaacgttcagtaaacaagaaaccgaggtatccatcaatgtcattgcacaatggtattcgatggcctttgctcaggagttccttcaaaagacggtactcgccagctttcagcatcgtagtgtccagacattcgatgccatggatatcacaaagactacctgacactttcggaaacccaacgacagggacctcaatatggctgttttctatcttatttgcctacttcttttccaaccagcggcatctcaaagcctaaagagccttgccgggtacttttcttctctttcgttgatcaaatgccctgttcgctgtgacgactccggttcctcccagaattggactcgttaccacgccgtgtatcagcttacgacttgcgacaagccaccacatctcagctttgcgttcagctcaccaagccccaacgttgacaatcaggacaatatcaccacacctttcgtggtcctcagtcgctccaccaataaagggcacttggtccttgatgagcagtcgaaggtgttcgacagcttgaccaaaaaaggcaccaagaacagcaccgccaacatcgaggtattctcagaatctgtttcggaccttcaaattcctggccagaagttcgcagtcatcagagagatccaggcatctcttctcttcaacaccagcgcagcaacggagcaatttgacggcagcattagacttgtggtcaattatggagacaccacattgggtgtgtatattgggggaggacttgacatgaagggggtggctctcttccagctagaagagttcatagctctcgtccaggaccgcgacgacaacacattgactggtctccagctttgtggggctaaccgcaccgcacaatacaccatgggagtctttctcgacaccaccgctgatgtggcactgaggctcttcagggtacagcatgcactcgaggcctggtccttgtcgcattgtgtcgtgggacttggtcaacgggagtcactcaagccttccacattttggctgcgtgagcccagtagaacagcccttctcaatggtaccaacagcatcggcaactggacgacgcccgtttcaccattcaatcgcgctatggcaaagacatcatctcatgtggccgagtgccggacgatccaagttgcctccggcgatagctgcgtatctctggcccaaaagtgcgggctgaagaacgccaacgacatcaccaagttcaaatccacagaagcacttttgtgccacactccgtccaagtcagcacatttgctgctcggctggtacactgcccgacgttcgaccaaagcctacgcctgatgggacctgcgcttattacattgtcaagaacggagatttttgcaacaagatagctgctgccagtggcttgacggtccaggagctggagaaggttaatgagaacacatggggctggaatggctgtgacaagttatatgtcggcaacaccctctgcctcagcaaaggaaacccaccactttccgctccggtcccaaacgccatctgtggaccacaaaagccgggaaccacctgaccaccgccggggacagatcttgcgtctctcaatccatgcccgctcaatgcctgctgcactgtctggggtcaatgtggcacgacagccgagttctgcaccgtcaaaggtgccccattcggtactcctatcaagccgtgaagggtcgggtgcatctccaactgtgggatgaaggtcatcaacaatgcttcccctccgtcagagttcaagaggataggctactttgaagcctggagctcggctaacaaaaaggagcggccttgcctgtttatggatgccacccagcttccgacaggatacacacatgtgcattttgcctttggggaggtatcctccaactttgccgtgggtgtcagcaaactcaaaaaccagttcgacaagtttgtgaagatgagaggcttcaagagaatcattgccttctgtggatggacagcgtctactgacccaagctcattttggatttctcgagaaggcgtcaaaccgggcaacagggagattttggccaccaacatcgccaagttcgtcatggaccatgatttggatggcgtggatctcgattgggagtatccaggtgcgccagatctccctgatattcctagtgccgacccgctcgatggactggcatatctggaactcctgaagttgttgagacagaagcttccgtggtgagtgagatatttagctggccatgtctctttttccgtcggccactaacaccggtttcaggacaatagttggcgatcgctgctcccgcttcctactggtatctcaagtagtttccaattggggagatcagcaaggtcgtcgattacattgtgtacatgacttacgacttgcatggccgtgagttttcgatctgttttccatcgtatagaagcagccgctgactttgatcctagaatgggactttgacagtccttggtcctctccaggctgcccagcaggcaactgtcttcgctcacacatcaacaggacggaaaccctcaatgcactttccatggtcaccaaaactggcgtctcatcaaccaagctcatcatcggcattaccagctatggtcggtcttttcggatggtcgacccatcctgcaccggtcctatgtgtacatttaccggggcactctccggagcaaaacctggacgttgcacacgcaccgccggatatctcgccaatacagagattcaggagattttgcattacgacaagtcatcacgcacctattacgatgaaggcatcatgagtgacattctggtgtacggatctgactgggttgccgacatgaacaacaacaacaaagggcgtcgggaggctctgtggaagtcaatgaactttggcggcgtctcagactgggcgatcggccttgccgagtttttacccaatgatgtctctcaggttccgtcactgtcaatggaggagatcaaggaagactgggccaacatcacctgcaaacacccctacgcgaggaacagcagctacaggcagtccgaccgttggaaaaccctcaaggttgatgaggcttggaagcatgttgttggtaagtgggacgcttgcgcaaagtctggcatgcctttccctgtttttgtgagccgtcttctcaacggtcccgatggcatgtactgcggctcgatatcctccacaaacaactgccttgcaacagtcgaatgcagtgacgaatccgaacgccggccggcagcagctctccttttgagttcatttgtgaagcttgctgggatctattacgagctgtacgatggaatccaagcagctcaggtcaatcttatcacgacactgtccaagttctcgagcacttttgcaccagaacaaaaggcggacgagtctttgaccatgactttgaatatcttgagcgctggcttcggtgtgctggcaggcccagtctttgcgaaggctttctcgtctggaaatttcttctctcagaatcctggtattggagagaagctggagtcggcagtgatgaagggcatagagtttggcctggctgaggctaaggaatacgccaaaaaaaaaaaacccctgtaggtctcgtccttttccccatgtccttttatcctacacatcagacagttagaccttaacacttcggctgtagaaacgagcccgtgacggaggatctcgcatcgcagttcaactggattgtgatgagttggaaagaaattgtcgacattacacaacaccaagccttctctaagacgaaagatggagttagctatctcagcagcatgatgagcaacggcaagctgctcaaggtcgagccgatgaacaggtttgacacggaatccaccatggtcaaagtcctgtacgccttcctgattccgcatgtctggcatctccgagcctacagccctgttctcatccacgccgagtgggactgccaaaaggttggggtcgacaagttcatatggctccagtccggcgacaaggatgtggccaacatgtgcatcgacaacccgtcagcactactttcttttccctggaggtccaacgatgatagaccacaactggggcaactggggtggaggttcggagccgaatcgaatgccggtcttgccaggcacagagactctcgggtctccattgatggatgggcaaaacgatctcatgtagggatggatcacgcagatggacattgcaagaaggtacgtcatttcacaaacatgttgaccccgagcacgactgcatgagtacccgctgacagcttgacggtgtcttgaagcgccacgccaagtggggaaacaaaggcttcgacaagcttccggatcacttcaatggggaacaccggaataacttgatcgaggaggtcacaaacggcgatgtcaagcttctgccggggatcatgaacatccccatgtgtgaccctcaaacagtatttgaaaactaaaagaagcggacagccggccaaaagacggattgggcatcgtttccttgtgacgaagagtagcctcgctgcgtgtgccactgttctcagtccactgccgccgctctggcatctgtttttctagggcggcttcattcaagacaaccgggtgtggatgagcagggcggcgggcatttgggccgggctgtgatgctttgggagttttttgggtaaggtatatcatggttggattgttacactcgcttaacatttttatttgtatctacatgcttgatactaaaacttgtgtcttaccttatcaccatggccctcttcgatgccttacagtagagaccgaaatatgcattcaaaggcttgaaagagacgaggtacaccttttaactttttttaaatatatttcacctgtcctaaattatcgttggatccgcctgaactatccttttacccccctaactatatttaaaccatttcactgtccttaaacacttcttcattaccttaatttaaaacgcttttcgactatcttagactacctctatactatcttgaagccccttggaataaatatggactcaagaccttttggatatctttcaaggttcatttaccatattcagaggcctattcactctcttccaaggcctcagtcccgaatatcaatccccatctttcgttcacgacacatgtacacatgcccacatctcgagatgtgccttggtgcctaaatctcaactccctaaagacctctatccacctaaaccaccatcaaatagttgaatgtattaaaacacaataaatgcaatcagagtaatacttgacattcaaactggcctccaaggatcaagtcacttcttatcccctgcatcaagcgaagcctaagttcttctttcgctgccttgtcaggagatacccactccatccagttctaaacaccagccgtcatctacaatcaaacagtcacgagtccaaatcgaagctgatgtaaaagaaaacaaaagccgcagggccattgttgattaaaaatgtgccttgaagcagcaaggaaacaaaaagcccagctacacaaaaatcccatcttggcagctcaaccatctaaaccaggccaaatgttccccatatcccactctccgacccatctcccccatcgaaagatattatctataaacccccaactctatcttctattcccatcaccgccctcccccccccctcccaaacaaaactccctttcactctccaccgtcttctcaagagaatatctctagctcaataccaggccaaaatctagcactggccctcattggggtcggcgctatttttcaaaaaccatgtcagcaaaaagtgtcggcaccaccaccaaagaaaacactaacctgtagtaccagttatcaacattgttgtaaccccccttgttctgaccgcacccgtcaacctccctgctgagacggtggatgcagtcggcgtcgtcccagttgcggcgcgagttggccttgttctggacccaaaactccatcttttgcttgccgccagagttgacgcacaggaagatcttctcctggatgccaaaggtgacggagaagcggcccttggtgcaggcgtcggtgatggcgcggcgggcggccgccttgtcgttccaggtcacgcctgaggtgtggcaggtggccgagacggcggaggcggtggccataatggcgacgaggaggttggtgagctgcattttggtggtgatggttgggggcttggttgaggtagagtagatggttgaggctgttgaagatgggagtgttgatggtgatgagggatatgtgttgtctggaggtgggagacgggcgttcttatagatggcgtgctcatgctttctggtgtctcctcttcaaccgtcaacccccccttcgtgctgatggtcaccgtcgagcatccggcaaagcgccttcatctcccccctacagattgcctgtcagactaccggtgaccacgagatgagctggtggatcctttgatcgccagctgtcggcgtgaagccgtttaccgcctcgtgccaaggtgatggtccagaacatccttctgagggtttggtgattagagccccccggtcgtgaaacatcccgtcggtatcttgatggcaaggcaaggatagacagtgcccgatcccagccctacgtctccattgtggggaggcccgaacatcattggctgacccttgtaaggtagatccgtaggatcggtgtcagccgattggcataaatgtgaattgatgtagttccagttgagccgggaggtgtgaaggatctcaggtgccgactacctaaggtgggtagctacactactccatagcgttcgctgtgtgcttgctgaaagatcatgattgacaaccggtctttgggcgatcttgaatcgctagtttggcacggaaaagttgccaaactacgctgtcacatcaggggagcgtgtgttgcaagagccgttcgtttcttctcgttcccaatcgagaactcgcctccgtgctcaggtcaccgctaccccttcatctctggctctctcgtcgccgaaccctgaagataacgtcccatgatatctgccacgttcggctgaaggatttcctatggccataagcagccacggttcaataatccactctcatatccctgcctagctcaggctgctgttctcaggtacatgaccacaggttccacggctggtctaagctttgtgccatcaaggtaatctcgccagtgagctaaacattcataaatcgttatggcctagaatagcataagttatgaacgagcaacaccctgagttcaggagggacatcgcatcaaggcttcatgccacatatatgcccccttcataacattgaacaatgaataaatgttgcgtgatatagttatggtatatttcgttatttcactccttgaaaacaagccatctcaacattccaccaaggttacacctcgatcatgtccacatccccctccccatcctccttcaccgccttcagcgacggcgccagggcatccatctctctcaaggtatactccaccaaataactctcatccaccagctcctccatcctcttgtaatgtctctccgtgtacacctttagcgcattaagcacctccttcaagctcttctgccccctcgctcccttgacgctcaagcccgagaacttatcagccggatagctcctcaccagcgcggagagaatccgctgcgcaacaggtgccgtgcgcgcgtttgtgttccagtctcgtaacctcagcaacaaaaggaacagctgctcatctgacaagctagcaagaacctggtcgacagctctcagcccggtgaagctacccgcttcaggagtaggcgaggtgacaacgttggtgaaaagcttgagcaggcggcctgggtggttgagctggagagccaagacgatggcgtctctgtaggcaccgatatggatgtagttctccaactcctgctcctgctcaacaagccgggtggcggcttcggtggcggcggtctgggtctcggatgtggtgtccttccagaaggtaatcttggagtcggagccagccgagacaatcgtgttgcttttcgggtgcacggccaaggtccacagtctgtcttcgtggttgtcaagggtgcattctgtttcgcccgtgttggtgtcccagatcttgacgagactgtcagcgccagcggaagcgaaatggacatttttcctgctgggatcctcctcgactgtggggatgtgcaaccacaccactttcagaacgttgtgggagtgtccttcaaaggtgcgaagacacgtgtagtcggaaagattccacagcttgatagtcttgtcaccactgccagtgacgatgacaccctttccagagacagcaccacctgtctcgccttggatggctggagtatggaggggagcaaacttgaccgcccatacacctctcttgtggcccttgaggataccctgcacctcgagcctttctgtgtcccaaatcttgaccgtcttgtcctgtgacgcagaagcgaataactttccagatgggttgatatccagggcgttgatgtctttctcgtgcgccaatctcctgagactagttgtctctttgaacggttgtgatggtcggggaataagtcgcttctggacaaatctgtcctgagaaccggaaatcaggaatgctggagggtggtcgagagggttcttgaacgcctcagagtcttccggaggagcaaccttgggcaaagacactgctcccaccgactccaggtgaccagtgaaggtagcataacactcaaaagaattctttgcaggatcaaccctccatattctggctgtgttatcttttgcaccactggccacccagtgaccagaccaatccacatccagtgacatgacgagatcctcgtgtcccttgagcaaggcaacgtcgtgcccgaaataggaaccgccctcctccccgctatctgttttgacagatactatcctaatatcctccgagttcgtcgcaagcgccatcatggactgatctcgtagaaggtagaccaagtcgtagatttcgtcgtgtgtgccggatatccgtctaaacggctcccagaagaactctcccgcactcgcactgatatcttctgctttcgggacctgatagagggcgagcgtgtagtcggcctgggcgcacacaatcaaggacttctctggcaagtagacggtagaaagaatagcctcgccctccgccttggggtcttgtttcgcagtgatttcctggtgtgtagttgagtcccatatccgcaagagaccgctctctccggctgagtacatccacttcccttcattcaagaaccctacagattccaccaactcgtgccgcagcattggcgttccctgccagccattctccccccaaagccacatcgtcatcgtcttatctctgctgcctgtgagcaaagcatgctgctcgggcgagtagtcgatgctctgaacattagactcgtgcgcctcccttttccttttcgcatcggagtatacgggagtcgcggtgcgtttgtgaagatcgaagatgcggaccttgccgtcttgtgtgccccaggccagccgaaacttggagtcgacaccgttggtgccgtcatcctggtcgttctttcgcgagcccttcttgggccttcggtcgattgtggtgtcggcggcggtcgcggcgatctcgaaaaagtgcagggctgaaatgagaacactcggtccgctgacggtgtgggttacatatcctccaacaatatcccaaatcttgatggcgccatcggcggcaccagtagccaacaatgtgcttgttctgtcgacggccagcacaaccacaggggtggcatgtggcttcgaggttcggacgagtgtcgtttcgatcgagtcgaattctggggagactgtgagggcgtagattcgcatcgtcagcgaccgggagcacacaatcaagtgcgaccccgaaggcgtaatggtcagggtcgaaatcggttcgccatctccttcaatctcggccagattctttccagtcgtcaattcggtgagcaccgcgttttcgcccagtgtcgaggcgaggattctggcgccattttcgagcgcaacagatcctccggtatagatgggctgtataacatttccaacctcgaaggtggtctttgctgcttgtcgtgtggccattttcgcagctgtgtgggttttcctgagaatgcgaatgcggtcgattgaacgctgcttggtcgcgaccccaaattttttgcccagccagttcctgtatttttttgcgataagagctggtaaaataaggttatcttagcgctcattaccccggtcgacctgttcttggcatcctgcaaggaagctttgacgtgcttgcgtcccactcagcccagccaacgtcctctgttcaacgtgctcccatttcgacgggagatgggtcaatcagctggtctgatcaactcatcgcttataacagttgcccaccatgggtcttctggagcccctaatctcaatggctctggtatggtaactctgacgccatggaggattcgatccaacggtctaaccaatctcacagggacgatctccttatgacgaggtaatcttcccaaatacctcccagcaaaatgaacaagacaacgagcatgatggatatcgtcaactatacgatgagcggggtcgcccaatcaacccggaaacccggcgcatcaacagagatgtcgttcggtcgcataacgaagtcatgacggtgataggtgtcgctgagcctgacaacggccccgatgatgctcatgcaatgtcctctcatcggcataatgtctatgaggacaggtggggaaacagactgctcaatctaggcggtgttcttgatacggcctgtgtctggggcgtgaatggcatgagacagcgcattttggtgagaacttatcccgcagatctgcaaactcccggctgactgtagtctagctatacaaacggtacagtcgagtgccattcacagagacattcgccctcgccagacaggatcaatctctagctgcacacttcttgggcggcttgccagcatttggcctgaatgcagtgatcgatcgcatggtagccccaaaggtcaaggaatacccaatgtatgttctcaccatgaatagcttcatatcatacgctggctaatcatgtatctagacttggctatgcctccatgtatatccgtctccacctggttgtgtacaccacgttccaacgcttcggcatcattccggcaaccgaacttcttcccaactggagattcttcatccccggctcaagcatatcacctattgtcgtcccaccgctgccaacatccctctgtccagtcggaattctcaaatggataggcggcaccctcctcggcgttgcccccctcggtggattcttcgcctacatgatcgtctacaaccacgttgccaagttcttccgaatgaagattataaacaatctaccactccccggtaacccacggccggcgaaacgcagagcgctccaggatatcactcccgtcccgccgacctttacactcgagatccctccacctgttgatcaacatcccgttgtcagcggctcatcatccaccccaccacctgccaccgcacccacgcaacaacaacaaccacaacccaccactcgcaccgcagaggttcccccccgaagacaaagcataacaaccaccaccaccccgggcgccggcatcccccttgtaacggacgactacgcctcagaggaagaagagctagaagtcagcgcaaccctcatctccttcgacgtcgaagcagctgactcttccaacaccctcagcggtaacttcagcagcaaccccgccgaaacaatcaactcggccaacccaggcatatggtctgccgagctccgccccaatccatcggaaaacaaccgcgccgcccaggcaagcagggagcgcacctttcgggacaataaactgagacgattacctgctgcgctggcgacggatgtgtttgctattgggccgtcaaggttgatcatgagcccggttgcagcgttgtgctggacggcgatgattaggccttacttggcgagggcggggaggtggggggagttggagggggtgaatgaggttggactttggggggcgtttagctgggagggggtttcgagcttggtggggatggagttggtgttgtttaatttgatggggagcgtttggacggtggtgagtgggttggcgtggacggtgaagatggatgaggaggagtgggaggagtgtggggaggggttgaggggggaggaacaggagggggaggaggagagatgatgggtattgcttttggagggggaaaatggggtgttatagatgagacaatgtgataacctaaagtatgatacaaaagaagacccaacgccatggcatttgaagtgtgttatgagttcaggatcacgctctgcccttccccttcgctttcgcccttagcttcctcgtcttttccttgtcgacgatgtctttgacgatggagtgcaaatcttggtttcttctagccaatagcaggacatcgtctgtggtgactgttgttctgttggcatgacggctgaaggattccagatcggtagctacgttttctgtttttaaggtggtcagcagccggctatgttatgagatgggatgagatgagatgagatattcccgtagctgtatgagataggatgaaagagaatgtctttcagatgaagctactgatcaacccaaagcatgaacttaccgatctgactccataccatatccgtcagcgcaccgataaactgcggcgtggcattcctgttccttctcatggactcctcatcgacgatcttgccgatggagaaccacagggccgtcttcagccgctagattcatttcttgtcagttccaagtcttacatatcactcaaacataaaaaaataaacacacctcacggatttcatcctcactttgatcagccatcctttctttgttgcgacgggttcaaacgtcttggcagatgtcgatgagagacgcgctcagacgcgtcgcagtgtgcaaggccactgacgcgaagtcagcaggtttgcggtggacttccagattggcactagaatcaaaataggtttagagttgtcttgggattatgcaagcttgaaagtggggagagacggtggtggaagagccgcaacggtgtctagaatgacggcgttgtttgtttgtgttgattgtcaaggctggcatcacaaggtagactgttagctatctagccggtagactgagcaggcccagttttgatcaccgtaaaaaatacaagaacaaaactaaagtttctgattctcaattcttcttgccggccctgccggaagtacacacccctaactctacagcggggtccgcagcacaccgcagcactcccgcctttacgtcgagctccttgcctgcatggtagattttcgcgcatccttttcgcatcttcaacctatacatactccctcaacccaccacataacccccccaatctttgcgccttttccttgaacatcaatcccgtcaccgattatctattccacacccccaaactcccaccaaaataacctgcccaccatggacgacctcgccaacctcgccaccaccatcggcgaccgcttcaccaccaacctcaagtccaccctcgacaacatgtccccccaaaaatggatccgagtcatcatcgtagccggcgcctgttcgtcttccctccctcccctcattcccattctgttcacccactaaccccccaccgctagacctcctcctccgcccttacctgatgaaactcggcggccgcgcccaaatggcctcctacgaagacgagcacgcagcgacagaagccgagttcgccgccaaggccaaggccaaaatctcccccaacgagctccggggcaaagtccagatacccgaggacacagactctgaaggtgaagacgcagagggcgggtcaactgccgctgactggggcaaaaaggcgaggaggagacagagggatatgatcaagaagctgctggaggctgaagaaagaagattgcaggagagtaaagaggaggaggaggataaggacattgaggagtttctgatcaaggattaagcgcacatgagtggcatggttaaggtggaaaagggtggtatagaaaccgggaacgggaacaggagggtcggtttatcaaaatggaaggactttttgggtaacgacataaagatggatgggggtacatataacctaacgtacataatgataataaagcttccaactgccatgttcaactagtgcccttccaacttgtaaccatgatataagatccttcttcacctgtcatatcctgaacattcaagcagcaacctccgccaactccaacccctccctcctccactgccaataaccccccctaatccgatcccacttctccatcaacctcctcaagcacaaatccgccctctccctctcccccaactccttataaacctcggccaacaaatccaacgcatgactcgacctcacctcctccccttcctccccctcgcccaaccccttgacaaactcctcggcaaactccctcacagaactcaaccccctcccccctttaaccaacacccccctcaagtaattccaccccgactgattctgcggcgccaacctaatcttctcctccgcataagccacctcccgatcaacaatctccccaggcacctttgggtccgcctcggtagccgcatacttttctccaggcgtgcagttctccggatcggaaaacaccaaataaaacctatgcgaccaagccgaattgttcctcacatcctgctcaatcagctcctctgtgctcctcagctcctccgggttcccccacacccccagcttgcccaccatccaggagcggtagctccacacgtggtagttctttgtgtcttccgccaatatctgggtcagaaactccctttccgaagtagcaaacgatgccagcgccggagggtcagacgcgatggaggggtggtagtgttctaccaacaaattccggtggtgccagatctggtagtttttcaggttctccagcgcgatctggttgagccaggtgatctcgtccgggatggggagcttcatggcgaagatgttggccgcgcggaagagccagacggtgtagtgcgccgggttgaggttgatgatgtactcggtcagcttgagggagcgtggggagtactcttttgccgacatgacggcgcggaggtaggacattgcttgaaccagctgttagtctcgattctctggagtatggggcggtgataaaaggggctgggctcaccttcagcgtagtcaggagaatacgcaatcgccgccagggcgttctccggatcctccatcacaatcggcaccacgtcatcccactccggatccagcgccagcttcccctgcctcgccatcctctccgcgccgtacaactccctgcttagcctctccatctctctccgtcgttgcttttcctcagtatactctgaatcagtaaccaaaacctgatctcccgtctggtagtccacaaaccccctcttttgcctatccctcagctccctaaacctctgcgactgcagctgcagacaagacaacgtcactctcttctcctgccgtattccccactccttggcggtatactccccgatatccctcccccgtgagtcaacacctttatgttgctgctgccgtttcttatatttcctcagattaaaccccctagcaggaagcgagtgctcattaaccgtcttccacaaatccttctgcccctttgcacccaaaaaccgaaccggcagccgggtgacaagccgtgaagcaagccagacaagctgatccgcttgcgtcgtcgatctctttccctcgaacgggtgacaaagctcaaaatgatatctcgataactcggcgacggtggaaggttcctccttttctggttgtttggaagcgttgttgttgttgttggtactaggtgcagccggagctgatggtttggtggtggtgacggtggtggtggctgcttgcaaacaaacaatacttagcattcacaataccaaccaaaaccctaaacacaatagagcagaagaagaaaaacaaacatacaacttcccgctttgggcttttgcgccgcttttcctttgggcggcattgtcgcaaaacaagaaaagaaccaaaaaaaaagggagctgttacttcaggcagttggagtgtgttgaaatggcggggcagcaagccagacgggaggtttcagggagacgcgggtacactcaagcccaagcttggtttccaaagcttccagaaggaattcgggcaggggtgagcatgacaacaatcccaacccaatgtcaaagacaacaattgcaagaagagaaccaactcaagtcaacaacaaaacacaaatcaaattctttatttatcttccatcatcccggctgcttgcggctttctcttgccttgattcaacaattactacgtaagatgctcgaaaaccggaggtaaaatatcccgaggtagtaaatggtaccgcaacgtagaaatgttctaataaatcatccatccaaatcctgaaccaagaagtgatagcagccacaagtatattagtacagaaccgagcaaaagtatcaccattacacaatagcccccttcttttgaagcttccccccccccctcttttttttccacagaatcattaactcctatccccgcctgcctgccttccctccctgctgcccatggcccatgttgatcaccacctcaagaaatcctctctagtccaaaataataatagaaagtcgcattagaagccttacgcaagcgaaaagaaaaaaaaaccggccatacggtgaatgaatcgaataatacgcccatacgcatgcatgacaaaccccttctagatatccgggttactttccactctccaaaacttccacccttccctctccccaggcatgccaccatgcacacccaccagcctctccacaccatcattcccctgcgcattgaggaacttttcctgatcaatctccataccaccctcctcatcctccaccgtgccgttttttagaaccgcaggccacaaaacacccacgccgtcaccaccaagcgtagtctcaaatctttggtagccctcctcgtcaagctgctcctctaacctagcgagtttctctctaggaaccccgggttttaggagagtaatcgagcaaccaccaccaccggcaccggttagtttcgtccagcctatcccttggtggtctaccagctcgcggacacgttcgagtctggggtgtgagacgccaagtgagaccagcaaaccgtggttgatgttcatcagctcgcccacacggcgaaggctgtcctccttctccgtggagaaatcgtcctcggcaatgagctcagccgatgtttgcgtgaccttgtcaatggcatcaagaatgctgccaacaagcttcgggtgagtgtccttcaacctccccaccttggccacctcatgcgccgtggatttcggcgtcctggtgtcgaccaaaaggagtggcaactcggggaaatcccaaagtggttttacatcaggtgccttgctgtaatccgttctctggaacatgacggccttgccctgtgtggagacggtgttgtccacaccggaggggttgccgtggatgaacatctcgtagacgtacgcccatcggttgatgcgctcaatctgcatgcgggcctcctcaggcggttgatccggatggggcccagaaagtgtcctaagctgaagcaacagggctgccgagagacacacagcaatagtggcgctgcttccgagtcctgcgcctattggaatcgtggagcgcaatgtgtactggcaggcggggaacgactgtgatccaagggacaagaacatgtacaagaaagaaccggccgagttctggtgaactttgcgaacatccgccggcttatccggcgagacatcggcgaggtatggctggatggcggcgacgagctcctggtcgatttcggtgacgagactgtagtagtacttctttttcgacggctgctggaagatggcccagggcagttcgtcaatcctccacgagtggtcaaagtcgatatctgggaacttgagtgtgacagtctttctcgacttggagagcgatgttacgaggaggtaggagcgcaaagcgattgaagccgcgatcgccgcctgcaagatgcgcccacgtcagtttcgtcgcattcaaccaactccaagcgcttgcttcttaccttgccgtgcacaaccgcatgttcaccaaacacaatcacctttcccggcgccgaaaccataaaactaggcatcattgggctggactttttgcgttgcatgcgatctctgatattcccgttcccattcccgttgagcgtgaggtttcctgtgccgttggtgatcccgtttgtgccttcgacgccgtattcgctggcgttgctgctgctggcactgatgctagaactttcgggctcggtgtccacgtggtagccgttctggccgttccggccgttcgcaatggcctgcgtcatggcttgttgtgactgaccagaattccacctgtcgtgtaactacggcctcgggtgagacacaaaggtttctctgcgtgtgagccgagaacaatgtttagctagtcggccgtcaatggcttggaggtgtgatgcgatctaagaacaaaggagtctcgagcggcgcaagttgattgcttcgctggtcaagtagatgggctcgattgccgagtttttcgcaactgacttcggtccggtgtctttgactagaaatgatctccggcgtataagtgctattactcgccgagatatagctgcacgatgagggcgaagttggttcctgacgtttggctttgctggactgactaccaataaaatagcgatgattgagagaaagcggacgcgaaagaaagggaaagaggagcagtataggcgagggtggggtcggtggctattaatctggggagaagctggtcacagtcggcttgtttattatctctcacctcaactctcgacgacaagataacaaaaagaggagaaaggggtgagaaaggtacgaggtgtggtggtacagatcacggaagggggagaagcaggaaaatatgacggatggacattggacattggacgcggcactgcttagccacgatgcacgacggttcgcaacaggggggttactgcttgatgagcccattgggtaacatttggctttctcgaagctcctgattgggcaccagcatgcatttccaacgaaccgggtgacagtcaggggggccacgctataatgaaagctttgagctccgttaaaattattacctgacagcggtgtcaacggtctcgaacccaactctttgtcagcgtgtttcgaatgcgcaaaggcgtgcaatttcccccacgaaaaatctcgagtggtcccgtgacgcctgtgcctctgctgcggtcaaccaagattgcttcgcccgccgccgtcaggcctggcaatattctcggttctgtcccaatttagcgatggagggggacgcatgatgtgtctgcgatccgcttacaaaggggcatatcggaggtgtggggctatgacatggaggtctcgcgggactcggtgcggggagtgagcccgattgacgggagtggtgacaccgttaaatcggctaccccatgcggacatcacccgaactcggggatcggacgtgtccggacatggtaacacgtcatgcagtttgagatcaattcactgcagatgagtttcgaggaaaccattacacttcagcaacctggcataattagcaattaccatcatgtaatggaatgggtgatcatggaacgctgatcacaacctccaaagccatttggttgctgctgctgcatcagtctaagcctcagttacgcagtggattcgatcagatggagcaacatcttgtcgatgctaacccagcccaaattcacataatcacgccgaagacaagggaccaaaccagtacaggtgtttttttgtcttgatttgttttgtatagcgttggcagccggacgtaatccattgttttgaagagaacccctttcctgcctttcaacaagacaaagacgaggtaaactcccacgttcgttcctaaatcgtatcgcttatttcccgagacgccgtattcatcgagtcgcagacttgaagcctggacccagcacaaaagtcgaatttctccgtcatgccaacgccaccaaccccgccccggcagagctcaaactctagaccatgcttccattgttgttttcaggagacagtcgtcagaatttaagcctggaccttcttgtttctcttgggaatgtcagtgatgacgagggctgcggtgtcgtctggtcagttccatgctttcttccggatataatgcggctattcgtcgaggaacatactgggaggcaagctctgcttgagcttctcggccttgtcggagtccttgagaaccaaggtgtagaggtgtctctggcagcggaccttgaacttgatctgagacttgttcttcttgatccgcgcggctgtatccataaaaagtcgagtcagttcccatctcttcattgcccttcttccttcatttcctagttttcgagtcggtaggttacgtacaggaggcgtccgaccggcggcagatctcgatgaactaaaaacacaaaatgtcagtcaaaaatgcttttgtcggtttttttgattcggcccaaaaaactggccaggccgtgatttacacacctgcttgatatctccgatttcctgaggcattttgacggctgtgatgagtctcctgtaaacggtctacggaagttcaaagtcggggttggaggggatttctcaaaattattcagtttgtgtgggtttctccgaattggctcgctttgggtggggctcctgcacactcgacgcccaagccatcgccaggggtcctcgaggaggtcatagcgccctgactgtggctgggtgacgtgtcccgctttgtggcgctagctgtcggtggccaaggtaagagcgttgacgacgacaacacctgttcttatcgaaggacttatttacttttgttcatttttcctgctagttgccctcgaggttccttgccggacttctttatcattatccaaaagccagagttttcacaacactgtttgtcaaggactgagcgtcagtgtaagccaagatgccaacgccactcgatcatgcaatgagatcacgagtaagtgtatgcttcaagctttggtaacagttcactaactacatatcatagaatgctttcctaggtaacatactaagaccccggcaaggaagatcagctttcattaacacatgaacagctttcacaggtctggtgacgggtgttgccgtatgggcgatctggggaggagacatgttccccacatgcccagacccaactggtaatccagaggaatggtctaaagaagacctccggagatggctcgccgctgtatgttgtgtagttgggagcactgttctgtcttcatcgatgctgaccagccaacagcgaaatcttcaccctcaagactcagacacgagggagcaactgttggagagggttaaagcaaacatgaggattccaaggcagtgaatgggaggcatttctactccttcatacgtacataaagagaattgatattgcattgaaagggacatggacttatcttgttgtaggcaacggccacatgcttttaattcttggctaaagaagacgccaatgctccaacatatttcagcaaaactgcttcctgaaccctcaattcgcggctgtcagcctcacaggcaagagatatccccagtcatcaattaaggtactaacacaagatatgggataagtgacaaagcaaagaacaatagcaacctgggtgtgtgaggtttcatccgaccaaaacatgcaatctgggatgttagcgttgcagtagggccatcggagatttatagccaatcagagcccacaatcagctatgaggtaagcctagcttggcggattactgacgctcctgcagcaaggggcgcatgcgctacaaggacagtttgttctctgacgggaacgacaaggcagcaaaggactttgtccatcttacaacccctcaatccgtccctcgttaaatcgtctcccgagtctgcgacagctctcattgtcgcagcctctccgcgacgatggatattctacaggtatgcactaagcgcattcttcccgttcaatcctccccagctaacatggatccaactgtagcgcctcgcgcggttcctcgaccgtccgctattcccctggaagaagctaattatcgggttctctgttgcccaattcctgttcgaaggtgtcctcggtattcgccagtatcgtgtcttgaccaagaccaagccccccgccgttctccagcatgaagtcacacaagaggttttcgacaagagccaggcctatggacgcgccaaggccaagttctctctgatcaacggtctctacggtcaaatccaaaacttcgcattctaccacttcgatattctccccaagctctggtcatggtctggcaacctactccttcgcttcgcacccactcggttcaccggcgaaatctcgcaatctatcgtgttcattctggccttcatcttcatccaccaagtcgtctcgctcccgtccaacatctaccagacatttgttctggaggagaagtttggattcaacaagcagaccccgaagctcttcgtcacggatatgatcaagtccaacctgttggctgtggttttgactcctcccattcttgccggtttcctcgccatcattaagaagactggcagccagttcttctattacctctggatgttcggcgctggtcttcaggtcttcatgattacgatttaccccattgctatcctgccactgttcaacaaactttctcccctggaggaaggcaagctcaagaccgacgttgaggacctcgccaagaagctcaagttcccccttcacgaactccacgtcatcgatggcagcaagcgcagcgctcacagcaacgcctatttttttggtctcccctggaagaagcacattgttatctacgacactctgattgagaagagcgagaccgaggaggtcgttgctgttctcgcccacgaacttggtcactggagcttgggccacaccaccaagctgtttggtatttctcaggtatgtctctcacctcgtcactcctcgcaccactgtattaaccctccaaccaggctcacttcttctacatctttgccctcttctccgtcttcgtaaacaacaactccctctacgccgattttggcttccacgcccagcaccccatcatcgtcggcttcctcctcttcagcgacatcctcggccccgccgacaatgtcatcaagttcctcatgaacatcctcagccgccgcttcgagttccaagccgacgcctttgccaacaatctggggtacaatgctgagctggcttcttctctcattaagctgcagatccagaacttgagcaccatggacgctgattgggcttttgccgcctatcacttctctcatcctatcctttcggagaggttgaaggcgttgaactggcagcctacggagaaggtggttgttaaggagacggttggggaggagaagaaggaggacacggctgttaccactgggagggatgagctttgagggggtgaataagaaaattagtaggaagaggtggacggtaatccattatagaggattgatatttgtgcgtcatgattcattgatatttaagtagaaagaggatacagggaagagtgatctgacgtttctggttcagtctgttcacgagttgtgagcagagatggcagcattctgtagcacaaagagccaacactcaccagcgttttttatatcaacaaccctaaccctacgtataccaacccccatataacaccatgacttacatcctacacaacctcccattacaagtaagtgttctggataaagaagaattcgaatcagataaaaagaaaccacccctcctgggagtcgaacccagcgcaacggaatgagaatccgctatgttaaccgatacaccagaggggttgttgcccggtcatggagctgtttgctgtttgttggaaggtgctgacggaggagatgtttgtaaggcatgagggatatgtggaggaaagagggagggagatggggagggatttgggtaggaagaagggcaggaaggatggcaggtgggtaggaaggtgggcaggaaggaagcagaagggcgggtaacatggaacggggtcaggaaggtgcagtcctactgtaagatgtcactcctggggaagaagggaatggcagacacaattggcaagaagtctgtgatataaagcgaaaatggtataggcatccggaagcaacttcagtttcgggggatcatcactcgttggtaacatcatctgatcaacgctcatccaagaccatgatgattcgtaacaacaaacttgtcacaggccaaaaaaagtttaagcaagcactgacagggtggtaaagatagtccaactacaagagatactacggatataggtacagctgcccagcgtctcgaataagttctcttatctagccccagataccagtacattgtttgtgtgattttacaccaatttgttacttacagtatgtcttatttccttgcctcataatccaagatggtcaacatcttacagtcatttccactcgaaagctggtccgtacctccatcgtcagccttgccccctatacttcatcttgacccatgtccatatacgcattctaccctcctccgaatcgtcaacatgttttgccagcactgcctcccaccactcgcgcgtaagctgcgcatcagtcccggccagagccgcaacccgatacgctacccaaacaatgtcaaaagcgagccgcatcttcattttggtgtcataatctgcaacctccgggattttgatcacagttccagtcgatatcggtgtgagaaaaagcttccctaattgtgggtgattcaactcgacgccttgtcttggtttgactaagcatttgcagcggttagcaatatcttctctggtcatgtctcacagcagtggactatcttcgagagagaaatagctcgtgttgatccaatgaagctggagctgggtttccgacccctccttgtcgaatgctttgctgccaggattaagatatttgaggccgaagcgggcgtgcatccatagtcttttgacagtgagacccaggcagatctgattccagctttcattgtcgataaatttctctttgacttccgatgagccagaagggcgaaacagatctttgctggagttgatgtcgatggcggaatcaaagagcaaaggccatgcttgctccaagcactggagaaatttcttggtcttcccaaggtcaaggttgactagaggagaaatgatgtgaccgatctcagtgcggtacatctctgataccgtccccttaattagacacgggttttcggtgctgctacggggcggatgatccgtctcatagtcctcgagagcttctagtccttcaaaagctagaggcagcattgactgttagtgactgtatgttaatactgtttctactccacctcaacctacacattcggatcaagggcctgattgcccatagtctgccacaccatttaagtacctcctcatctgacattgcctctttcgccaacttgttcagcgtagccagtggggtgacgggcagcatagcagcaaacgcctcgtcatcgagctccatcggctcggcgcaaaggagagagagccgggcttaaacctctttaaccaggttgtatcgctcatccagttcctggactgagaaaacatcttcacctcgtggaggatttgcggctgaaagcagccgaaaaagccgttttacatcgaagaacgtggtgtcagggggggagagcggaggtttgaaatccacttgagcgccttgcatttcgaatatatcttctactgtgcgtaggaaagggacgtcgacatcaaacagcttgatatttagccgggtgtagggtttgatgacttcttcaatgaaccattcctcatcggctcagcaaccccagagccagtcgacatcctcttcgctggtttggggctcaacagtcgccatgctgaattccttttcttgaataccgggtttgcgagttgatgctaggaagaggtttgaaggttgagtaatggttgggaggttgtacttttgaagtgatgcagttggggaaggtgtgagtcagtcagtttgaaaatcaaatcaagagggcagtcgccggagtcagggaaggaactgcttgctgcagtcatggccattcgccaggagcaggtgcctggtgaaaataaacggcaggagcagactgatctccggccgtgttgagctgcctttcaaacctaatgactaccgatatttctttgggcccgtcgttatcaccaccgttttcaattcagtactgcaagcaactattcagtactgcaaacaactattatgagactttgaacaatgtatccatgtcgaatcaactgtcatttcagctcctctaaatatcccatcgtctttcatagttcgcccgaccaatccctacaacaccctcacgaagcataaagaattacagagttcatcgcacacggcaatttgatgatcaacatataatatgtcactcttcctgatatgcaaacgttgtggtaggtctttttcgatatctaattggacaagacagacgtgttggcgatgcataccaatcatccacatcttgatccaatacgacaaactaaccgatctgttctcctgccctcaaacggcacagcaaacctatcctattgtctttacatcacctggcagaagattccctattcaggaacaacatccagatctcaccttacacgcgagatgagcaagcagtccatgttgtgtttgtctgttgtatctaacgtattaagaggcgattgacttgagccttgcgagaggaaaaagagaaaaaaaggcaaaagctcgctggccaactccgtagaggtggccagctacgaaaccctcggtagggttttcttcgtaatgggggggcggtcgaagggggggtcgaattccttgaaggccatctcgaaagacagggcctcgctgaggaatcgaattcaggtgtccacggagccttgtttccaaggggcattgttcgttgcctgatccgggctgcctacgtcttacccgctgaaccatttgaccattccagttaccaaatgagtgcgtaggcagttgttggaagttggttgcgagaggtggtatgtataccatagtctggacagtccatcctgtcagcgagagtcgctctgcttactctcgcagcaaccgccaccatgtctaccgaacagtctcgcaactcgtcgccctcatggagtgctagtaatctccatcttgcacccgtttctgattctgcttttcccagcgcagctaaaataccatcaatttccgcactccccccaccgtgctcttcccaaccatttcccaccacatttaacccttctcttgtattcccgatccctcctccggataatttacctcacaaccacaatatttctaatctccttcacagccggcctgctgaccacctccctctccatcgcccaaaacctcctctcctagccagtatcaatcagccccctccttctcccctccgctattttgtccatcaccagcccccgaattatattcttatctagactctttctcttctcgctcgcaccgctgggaagggactgtcaaggtcatttaacgacttggtaatagcgaaagcagtgcagggagtagcgatgggaatggcggtggttgatccaggttagaattattgggtggcggcttttccggcgcagatatttacatcctgtgagtccattgttgagtcttgataagacaaagatgctgacattggccgatcctatattttgtctgagcttgattgtcatctcactacagtttgacttggagagacttgggccggagatggaaaccgttggctggcagttcattcatcacagcggcgcaactggggacatcgatcgaaatgatggcggtcatcacaccagcagtaggtggtgagcaacaccagattacccctattaaaagccggagctacgctccccaaaactacacctaaccagtagttctccccctttgagcacgaagtcctcgacatcaacccgggagaagaaacggaaaggctggacagtaacagcaacgccagggtgatgagcagcaactcaatgaacgagactattattataagctaataggagagtgtcatgttgagggtctgatgtattataacacttcacggacaaagaggttagaggatgggattatacgcttggtgtagcacgggatggtgtttttgcgctggtcaacctctccatgcatacaagatttacatggttcctgatagcatgagcaatatgctgtacctctcttacatatccgctgtcactacacagtacattctatcttagtgaaggctggaagggcgctggtgttccaaaaaatgatgatgcctgctgggagagtgggggacaagcaaaatatcaagcttttgatttcgtccaggctcgaactggagaccttcagtgtgttagactgacgtgataaccaactacaccacgaaacctcgtactttaatgctgccaatgtgagaaaaaagtgtatacatatgttaaactaaactcgatgttggaggttaccaagatacttcagttttgagccacggagcccctgaagcccctgaatcccaattcccacaacctgccaaacagtaacacaataaagctaggcgcagaactatttgcattgctgtctagcttatcccagtggcctcactaggtttaaggacatataaatttatcgttgcatcctagggcgtttttattatatgactaggtaaattatcatcccgcctacagaacctttctgcggttgtttggtgaaataattcccttgccagcggtgcctcaaatcccgttatgtccaccaagaccctttctacccagcgaagtcgagctgaacggcacacgaatcccagaattctgcccaatcctggaaatgatccaagcactcgtgtgctgcgtgatcaagcaacaaatgcaaggccttgtatccagctagctgcctaagcatccctgcgaaacgcatacttccaaagccctctaggaggctccggaagaccagactgttcctcccacagctcatctcccctcaccaaccgctcaaccttctccttcaactgatcttcaaacaccctggacctctcctcctcccaaaatgggtcctcaatcgagtaagtgtgtttgcttggttcgaccaagttggcgcaaaacctggccaaaaccgtgtcagaggaggagttcggttgaccccagagtcgaaggggtgtgatgatacgatggtatgcttttataatggcgccgccctgctccgccgtcatgtcaacccggtcgtccggcgcgccccagtcgctcacatcggccatcactacgcggagcgtcagcccgcgcaggttgagcttgtccttggcccaatcgacggtaacgagccagtccttctgtgcggacgagtcgtcctgaggccagacttcccagttatacggtgggaagactacttcgagagagcggagcatgtcgaggcaaccctggggaacgacgtcgcggagaaactcgctcactgcgaagcgatcgaacgggtactggcgaggcgacagctcctcgtggtttggcacgtccgatggggaggaggagtcgtagtcgtgcacgacgaagcggttctgtgagaagaaaaccacctgggcgtcgaggtagagggtgcggcagatgagaaacaagtcggttggggccgcccagcaccggcaagaatccgaagcggcggaatgctgaagacggcagaagcaaccaatggtccagcattcgacgaactggcatccgttgtgtacttcaggagggcacgatgcgccgtactcgcacccgacgcggcacaaggaatatttcctggatgttcgaccttgcctactccatgtgacctcgttccacggggtaacgaggtcagtatactcgagtatgcggagacgaagctcttgtggaagcttgagcaagtgactggctaatggcgccgtcgaagaggacaggcacggcttagtgagcgcatcgggtgccgtctgggtgatgccacgagcgtatttgacggcgacatcggcaatctgttgaagctggctgtttgtcttccggcagagtcgaacgtggcagttggccaatggcgataggagctttaggggcgccactgccagttgagctgcctcgacatcgtcttcctgaacgtcacaaacgagctttatttccagagctcgggggttgacatgagccgacatgtaggtagccgcgtccgtccactcggcaagcatatccttcgtagatgagaccgaaagagtggccggggcttgatgcaggccgccatgggcgtgggagcagtaggtctggccatcgtaagggtatacacgtagcaaatggcagcagtatgagtggttgccgtcttcaggttgatggcacgaagcctcattcagaatgaccctgagtgaggttaaagacgccaaggaccgggatgtaagagatctcaaaggcgcaagggagtgagggctggtgtagcggatgatgaacctgttcctcgagtacagcaaagtagatgcttcctgatagatgattttgcaggaaatcaataagccaaagaattctgtttcctggccgttcaacctgaaaaagtgcgggtgatagtctgccaaaccaacccattcatagatctgacggcgtatgtcaggagacagtcgcaaaaacgggggagtgcactccatgctgtgataatattgctgttggctggtatgcgaaagcggtccggtgtaggctcaggtaagggacggtcagaatatgaagaaagggaggtgttgggaggaaagtgtacctagcctagctggcgcaggcggcaaagagttgtcattgattttgggttgccaggggtctacagttgagccactcatggcagtgctaaaggtggggcaaggtaaggtagcgactactgagccagtaagcgacctcaggtgcctcaagtgtgtacctatgtctttcgcccgtattgcggaatccgggcatcgtgttcagggtcggtgtgccgcgacgtcaacaccaacgtcacggcgggatgcgatggatatgtttggtttcatcaacgtctacaaatagacatattgggcttcagcgaccgcatcgtgtgtaacatgcgccctagtaacactgcttgctagattcagccccagacctgctcggccaactcaagcaccgcacaaaggcaggacaatgtctcacatcgtctggctgccgctatcaattcgtaatctaggtgctgtattagatactctcgtgacgggacggcctgatggccacttccatgtctgcggcaatggccttacgccgccgtccaacccgttcgttatgagctagtgtttgaggtgtcgaggtctaaaaacaactaccaaggtctatcatgaagatattcccaactcaagtaccgcgttcagcagtataagaactcaagaggcagactgcatatcacagcttctatcctcatcactactcactcaacacagcatcttctttgtcaatccctctctcatcatcattctcgctagccgagaatcaacgatcttcgtcaacaggttctcattatcattttccgctcccatcgctaaacgagaagccatcacccttactctctaaacactacttttttccatcaataaccccaccccccctttcttcaatatggccaactctatgaccagacacgacagcggcaacaacgccacctggaccaagatcatcgtctccaagacggactaccgcgacatcatgtggaccgacctcctcgagatcgccgaagaccactggaagtgggtccaggcccaacccggcgcctacacccgctgggagtcctgcctcgtcgccgccctcttcctcccctccaccaaaggcggcgtcatcttcttgtctaccatcccccgggggagcaagcacacggagatgatgaacggcgcccgcgccgccccggcctggttccacgccactacggggggcaccaaccgcaacaccaacctgcagctccatgccgaggatggcgccgagttcctcttcgagacatcaccgtacgccaggggcatcgtcagcaggaacctccagtacgtcaccccggatcgcgacaacgcgcacagccgcatgaagctggccgtctggggtcgccataagacctcgcctgcccaaggcgagagcatcgcgctgtgcacggttagcgagaagcagcccaagtgcccggctgtggcgcgggcgctgaatattgcctactgcgaacggtacaaggtacggtttgagcagcagcacagataagcagcttgttatcctcctaccttggcagtggtaatggcttaacgaagcagtggagagaaatgggtggcggtctttggagttgggcggtagcattttgtttttgcttttttgaatttgggatagacgggatgatagtatggttctggatacgagtctggtaatggtgggattataatggctggcaccatacaagttggattagctagattaggtagcttactggatactcttaaatatttggatagatatctgcacatcaggcgcgctcttaggccctcttccaactttcactggacttttgtgcaacaccacgtttctggatttagtgactgagttgagccttcgcttttgatactagaacgtacctctcagttcttattttgcttcaggtacagtacaaggaatccgtacactgtgaacatacttctttatttcttaactttcatattatcaaacatttcgggagattcctaaaggccttagaaacaagtcacacaaatactaatgacagagtgagagacagataaaagaaaagaaaagggaaaaaggtgaagagaaagagaaaaaaagagagaaaaaaagagagaaaaaaagagagaaaaaaagagagaaaaaaaaagagagagagaaaaaaaaggaaaagaacatcaccctcaaacagaaacaatccatcatcaaaactcctcacaaatagacatctgccgaaaggcctatttcaaagtttgaaccacgcttcagagaccttttcatttccggtaaaatctttgtgtctcgctatatgtgcaatgggtgctatcatgacttttgccctactagactcttttccctacccacttgaccacacgaccatgtgctgaaacaatatctcggtgaagtcaaaacaagaagtctatgagatcaaggatattgcgacctgtatttcaggacacccattctcaacctggtctggcgatggagtttgcaaagtgcatatgcgtgtggataggtatataggtaagataccttacggaaagagcttttctagcaggtaaaattatgcgagtatgcaaatagtttgtaaaaatatactatgcttagttcccgcccacagcacaaaaatatccacctcctctcactcccacttaaacaggcggcaccctccccccctcacaaacccccgtatccgtataacaagccgtaaacaacctatcgctcgcctccccaatccaaaccgtatacctcttccccccaacccccggcacaacccagttctgcagctccgtgtcccacacgctcaagtccttcctggtcagctcaaccgtcaccgtctcctcctcccccggagccaaaaccctcgtcttctcaaagtccctcagctgcacaacaggcgtatcatacgggatcccctcaggatactgaacataagcctgcaccgaagcccgtcccgagaacgtatccccagtgttcttgaccgtaactgggacacggaaagcaatatcccaaagcgcaggattacccccctccccgccaccggctgcgggaccgggcttctgggcggtgctgtacccagcgggatagttatacttcttcaccccggcgataccaacagcgtaggcgttatccgcgtcgttcttgttgagccaggagtagaggtaccgccagatcctgttgaacccttccggccagtacgcctctgaggcgggggggatttcggtcgagtacaccggcgttgagcccttgggggcacgggcaggaggaaccagagacagtggagtgacagactcgatggtggcatcaaacgagaagttggtgtagctgagaccgtggccaaaagcaaagcggggcctgatcttctccttgttgagccagcggtagtcaatgtacaggccctcgctgtacgtgtcctggacctgaccaaaggcaaagccacggaggttggcgatgctgtcggggaagtcgttggcgcgcttggtgatggagtagggaaggtgaccgctaggggagacatcgccaaagagaatgttggccaacgactcgcccgcttcttgaccgggaaggtgctgaaacaggacgcccttgacgcgagggttgtcgatccaggattcgagatcgagagggccgacggtttgagctaccacaataacgttgttgtacttctcggcagtcttcctgaccagctcgtcaccgttatgccacgcagccagcttggcactgttgcgatcaccgttgttgccctcaacagtgaacgagttctctccagcatcggaggtgatgaacacgatggcaacgtcatcgggcgacggtgtagggtggaaccaagggaagccgtcggtgttgaagaacttgacgtcgggaacccgcttcctgatagccgagatcgggtcatccaagtaaggataatcggcaacaccagaaccccagcccatgccaagtgttcctttgttgcaggcgcggttcatgcaagcgttgggcccatcggggttgacctgggcagcagtaccgaagacatggagagactgcgaagtcgtcaggggaaggaagctcccattgttcttgagaagggtgatggcatcctgggcgacctctctggcgatcaaataatgatcagcctgaacattgacaaaccagttcacctgacccttgggggagaagagagctgcaggataaagcagaccgtcacggtcacgggtgtttgacgagaagttaggccttgggtggtccctatcctgaccgaacttgtaccatgtcgcgacgattctggtgaccatgtcgttcagtctgtcaagaggcacagacccgttgagaaccgatctgctgagctcatagtgccagttgctgaaaccaaataggggaatgttggtgtcacctggcatgttcatgtcgagacctgccaacgcggagtcgactccggagatgtgggacagccagtcagacatgacgaagccctggaatccaagctcatccttcaaaataccgttgatgagatagctgtgctgagagcaagcagacccgtttacagcattgtaagctgtcattgccgacccaacaccggcatggacggattcggcaaagggccacaggtagagctcgtgcagagtccgatcatctgtggggagtcagccttttagtccgtcaaagagcaagagtccactcaccaatattggcgctatatccaggctggaaggggttgtacattctatacatctcctgctcgttgccgatcagatgcttgatagtagcaatgatgccttgttcctgaacgcccttgatcgtcagggcagcagccttggcttgaagaactgggtcagatccaaagccctcccagttgcggccacccaaaggcttccgcccaagagggcctacggaaggacccagatagacatttgtgcccttgccgcgatgctcttcaccaatagcaacaccacgagcatagatcagcttcttgtcaaacgttgcaccagtggtgatgccagcaggaaacgcagtgacgttgtcagccgacgacacacccaacgcagagtcctgaagacacatgcgcgggaaccccaatctttctgcgcttccagtatttcctacgcatggactagcgtatcatgtgttagtcaaaatcagaaaaacgtctcattagggtggtggcactgaccctattcacatgtcagtcagtctcttgtgcttttatataagccatgtctggttaataactcacccataaagatgccaatgcctgaggtgatgttggtcttttcagccaaggtcatctgcgagaccaaggcttcggccttgctgtaagcctcttcccacgaagcgacccatcctccatgaggcgctggatagtatggggcagcgacgaatccaggcggaacaggatctcgaggcgtcacgacgctggcggcaagagaggtggaggcgaaggcgcccaagactaatgagcggtatgccatgttgagtatctacgccggtgaagccctcgcgacgggatatcgagcacagacggcgcacgtattccaagctccgggttctgggacctgaacctaggaggcttgaaccgaaacgacagatgcaagcttgcggggttggcaaagcagagcaagctggccggcgcgcctcccgacctggtggttattaatgcacttcatgtctcggacgactcctctttgacgttaccttccccaaggtcagtcgtccaagatgggggtattgggcgccacaaacacatggcacccaaggaaacactctgtagcatggtggaggctgaaccaaataacgatggtcaatacaagcgggcataaaccgctttgagattacggtgtaaccgtctttccctcgatcagggaatcgtcgacgcgttggagcgctctcattcgtccgcgtagccatcgcgacccagagatcagcctcataggagcagccagcagcaggcatcacattgatgatcacatccttctcgaggcctgcataatcggttcctgaacatccctctttgctgaaatattgtcttgggcactcattttccaccctcaccggcatcgtaaggtaacgtcaggcagcataaagtatgggggaggtagctgaactggagcaagactgaggcggggaaccttgcccggcccgccgtcctgcgggagtgacgtcgtcaaaaggcccgttaaaggcgggagagtcgcatccccagatcaggtggttgccatctgcaggtccaacaaggcaggtttggggaagagccccggccagaaactccaggtgggtgatcagatcataagcatgtgcttcttgttgatatgctcccgcgtatatgaccatgtccaacggtccgcgtatcgtggggtaccaaggtgagccagagacgattcagattgttcggatgggcgcgatgcaacgtcgaggcggattaatccgtcgagcgagtgaattctcccgaagcagtcggctgtggtaagcgatgcttggccaggtaggtctgtgggtctgagggtccgcatgacttggtctgttttctttggaatgttttggcgtggtttggggtgaagatgtgtgaagatgctcccaagaacacggggcgcagaatggcaggtgttttcttcctgtccttttctctgcaagcgatgtcttcggctgggtcttggctcttgccggaaaccttcccccacacggccccccctagaagatggaactattcctcacaggaactcgtaaaacaagagccaacaactctcgctgcatctccttctcttgtcttttgttttggcagttgtcttttggaaagcacctcgtcgtctgttatcgcctcgccggagtcgccaaccatcccatgtaacgcaagacggacggtctgtgcggcaacaaggcctgggctcagcgagccgtcgccgtttaagcgccctatcggttcctgaatatcttcagtgcgcacggtcgccatgacgctattcagggcatgaaaccacacggggagcatggcacagcccgcatatcgcgtgcaggtggacgcgggtccgcagaaattaatttgttcttcaaccattcttcttgccttccagttccttggcgatttccattcccgcggccagtcctcaatgctaacctgggtcgcagcgtaacacgttcccaatcatggctcatccgtggttcacggcatctcgcctgttttcctccatgatcgccgtcgaatattgcttcatggaacatgtgtatggatattctggagaaaactatcagtactatcgattacaaatcctcttgttctccgcttgccatatcgtgatttggtagggggctcacctggataggaagttccacggttcaaacggccatctccccaccaccgattctagcctgtagccggcgttgccctcccttttcggtgagcacggcggggcagagagacggatattgatcaccaccgttcctgaacttatcgctagtcttactcggctatcttgtgcttatcctaacccccttgcgtgatgcgaacccttgtggggggcaatgagacatcccccccttctcaggatgtattccccctgcccgggagggctggcattgttgttgtatgaatagtatataacagcagggcgcatcgtggtattaccccagatattcgtcccaaccatcccaggcctctgtctctcttttgtattcttggccctatcaaccttcctttagtttccaagcatcatgaaggcctccctgtttaccagcctatccgtggctgcccttgcccttgcggtgccccagaagcggagtgagtcaatcatgcatccacacatacaattcagtgagctatcctgaccaactcctgataggtgttcccaccgctgctgagctggctaggttcaaagtctttgccgagtatcaggctgctgcgttttgcatgaccgagggccagcctgccggcacccaggtcgcctgtcttgagggccagtgcaacaccctgacatcgcgcaatgttaccgtccactcatcttccttcaccggcaccatcttggatactcgaggctttgtctctgttgaccccgtagccaaggagattgtcttgaccttcaggggcaccgtttccatcagaaactgggtggcagagtacgtcttatccacttgtctctgtgtaccaacatcagatcatctaacacccaagcagcttcatctttgtccaagtcccttgcgactacgcctttggctgcctcgtccacaccggcttcctcgcctcctgggccgaagtcaagagccgtgccatggccgcggtcaccgccgccagacaggcccacccgaccttcaaggtcaccgtcaccggttactccctcggcgccgccgtcggcaccatcgccgctgccgacatccgcaggagcctcaagatccccgttgatctcatcacctttggctctccccgcgtgggaaacaatgcgtttgccaagttcgtcactgctggggctggtagcgagtaccgcctcacccacgccaacgacccgattgcccgtctcccgcccatcatcttcaactacagacacaccagccctgagtactggtttgatgagggagccgatggtgttgtgactctcgatgaggtccaggtctgcgaggggcatgccaacatccagtgcaatggtgggacgggagacttcaacatggatgtgcatggctggtatttccagaggttcaccggctgtgcgcccacggaacagcctttcaaggcccgtagcacgcccatcagtgatgcggagcttgcgaagattgtgaacgagtgggtgaaggaggacaaggtgttggccaagaacttggagctgagtggtgaggcgtaaatatctggtggcgagggagtgcgtgtatgataccctatgatcttggatatgaatcatgataatattggaagatttgcagtctcggggaactgaaccgggtccttgggtctgggtgccatgtttcatgctgtgtgacgatggatggtttaatgtggggtgatcaaatatgtggtggtccgtctcgggatatctatgccagccatatatcttgaaactctgaatcatcctccatcgcctcgccgtccattatactgtaaacgtaagctgctccaaccatatgatgcacaacatctcctcccttctgcgtcacaggcctgataacaaacggcacatgcgcaccggggaatatcacaacttggtcaccgacctggacgtcctgcagcgtggtccccggccttcccgtgctgtcaacaaacgaacgctgtctttggaccttgcaagcaccgagatacatgaataggtcattgggtagctctgtttgctcctcgtcatctacatcggaccaagactgtttcttgcctgtcaatatcaaggtttcaaacccggcgagaaatacttctccccaaaggccatcgtccgctcgggccgtcccgtccacgtcagagtcgagaacgggaacccgccagacgttctcgagagtcgaggttaggaattccgagttacctgcgagagaagctcggtacgtctcgagcatatcgatgagttcaaacagccattttgtcacaactgcgtaccactctgccgaatacttctggacggtcatgtcgaccaaggtcttcccaacgttggcaactcggccaactatccgcccgggaagagaaatgcgcggctccccatacgcagcctgaccgatttcggatcttgctgaccattcctcccaactcgtccccttggtggcgtgatataggttgtttataggatgccgatcctcgactttgactgcaagggcggtgaggaactcagatgtctggtcaatgacccatgatgggatcgcagcagggtgatgcttgacgctgaacagtctttggtagctgcttaaaatgtttgggccgtacttcatcagcaagaccttgctcacgtcgaaagacgctctttccatggtgttggtgcttgagtaatcaaccgggattttgcagcgatcctcgggttgcaccatccccaggatgccgtatatcatgtccctctcgtcggtagcggcaaccgtgttggactggaaggtcacctccagagcctcgaaaagggaaagtccggcctctcctacgcctcgttcctgggcattgatcaggctggcctcgtatttcgtactcgccgcctcgagatggccaaagatcccgatgatgatgttcacggcattggccaggttagaatatttgtcgtccccgatgcgcagtactcggtgcgacaccgccagcaagacagaccagatgtctttgacgtcttcccagagcacgaattcattcccacagagaaccatcgccgccttggcgagcacaacctcctgaacgacccacacgcgatgccaccacggccggtcgaagaataatttccacagagcttcaaagtcgagtcgaccatcttcatcaccaccactgtcggcgagctcgaccacctcctctcccaagcgggccattcgctcctcgaactggaggtcctcccggtcagtgatggtctcaatattgatgtacccttcatcggtcgagtcccggtacatagccgccagtgtcctgattgtctggaacgcgcccccgtccggctcgggcccgagccagatcagcacattctttgcaagagagtacaccgagctcatgagccgaacctgcacggccttttcgtcgttgtcggactggttgatgcagatggcgtcgatccatatccgcgccctcacctgggaggcgtgaagctgggtgagggccgtgaagaggtttttggtgacttggaaaacatgaccgtcgaggatgatgggccgggtgtcatttgcgtcgccccaaacgtaggagagagcattgtagaccggtgcaggttcggcatcgaggaacgcgtggctcaagctgaggtttatggagggtgagtcgcctagattctcatggctaaggggtgggttgacaaagttgaaagtgagaaggcgaatctcgtgtcggtcgtggtcaaggggcgtataggaaaacatgttcattgacaagttagcgaattgttctgaagggtatttctcatgattcgcatgacattacacaaggcttctttttggcttcaagaggggtttcatgacgtatacctgttgtttaggctattgtactacttggcattcatcagccatcccatagctaaaccggtgcttgaatgcttgtcttggggatagttctcacccaccaattacaaccgttcaaaatcaccaacaacacccctttctgtagttgtcagcaccaaaaaagcatcgcagtacttccaattggatggcagcagatagaaaaggtgaaaaaagagccaaaaacatacaacaccagggattccccagtggtcacccacctgagtactggtctggcccttggcagcttatctaggggagagcggacgggatcccgagttttctgccaggtatggtcgtatgtggtagttatagctaaaacttgctattatgaatgggagcatgtccatcaaactactttccccttctccccactcccttcttgccttcctagccagttccccagagccgattcttaacatgggcagccaacgtcgagaaatacctacgcaataatcagctccctctctttaaacttacaatccacaaactttgttaattcgcccatgccaacccggacgtatagatccccaaactcagcagaattttgcttaaccaacagcacattcagagactgcctctgctcatcctcttcgtccacattccgggacacaacaaccgccataaaagggccagcaaccctatccccacgatcaaacaccccccaaccaaggacctcctcaacatcaccacccaacagagcatagcacgcagaatgctcctcaaaatcgatcacataagcatggatatcacaacccacattccccaacctctcaccagaagatctcaccacctccacagtcaggcccctcaataacaacctcgcctctctaaccatttgatcatcaggcatcactccagacggcacacccccttcaatttccacacaacactccaccctgccctccggaacaaacggctcccacgccaccggtccttccaacgaagcccaagaccaactaggtgctcgccgcgtccacttggtcgtctccctcaacttcacttcctccatcgcccgattcccatccgcacgccacatcatattcaccgcaagcatgtcactccccggacccccagcagccacccctgcgcaaaacgaaatactattcctcatatccctagccttgacattggcaatcataccttcaacagcaaataacttatcctcgccaaaggtgagctcacacgcggtgtagttctgaacaatggcgcaccacgcccaggcgggaccgtgggaaacggaggcgctgctgccgaggcgtttgtcttgatgctgcggtcaccagtcagttacatgcatcaagggaaagggggacggttgttgatctcactgctgccaagacaagaccatcctcagcaacactatgccggatacactcaaagaacagctgtccaacagaaaacaggacaattctccggctcagatttcgttcctggaggacccagcccctgctgttccatacgctcgcagtgacgactttgtcaaaggatggggtatgtggtcctacgaagaatgttcggggctttgtacgtcccggtggtaggtaagagagctcaataacgggctgacatggcggatatgtttattcccgtggtggtgtgttcagccaagttcgacttgagggtgcgaagttgtgtggctgctggaccccagcagtagctcaacgccgcgtatcgtcccagtgcattctgacgatccgtcagtttgacaaagggggtgttgttagtcccgacgtccaacagcctggtgggaaagcgggttgtggatgatgtgtctgcatccgctaagggcacagagttgcactctgtatggcttctcagacaggtttcgagccatgtctggatttggcggaaagctccaggggagtttggtgctggatgaagagcgtggccggcaatatccccagatagagctgcatcacttgatggatctgcccaagcgtgcaaaaaagctcgggcgttggaattagttacgagaactgttattacacagagctcacgtcttgtgtgttctaccctgtggtatttgtctgaagacagaagtacctggtgtaccctccctttcttcagcttgatggtggggcacgaggttttgattagctcgtcaagtattaacttgcaaagcggacagaaacttgaagactgccccaggtcttgataggttcggtggcggtagccgagctgttgaccggtggctgttgtgcgtatggatgagactgtaaatggtgatacaccacgacaggaatcgcagaggcccgaggtgctttccgtgttcagagagctcatgtttgcctggtaatcttgacacgactcaacagtaaggtcaggtatcaaaggtggtgatactggtttaggctggaagcaaaggaatagacgcaagtccaacaaccagaccaatggtgccttttctcgccgctttttgctccaatcaagtgacggttccctgtactctttacttggtcgctatctacagacagctgcgccgctcacaaaaaacttacccacgccgcataaaagaatcagcaaaatatctccacggaacgttaccactattgtcgatgttggtgtttggatgcagcaacgttggttatggtggggctcggcaagtttcccttccacatgacggcacggcacgatgatttccagccagggtttcgggacccggcagctggacacgatggcccgtgccaagaacattccaacgagaatcgagaagatcatcaaaaatagatccatcttcacccgggaggccaaaacaatcgaagatctttcaagtttcacttcagctgaagatcatgaagatcgacctgaaaccacctggaatgtgatgagttggaggctttggaatcgcagatgcaaccacaacagttcggcataaacaaactgaacgaatcgacggaaatcagaacagccacctccacatctcctccgcaaacctcctttccaccaccacgaaccacgacaagggttgtcttccgaagggcacaaacgggcacacgggtaggagcagatggcgcaaaacaacgccttcttgcatccccattcccgtatctttctttttgccgacggacccctcaacgtcaatattaccggcccaattcctcagaaatggatgcctcggacttcggcactggaggcaagtttgagaggtcgataaaaaatcccaaaaatggaaatgcaaaaataccgctctgaccaacatcaaaagattcaggtccccactgtcccatcaacgtggctcggatcaaaccccaagcgttctaggctcttggttggcgttcaatagtgacagcttggacaggaggccatcatgccagtcacttgtctgcagcccaatcatctcggggcgaaatcgaatgcccatccccatacacaacaactcccatctgatgctggctcttggggcttcccaatgtgggaggtaaggtgtttgctggtcactgcagcgagtgcagtgtgagcgttattccgggcatccagtgcggctggaagcactgatggtgtggattggcggtgatggagtgattcgagatgagcccagccaatcacatcggctcctttcggcaagcagcccctcttggcagctcttggaccctgggattcagacgaacaagcacccctgtccccaataatacgaacgtgggaagcgaacagggggggccggataggataaggcagaggtcgaggcttgggtgagatgcgggatccgcattcgccagggggtcacaaggttcatgcaggcctcactcccaatctcctctctcagctcgtcgacggaagagaaaagaaaaaccgatatgaagaacgccgctgccgctcacatcggcctgtgggtcgactcctgttcttcttcttctctttcttctcgaacaccccgtttgtgcgacagaagagacgttcagtctttcttcttctcgggcattgtcgtctgctgttgtccgatcttacatacgttcgctttccgccatatcattcactcgctcactcgctcgaatccgagacgagatctcacacatcgtacaaccctcgctatatagactcgacatttccgtcataatacctaatgttttagacaagatcgcaaccagagaaccgagacacaatgagaaccagaaccagcaagggctctatccttgccggcctgctcctggcagcgggagcgggaaccggcagggcggatccgacatggcccgcacctaccgatcagatggaggagattgttttccagcttcagggcatggacgggagtttgttcagtgataacatcacgccttgtgataatgaggccgctgggccggggagggtgacagctagcgagtggctgcgcgttgcttttcagtatgtgacttttttctttgcgaggacggtctttgaaaagggcaagagaagggtttattgagattgaagatggagggggtggtttttggagaactggaaatgggatgagcatccaacttgagaacaaatgctgatgcagacgacagtgacatggctacccacaacaggttttttgaccggggcggtcttgacggctcgttgcaattcgagcttagaagctctgaaaacacgggcccaggacacaacaccacactccagttctacgcgacatatttgtccagccggtcaagtctcgcagatctgatcgcggccggagcgtatgccgccgttcgcgcctgcggaggaccagtcattccactgagattgggacgcaaggatgcgctgacggccggctcctctggtgttccccaaccagagaactcagttggcagtttcgtatcgcagttcgaccgcatgggcttctcccaggctgagatgattcaagtcgtggcctgcggtcatacgctcggaggagttcacaggaccgagttccccaacatcattcccgccggcgtgtccaatattccctttgatacgtccaaggccacctttgacaacaggattgccaccgagtatgtgtctggtaacaccaccaaccccctcgtagttggtccagcaattgctatcaaccgccattccgatttcaaggtcttcaacagtgacggaaacgccactatcaacaccatgacatcgcccagtgctttccagagcatctgccagactgttttgcagaagatgatcgatgtggtaccgtccactgtgactttgactccacctatcgctccgtacaccgtcaagccgcaggatatgcagctcactcttcagtccggtggcgccagcttcctccttaccggaaagatccgtgtccggactaccgagattcccggtagcaccatcaccaacttggttttgacttggaaagacaggaacggtggtaacagctgtggctctttgtcatcctgctccacgaccgctactcttcagggtattgccaacggtttcgatgacacctttgccttcttcccgattgaggctaccatccctacatcgaccggcatctcctctttcacaatcaccatcaaccgcaacgatggctcgagccagacattcgacaacaatggaaacacctaccccttgtcggacgccgttgtcttgcaaaagacccagagctgcctgttgcagacatcaggccaactcactgttgcggccgttgttcgcaacgatgtcgtcggtgttccagtgaacctcgatatcgagtatcagacgccccgtaccggtaacagcggcaacccagtccctgccatcaacacagctactgttcaaatgactgaaggtgactgtgtcggtccctacactttctactcggccagctacaccatccccggcggccgcagctacaacgccagaatcagcatcactgctggcgagcacaccgatgacttcaacaaggccagcatctttggcggtacatgtggcagctttacaggcacccttgcctgcggcaacattactgagcccgttagcactacgagctcctcggccaccgcctccagcacctcgacctcggtctcgagcagcgtggtcacaaccacgactaccggcagcaccggtgttcccacccctagcatcagacccagcgttggtggctacagctttgttgactgctggaccgaaggtgctggtggcatccgcgctcttggcggtgcgtcttttgcctacgatgagatgactcttgaatcctgcgccgccaactgcactggtttcgatctctggggtactgagtatggccgtgagtgctactgcggaaacagccttcactccagcagctccgaggctcctgaagccgagtgcaacatgccctgcggtggtgatccgagtgccttctgcggtgctggcaacagaatccagctctattctaccacggccacacgcagcacgtctgctactcccacgccaactgctaccttgagcaccaagcctactgttggtgcttatgtgcgtgttggatgccagactgaggcctctgccggtcgcgccttgtcggggaacagctatgcttctgatgacatgactcttgagtcttgtgctgctttctgcagcggcttcacgtatttcggcactcagtactctcgtgaatgtcagttctccagacgagattaatttatagggatatcactgacataacaacaggcttctgcggaaacaccatcaatggtaacagcgcttctgctcccgatgcggattgcagcatgacctgcgccggcgaccccttctcctactgcggtgctggcaacagattggagctctacatcctggagactgcgtccacctcaaccaccggtgcccctcctgtcgaaggttagacagatcgcctttttccgaatcttggaccgacaatttcctaacatcttatctagttacgaccacggctactgccactgccacgtctaccacttctgctgcccccacaggaacactttcccgcgtgcctaccgtttctccctatagttacgccggctgctacaccgagggcactggctcccgcgccctcaccggaaagagcacttatgactccgagatgaccctcgagttctgtgccagctattgctctggttacaagtacatggccacccagtacagcgccgagtgcttctgtgggaacacgcttcactcaactgccactgaagccgcccagggcgactgctccatgacctgcgccggcaacgagttccagtattgcggaggacccaacagactcgagctgtacgtccaggaggacatcgaggccccagctgccccttcccagccagaggccgttggcaactggaccttctaccagtgcagaacagagggaagcccaggacgtgccttggctgccgagacatacgccgctgacaccatgactctcgagtcttgcgccgacttttgcgctggctacacttactttggtaccgagtacgctagggagtgcttctgcggtaactcttttggtgttggctcgatcgaggcgcctgcggcagagtgcttcatgacttgcgcgggtaacggatcgcagttctgcggtgctggtaatcgtctgagtatttaccaagctgcttagagcaagtgatcagggtgtttgttgggttgacggttttttttttttttttggtttttttggggggtttcatcgtgtatatatttgttttagtcttgcccgtacattaggatatcttgtgatctaggtgtatacttcctggtacttttgaatacctcaaacatgcaagtttgtaaacagacagatcaccaacctctccaacattgactgatccagacattggcagacgtatatgtttttgctcacttgacactcaacaaccaacctatccaatcttccggtttttgttcggttgacccaaaccacccaaagcaaggatcgccatgaaacctttgtgacatgccgcatcacatcacatctctcagcctcaccttcaatttgttgcagaccgtcttttcgaatactcgatcatcaaaccagtctcagcaactccaacaagttgctggcttactacttttactaaacctcccaagacccccttggcaaccacacaaatccaaccccaaaacctgcttccaacatgcaagccaagcgtcccctttacctacctagcgacaaaacactctagggattttcccgggaaaacctaaattcccactcctcttcgtgttcgtcgggtgtcagttgtcatcaatcagtcagttgttttgccccaaagttccagacccagacccagacccagaacccctcacgagttagtagaccggagccccctccgcaccaacaactgctccgcccagactttttttcccccacagggcattgattgcttggcagagacatgactctggggaagatggggtaaggggccaaagagggaaagggctcatgtgatgacggatatgaacagcttgttggttgacagtgacggttggatggtagactactgtggttgatatcaccaagcgaagaaacagagaataaagagttggattggtgaaccaccaggaattcgatcgtcacataggtaaaatgcaggtttgaacaaagcacccaagaacgacttctcctgcctgccccatgtcaaaggagggggctgcactagggagcccagagaaccaaaaagctggaggagaaaaaagctggaggacaggcggaggtatccgtacccaaagctccaccaaactttgcatgacaatgcaaagtgtgctagctttgggcttggttccccccccccctttccgtgtccttttccccagctttttctctttggtttggttttgggcagctagctaggtgaatccatgaatcgttaattagatcgccagcaggcagagcgagttcggttctcggtcttgtcaattcatcagcctcagtctgtgtgtgttcgtccggtattacactacctaccgaagtggtgaaagtaccttttagtaaagttcggtacgtacctacccaaagggacagaacagacagacaaaaccggccggcagatgcagaatgtctgaaaagggaataaatgactgataagcatctgattttcttgcttttgcatacatacagcagcatatcgatcgtttcggtttacacgcctacagacgccgcacacccttcgtctgtgtcaattgcagtgacatccaaattgatgagatctaaatccccatctcattgttcacctcgtggtttcgcggtttttgttgcaacaacaggtgtgttgttgtgtgtgttgttaccaaaaactctctcgccactgcgccatggcctagcctcctccacatcgatggggtctgcccagcaaagctgaagctggagaaaatggatccccccccccttccatggatcaaaacacaagagatatctagagaaggtttgacgtgtctttctttctcgcgtcctccggggccgtgatccaccacttctcctccgccgccgttggccaataattttcccaatggttttacttgaaacttccttgtcacggacacgtccacacctctttttcttcatcgtcaatgagaagatcctgtgcttggaaagtcaagctaagaaaacttgactagcttcaacaccactgaacacaccccccctcaccccccctcttccgcatctctcccacccaactcccgaccccgaccccgaccgccgggaaactacggaggtgggttggggtgaaaaatggagccctcttggcccccggggattaagtggattgaggcaagcggtgcggacattgcggaggaggaggcggagggaatggcgggcaattcagtggagaaagcaaagttgacaagcggggagaaaggctcagcctcttcatcaggagaggtccacgcaacactcatcatcaagatcgcacacaaaattgacccaaaccaaaacaaacttgtcgaaaaaacaaggggcaacaagcccacctccatccgcaaaacctgtccaggttttggatccaaggtaaggtactgctccccgagagaatgaatacccatccgatcgccgatcttatcaaatcataaatcctgccgaagaaatacatgtacctactacagtcacgactaataagaaccaaccaacccaaaagagagagagagagagtcctgcacatcttttttttttctagaaagaaaaaaaatcatcagcatacctgctgcagtaaataaaatccctagtttcaattttcgggtcggggttacgctcggtagacgacggaaacaaggcaagttaaaactgaaataccaaccaaaaatacggcaaggcaaggtagtagccatggcgtgaaatagcctcttggctctgtttccaggcggcgtttctgaaatcccaaaaagggtgcgtgtagagagcgaacatggtgaggggaacaaggtgaggatgcaccttgataaatccgtctcccgccttcgcttcgacgtctctctctcgtcatcaggcgctagtactgaacagtgttagaggttgatcaatttcacgtgtttttcttagtgtgaacttgctttttgctcttggaaagaaaagacaacggtcgttggttgctacattgggggtagtagtgcatggagatacttctgacttgtataaaggtttgacatgtctagttttctctatgaccacttgatatgttcagcaaagcagctgatcagcatctcatcagagaaccacatcaccagcctctgtaacagcagcaagaagcaaaccaattctgatttgtggggatgaaaagcagggactctcgaaacggcaaaagctccaccgattgtgtggcccaaacatcgatccgtaactttcttgttcctgactcgaagccgagaccagatgacagatgacacagaacttacaaaaaggtacccaaggggcacgatccgaaaagtaaaaaaataaaaataaaaagaatacaatggttgcaatggacggatggtgaccactgtgtgttgtgcattatctcctttgccctttgcgtgctcacagcacaggagataagggcctgctttcgctccatcaccaccttcaagtccagttgccgagagcacattttcgatattaaaacttcccgtctttcgagaaaaaagagcgaaccttggccgacatattccctttcttctcctgttataaatctttacctgatatgtgtaacccatccagctttccttttcaacaacaagacacacaccgaacattgtataacgaaacccccctgcggaaaaatatcgggccaagaaacatatcacgacacacaccaccggggtggtcgttgctcggctcggaccagcggagcctgtcgtgtgattggccagtctagcccgctcgcgtctttcgcctctttggccgtggacgagaggaagttttctactttttgagaaaagagagacctgagaaagagagagagagtcctaccgctttaatttgagctacgacgaccaagtactacttacataacgatacgaggcaaagttgtgtcaaaatgtgtcacattctcgagcggaaatcgcaacttcttggccttcccgctccgtgtgacagaatctctgacatgtgccgtgctccatccccaacgagaagagaaggtgttgtccgctgttgaagatgggacaaaaacccctgggaggaggatggggtggaaaaaaacaaaaaaaaatcagagattagcacgtgcgcaatcgcggggctgagcggagcagaacggatcagctcggggcggagacacacgaacgaagcagcaatcttgggtttcttgttgttgcttctctttcgcgattgcaccgatctccagcagcagcaagcagcggcatggggcaagcgtttttttgattttccctttttttttttggctccaccggtttaattcttattggatgctccacaaccccaacggacggacgagagagagaaaaaggcggggccgtaaatgacagcatctggagagagagagagagagagagaagaattgaggggttggccaatggaagctggccgattttgaaccacacgcacacaccacacatggttttggcgagggatcaggggtcggatcaatggctcgaattgagaagctgatgatacggacggacggtgcatgttcgatgcggtgtggtggtggtaaagctggcaggtgactgagcataaacttcacgcaagaggagaggagaaggggggtccattctgaaataatcatctgctggggttgagagcagcatgtggtttcgtgacgacgactttttgggagtgttttgtgtgtactggctcgattcgacattttccctcgtgatcgcatgtgagtggcccccccttgaacaactatgtaaaccccttcccgatgtggggacgccttcttcgatttttcagattgatcggtttctgtaaggtacatgtacatgtcaagcaacctgaatttcaggtggttgccgcctggatgtatgtatatccaccaaaaagagacgcggtctcttaagggaaacgagaggctcaatggctaatctgaagacttcatccacgacatacatataaaaaaaacctgcggcatttgcgagcacacgagcaaaatggcagtccaggacgggaggactgcagtcaatctatcaaactgactttgggcattccgtcgtcaccgctgccagactttcgcaatgtttggttgcaacctcgaaggtacatcgcattggcttgcgagttcaaagcaggcgatccgcccgccccggtacgtacccacatggccatggccagccagggccaacctctccacaccttgtccgcttcttccttgtcgagcccccccagattactccatccaaccagggatgaaggagagttccagcaaaaggtacgtatcgtcgccaatgtgtacttgtgacttcctggagccatgaggaccatgatggctggcaagatataatctagtggtagccccgttccctcctgtttccccccaccttgcttctctcttcgtgactcggaatcttagaccgacggggaagtctagacgcagtaccaacgacgacgacctcaacttgtaaagcataccttgacattgcttataccattgttctctccattgaagtgcttcactgtcgtcatcaccaccaccccatccagggttaagctcttttcatcttagcgactcgggtccatcttagagctccaacgacaaccacttgccacttaacaagcttccgcttcgaactggacgctaccttactcatcgccattgtttgcaagctcagggggtccttctaaccttcgaacactgctcctcaccaccataccacaccaccggaaaacacacacacacacacacccatcacatcacaatgcccggatcagagtcaccagctcggcaaatatcacccgaagccgaaaacatgcagccgaggtcgcctccgtcaggctcgggctcggagcccgagagcggtagccagcaagccggcaccgccgacagaccaaaaaccaccaaacgccgtgccgcgagagcctgcgaatcatgccggagacgcaaggttcgctgtgatgttgtcactcagagcccttgcaccaactgtctgtacgagaaggtggagtgcctggttccagagtgcaggaggaaaaggtaccttcaaaacaagaaatcacacttttcctgtccttctcccgtcgtcttgatcgtcatcagtggctgacgtatctcttcttcactttcttctctcttacagaaagcatcactcaagagtctcagaatctctcggctcgagtgtcgggtcgagtaccgaggcttcgctcctgcgggccaagtgcctcggctcagccgcgccaatgggctacgctcagaacggccaaaatctcgacttcacttacactggcaaccctcttttgaggcagcagctgttttcccaggccgggagtgacgcgatacgaaaccagcagtgtaagttttatgcaaggtctgataggtgcaagaataacgactctaattcgcccttggcttggcagatctgaatctctcctatcagaacggtgcagccggctttggctcaaatgctcctctcaggccgagggtgtctccctcgctgctgtaccaaaacaccggcttcccaccgcttcagcctgccatcgaagtcagccagcaactcaaatcggtcctcgaggctcaggcaccaccaatagcaccggcggagccgcagctgccggctttcatcaaaccgattcccaaggctgtctcccccgaggatctcgactacctcaatgccaagaaggctctcacgctcccgcatcctcagctacgagatgccctgctcaaggcatacgtcgaatatgtgcacccgtacatgcccgtgatggacgtccatcctttcctcaatgcgatcaacgaccagacgggccaatccggcaagatcagcttgctgttatttcaggccgtcatgtttgtggcgactgcttttgtcgatgaggacttgttgaaggccgagggttatcaggaccggagggaggcgcggaaggccttcttcagcaaggcgagggtgagttttttttttttttttacgtctttctgttggcttgggaggggaacgttgggtaagcgggggatgctaaccatctgctcccaggttctgtatgactgcgatactgaactcgaccgcctgcacctggtccaggctcttctcatgatgacttactggtacgaatcaccagacgaccaaaaagacacctggcactggatgggcgtggccatctcactggcccaaaccatcggtgtgcatcgcaacccggtggcgacgaatttcccgccagcaaagaggggattgtggaagcggatctggtggtcatgctacatgcgggatcgcatgatcgccctcgggatgcgcaggccgaccaggatcaaggacgacgactttgacgtgccaatgctggaggagggcgactttgaaatcggcagactccgggaggacaaccaactgctgggccctgactgcgctctggtccgcgacgtcgagatgcagagggagctggcgttcatgtgcatcgagatggcgaagctgtgtcttcttgtcagcgagatgctcagggcgcaatactcgatcctcagccgaggcggcatgcggccggacgtcacgacagcgagcacgatgatgctcctgcccaagaaggaccagaacccggacggctttgccatgactcagcaggtcgacgccatgctcaaccagtgggctgtcggcctgccgtcctgctgtcagcgccagccggtgcccctgacccccatcgaagaagggcgcaggcctgttgtcctgcagcgccacctcttgcatctcatctactacaccaccgtctcggccctccacaggccgcagttcctccgccctcagagagccgagcccgtcatcccgacaaaagcccagcagtactcccaagaacgggtgcgtgacgcatcaagggaggtgatcaaaatggtcaccgaactccgccagcacggtctagagcggtgcctccccaccaccggcgtcaccgtcctcctccccgcaatgatcatccaactcctcgactcgaccgccctcgacgcagacgaccagaccagagcccaagccgcccagggcttcaaggagctcctcgccgtcatgagaaacctaaaggaaatctacgccgcggcatcctacgccgtcaactttatgacctgtgttctccagggacgggcctcgcagcagcaggtgcagagaccgcagcaggcgtttcagagcgtgtccactgctactcctggtggtgggatgaacatgatgccttcttccatgccggagcggccgtcgacgccgccgccggatgactcgcagtttatcagctcggctatgcagggggtcaataacctttacaatcacccccagcatcagacgcccgggtttgcggggagtgggatggcggctggtggtggtggggagatggaggatactatcatgatgatgggtgggcagacgccccccgggacggattatgactctgggtcgcctggggcggagcatgggggtagtggtcttgatggtggcggggaggagacgttgaagcaccactttgggggggctcagcagagcgcgactaacggggcggggaatgaggtggtgtatagtgagtggttggaggagtatccgggtgatattggggggccggatggggagtttttggggatggggatggatatgggtggttcggggttgggtgtcgtgggggaggaggccaatgcgaggtatgagtggaactctatgagcatgggtggttgaagaaaaatatgtgatgggggaggcgacagaaggagagagagagaagaaaagcattacgatataccctcggggggtgttgaaatcgcaaggaaaggaaaaagaacggaagggaatggcatggaaaggacatgggcaagggcgttttttgggatgtgggttgaaataggcatttgggattgattgggttatataggaaattctttggaaagcgatttgacgggttacatcttgaagatagaggaggaggaagtttggaaagaagtagaatcggatgagaatgacgacgactaagactggaccaattggttcggagagttgagaaaatattattaattttgatgatgaccctttggttgcccgccctgtgtgatgattgtgaatggcttcgagacatgtgagaggactccggagacagactgagacagtccaccacacaactccggcgaagagtggatgttgatgattcaaaactcaacatcgttcccttgtgaagagaggtttggtggagattttcccacgtcattttttgtgagtgtgcgcttcggcctcgtgtcgttggaaagcgaatgagtgtggatcagtcagtggattgtgcatcccctgccgtgggcgttgctgggaagatgaatgacgggaattagtgcggttcgggagtgttgctatctacttcagggcgagaggatgctggcgacgtgttaagggtgtctcatcaccaaccttgtcggtctcatgtccgtttgggcctagcccggacgccccggctgctacccgaaatcacatccccagaagaaggcgactttggggaggtccaagatggagatctgggtgggttgtgttaccaaccgccaattaaatgaggccggggttcctcgaaatacactgaaactgccctgctctgttactttccactttgtcgtctctttctctcccttcctttcggtgtgtgcgctcaccggtctaatcatcagtcgctctttttacctgaactgtgttcgttgttctactgtcgctccctttgtctacccgtatcgcttttgcccaacatcgcattactctacctgaataacccaattgccaattgggtctcaagttctgcgacctcagccctgacgtgttgcggtttcatcgaatctaccctctttattggaggacgcgctgcctggctctgctcttgacaccacccactcggattaggctttgggcggaatcgcatacggcgtctcgccttcttttttgacaagtcgccctaacccaaggttttgcgcctggcggacaacgcactgagcgggctttctacaatctgcacgtgcccgccaccaagatttcctgtttgttctgggccttctagttggatcggggccttcttttgcttgttcttccttgttcgtgtcgccctttcagcgaatcatttgactgcctgtgggcacctgcaacggaacgcaaggcgcagcacgaagagcgaatcacagcggtcaagctttcccaagcttccggagcttcagcagccgccaaaaacgccctacctcttcctccaccctttgtaaactatgggacgctccgagcagaggaaatcatacaacgtctcgccaggctcataggagggccattatgtcgcgcggcgacctgccccgagatcaccactgaacgaacatacgagaagaaaacgaagaagaagaagaagaagctcgaccgacaccacgacagaccgacgacaactacaccgacgacgacgaagaagaacaacaccaaacagcagcagcagcagcagcagcagcagcagcagccatggatgacccaccgcccatgacggctgctcaccaccactacgcagcaccgcggggacgccagctcggcacaattccagaacaccacgcgacgaccgccggcggaccacggacaaccgacgatttgcttctgaacctgacaccacgagctgccgtcgaagctttccagaacccctcgggttccctcaaaacatccatcgatgccgcgacacccttcgaacaggcctttgccatgcgggccgccattgcctcgagcaacattgcggattggctcgaagacctttccagctggccatggcccaagggaggaggttctgccggatttgagatgccaatggcaaagaggaggagagtttccaatggaattgaccgggcggacgaagacgaccagatgtacattggcagcctcgaggtctctcaggtggtccggtacgagaagcgcattgacgagatcaaccagggtctggagaagctcgacattgaggagatcaagacgcaggtgctacacaaccacatcatgccgctctctagaccggggaccccgttgttggactcgggccgttccgtctcatctgccctctccaccttggcaaggatggacgatctcacggcgctgctcacggccaccctcatgcaagcgctgccgaatatctccaagctcaccaggttgctgaacatctggacatttcgcctgcttgttttgcgcaggattcccgtctttttgaagtcgcttgctgatgccgaagtggcgcttcagtctgggtggcacgcgattggtgtcaagtctacgaaggcggatgctgctgatactgccagctcgaacggacccccctcgggccctaatggagtcacggttctttcccagaaggagcacgaagtgatgaagacggtgctcgagcgcaaggtcgccagaaccggccgggacttggatgccatgctggacctgcttgaagggcagctggacacacttcctgaggaatggattgaccgggtggactcgttggagcatgagtatggcgagtggactgttgcatgcgagcagaagattagagaagctgagctggcagagcttgcgcggacgacacctgagccaaagactcggcgggtcgcttctggagacaagagtcccattcctcccccaacgccagagagcaaggcggccacagacattgctgagccggtggttgttgagggggaagggaacagcatctctgaagagttcaacacttctgcctcatcacggcgagagtatttccctttgttcggtatgccagaagaaccaacaaaatcagagccgcgctcacaagacggcatcaacaacgcgccacaggacctcagcaagcgactgggcctgcccatcaaatttgaccgacctgattggccagccatcaaggtccacgaaccagccgaggaatacgacaccaaccccatccgttcaagtctcgacgggacccggaaatggtctcggtttgacggaaatggtcacctggtatcttttgatggtctcgaggaagagaagaagaaggattccactggcttggctggttcctcttctgaggaggaccgtgtttcggacgcgctcgacggtacgagcggactagacacgacagggaccccgtcgtaccgctccgaggacgagtacgaactgacggatggctcggatgactttgtgccgcagccggatctgccggtattgccccgttccaggagagcaagcgattccggaacggtggtccatgaggccagcttggctaggttcatggatttctcgagcgacagcctcgaccaaggcacccctgagcgccctcggcggcgcgacgttgatcttgccagaagccccgccgagagttaccgatcaccgagctctccaccagctcttaaccgcgtggctaatagatccatgtcggttagcttcaacgaggagcccatgatccgacatctgcccagcatctcgagctcccccaagacgccaaactataaccagtcctcgttgtattatgatgagattccaacacagcccaatacccccgacaaggccaacggcccagatgagaagcttcagcagcagattagcgacattcttcaatcggtcccagctaagatccggttgacctcagtactgccgccgatcaacctcaacccacccgacttcaagatgcctacggcacgcaagaagatgtccaatcctaacctcaaacgcagtgtttccaacatgtccctgagatccaacggctcgcgagctggcaccccttctttcactcttgcacccgctcttggccgcactccacggcaacggcccaagcccggcaacccggaaatcaaactctaccacctgtcccgttctaacggcgaagcacccatcaagctcttcataagatgtgtcggcgagcgcggagagcgcgtcatggtccgagtaggcggtggctgggcagatttgggcgaatacctcaaagaatatgccagccatcacggccgacgatccgccgtggccgaggcaagcaaggtggaagtgaaggacgttcccagatctgctaccgccatggccatgcacgccgacggcaccctcgggtcgacacctcccagcagaccagcatcttcccacagaccgatgtcctcccacgcgaccaggaatgacgactcactgggtcaactcaaggtgcgcaaggtgagaagatccagcgcagctgtcgggagtgagacgccactggcaacggtgacggggccaggcaatcgcagcaacacgccttcgactggtggatcgaggtcgagttctaggttgagctggcctcaggctggggagaaggataaggaggaggaggttgtgcttgggatggcggggccgagggcgaagcagattgagatgagcgaggagagcaagcagtgggttgagagcgtgaagcagaaggttaggcttgccagtggtgagaagatgttgcctgcttatccctctggggcgccggatttggagagcaggtttggggagctggggaaggttggggcgacgaagaggctgtttaggaagccgggtgggctttgaaatatctttaaaggataatgcgaagggggggaaaggaaggcgtactagtataagtcgccgggttgctggtttatggataactattgtcatggattgggggttgcatcatatggtatgatggagtggagtcaagaaacgggcaccaggaaagggggggggggggggcatcatacgatgatggacatggtgttttttattgaatgatggatggatggatataaagggagggagggggttcacgacacgactacgaaaaacaacagcatttgcggcggtggatggaaggggtttcagactctggaatgagccatgggctctctcacccacacacccacacccgtggaggagttgtttgtgtctgctgatttatctcttttccctttgttttaatttccttgcctgtcgggttttatcattcttgcattgttttgcataaaggtctattttttttcttttaggttgctatcaataccctgtttccttttcggttttttatttttggacatgcatttggctcatggagcattgctggtgctataggatggggtgggcagttgtgattacacttttaggcctgttagacctgggcattttttgagaaaagggaggataagagattgttaggttaggttaggttgacttaattgacaatgagagtattaaaactaccttgcgtgatgtgttgatctttgcaatgtaaatgtttgtgattacatgtgatgagaggagaacccaaacccccacgcgatcatcatatcgctctacaaactcgcgatagctgctggattctatttactggtccctttaacccaactctggaagcatcgttcacttttcccaaaacctttctaactgctcatgtcaaccaaccatacactactttcggcagtgatattatgcgtctagaggtgagtgaggtgaggtgaggtgatattaggggcaccctcccgataatacggtcggatcagtttgcggctcgtgcagaaagccaccccccgcttgtcaattgctgcttgccgatatcgtcacctgctgctgaccgctccgctatcgataacagggtctaagctacttatgacggtgcggggaagcggagagacctgccagcaggatggaggggcccccagttgttgttatatgtgatagctaattgtccccatatagagggtgcttgaactggcgagaagggtcgctatatgtacttctagaatctacctttctcatcctatcgtttaaaaagcaaggctggtgtggctgatgttgattgcgctggctggttggcctggctgcttgtggagcgggcaggcactgcgtatgagctgcgtcactggtcttgagcgcattctcggaagccgataggctcaccatcgaatgttctacaacctcctgcccacatcctgcccacgtcgcagccactccggccaggtgcacaccacagcttccctccccgccaaggcatttccttacttactggcctttgtccttcccggtttttctgtgccttctctcctccctaagtttctttgtgatagcctcattgaacgtttgtttgacccagtgaaggatttttggcttcttccttgtaacataatccatttcgacctcgacggaactgcttcgcaaagaaagaaagacccgtccgcttctttgttgaccacgcgagatcaaccaacttcccccccccctcgacgagtgttacagctcatccattctagctgcaactagcgacccgtgcagcgagcgaaccagcagtctagccttttcacccactttcacccactctatttactccagttcagctgcaagcaagaaagcatttcctgcaacccaactcatcaggagtctcttccctttcgcgccagtacctattttccccgaccaacccccacgttcccccccaaacctaacatcatctttcccgcaacaacaaacatcatgtcatcgtcactccactcttcgccaaccgatatataccgcaccgacaaccacataaatcaccaaaaatggtcaaagagactaaactctacgacctcctgggtatatcccccaccgcaaatgcagacgagattaagaaggcctaccggtgagcttccctcctcacaccgcttccctgctcctccccccccaccttttgccacagtttcaagtcgtgaaggcagctacccgcacggatgggctcagaagttgcttctgacactcattgagagtgcggatgtctgcttctgctgccgctgtcgttctaccttctttgttgtctcgtggcgtttgctcgtctgccttgacgaaacacgaaacagttgtggcccatgcccacgcagccggtctatactttggtaaatgatataagctgacaccccctcgcaggaaagccgctctaaaatggcaccccgacaagaacaaggacaacccggacgctgccgagcgcttcaaggagtgtggccaggcctacgaaatcctctctgacccagaaaagcgaaagctctacgaccagttcggcctcgaggtgcttttgcggggtggtgccccgcctccggatgctggacctggaccaggcccgaacccatttgctggagccggcgctggcggtatgcccgagggctttgcttccttcttttcgaacgcagctggcggcggcggcggcggtggcggcacgcgcttctcgtacggcttcaactttagcgatccgaacgacctcttccggaacaccttccgcgagagcagtggtggcggcgatccgtttgaggatattctgtttggtgctacgaggggtgcttctgctggcaggtcacgcgggcctagggggtcttttggatctgaaagcatgagggccaggcagccgacgccagaggtgaccacggtggagaggccgctgccgctttcgttggaggatctcttcaatggcgtgaccaagaagatgaagattaagcgcaagacttttgatgagactgggaagcggataacgacggatacggtgctggaagtgcccatcaagcctggtctcaagaaggggagcaagattaggtttaagggtgtcggtgatcaggaggagggtgggcagcaggatttggtgtttattgttgaggaggtaagtcgagcaccgtttacgagactgtcagaacaaggatgaatatttgctaacatgtcgtgcacagaaaccccatccgctttttgcccgtgagggcgacgacatcgttcacacgatcgacctggatctcaaggaagccttgacgggctggaagcggcaagtgacgacgattgagggcaagaacctcaacattgacaaggccggcccgacgcaacccggcagctcggatacctaccccggactgggtatgccaatctcgaagaagcccggccagcgcggcaactttatcgttagatataacgtcaagtttcccatgacgttgacgccaacgcaaaaggcaaagttgaaggagattttgtgattttgacacacaaaaagcaaatctctgagactggctctttggggattcacaccacatctcggtcaacagcacatatgatcattacatcatgatatggggcgtttgggtgatttttttttcgagtcaagtgtgtcttgttttatgtcttgtgtgtttttattttttcatggctttcacacgagcaaaccaatttggcatttgtatgtacaggaaggctggttggttggtggtggtgttgttggtgggggtggtggtcaaggagagagcaaattgatatcatggggaggttttaggttgggcgtggtggatacatacattgaatcagtgtggataaggagaagaagaaggggaggaggataataggtacatattctttgctcgtggtggagaggggaataatacagtgttatcaagtctgtccttgctagatatgctgctgttgggtgtgtaggatgggtgcggcgtttttggaatttaaaacgttgtgccaggccggcaaagcggcggtgtttaacctgcagaggcgttaatatattttgcagtgttccaagagtttcaggatctggtaaccggtgatcccggtgagatagactccaatgggccggtggtttgtttacacgtgtaagttgacgtgatattggtcattggggttggcattgggtgatggattaggtaaagagccggggaggcatgaggtgagcgagatagtgggatctgggaaggggaattgggattgggaaccctgaatattctgaatatcttccgcgatttgctcaagaggcatccacggtaccggaggatgtgagatgtgtgtggtgtgggtggtgggggggtgggttggtcttggtgaggggcttggtgagatccgagcaggacccttccaagaacctccctcctcacctgtgaagctctcagttcttgtggtagaattttatttgaaaagacatagcaattgagttcagcatcatcaatcatggctttcttttcttatgacagctatttacaatccccatcaaccaccagatcggaatttacacccccagggtgaagatacccccaaatttagcgcacccatgatatcttggccgagagaaaaggtcccctgtttcggcccaatttttcagggatgaaccggtctgggcaagggccactatgacgacatgatcgacagaggggtagggtggttcaaccgtaacggcccgcgaattgaactctgcccctcgtttgttggtttcaattgaattggttttgattccgcttccaaaatgcgagaggggaagaccgcgtgctgctattccaagaggggggccaaggatcgggtggaaaggggtccaactgagcggaatacctagattctgggaaataaaaagaacacgtgctttccccctcgggaggttttccgcctcttcttcttcatctttctcgaaagtcaaattggaaagtagagggagataagcttcttccagccagccaagtgtacctgccatctacgtcttttaacttgttgcccgtcctgtggattattagactctctgtctgataagctctcggccgaatctttcccgaacaaacaacaaccccaatcactctcagacgaaccctctctgtccactctgaataacctcacttttttcccccgctccaaccactaccacccaaacaaccatcaaaatgtcttcccaaaaggtatttctttcccccgccccaccccccattctcacggtagctaaacccccctccccccagataacaaccatcctcctcgactgcgacaacaccctagtcctatccgaagacctagccttcgaaggctgcgccgacctaatcaacgaaatcgccaccaccaaatccgtccccctcccccagcccttcaccggcccctccctcatcacagaattcgtcggccaaaacttccgcggcatgatggtctccctccagaagcgctacaacttctccatgaccgacgccgaactcgacgactacgtccgtcgcgaggaagacgtcgtcatcgccaagctaaaggagaaactcgtcccctgcgtcggggttgatgcggtgttggagaagctcgcaaaggaggggaaatacaagcttgctgttgttagctcgagtgccttgaggagagtaaaggcgagtgtggaaaaggttgggcaggataagtactttgggaaggatgtttatagtgcggcgacgagcctgccggtgccgacgagcaagcctgatccggcgatttatctgcatgcgatcaaggtcatggggaagagggcggaggagtgtattgctgttgaggacagcaagtcggggacgttgagcgggacgagggcgggaattaaggtggtggggtatgttgggccttatccggaggaggagaaggagcacatgacacaggtgttgactgaggcgggggcggtggtggtgatgagggattggagtgagtttgagggggtgttggagaggattcagaagggcgagctttagagtggacgacatgtggggtagaaagatagaggggtgggttagaggatagataatgcaggtctagagagatacagggagctttagctgatgataaatttgttcactttcgccagtccatcaagtaactgtttacgctttggagggtggctctgccggggttggcgtcggggactgtgttcatgatgtgccctagtttgacccggatggcagtcttggtgaaggactccctttggtcacttgctgaccaaatgtttccctcggcgtcaaaacaccagcagtagagagctagagcgacgcctaccgagagatcttttcctgacccgcagagtataacgaacctcttctcaggcactgtgccttccacgtctggttttgtctcgcacagaaaacgagatgcaaactcacagatccttggcagagcatctctcaacagcctactggcagccttgctcttccccaacccaacctcgatatgagaaggtgacttgacccaagaatcctgaggggttgtcttgggcagcaagctgactacacacgtccccggggtcgcaagttgagcgtcaaccgcttcgagggtgcctacatagatccccggagcaactcttctcacttgcccggcggaatcaccggcgggcccttcctcggccacgagcctctcgataagctcggggaggtcactctctggtgtggagactaactcatccttgtgcttccaccaaatctgcgccgtcagacccagcgcccagttctccgtgtcgtctcctgctccctggatgtacccgccctcacctagctctgttccagtgactcttcgggagctggtgcagcagactactgggtggaagtcctcggagaatgcaagatcgagagcgtcgtcttgggttatccagaacgggcggagcggtttcttcagctgggccctgagaggtgcgaggtcgattttgagtgagcgaaaagactcgacaaagtccgggagccgggctgagatttgactggcttccgaatccgagactgcgtttggtgggacgtggagggtgtgtgaggaggggatgtctgggaagagggcccggttgaggactgcacaccaggttgggattgttttgcttagagcgtctgggtgtcctgatcagggtgttgtcagactttgtttcagcgagtggatggatgcaaaggatggaaacaaaactcacgtttgcctcgccgggtagagtcaacaatgatgcacctgcaggtaggtagccgtcggattagttcatgatccccccaaaccgacgagttcagttggctggtaaacgtggacgggtagccgcatgataataattaaaaaaaaaaatacatgatagacattcatacccattatgttccccagctacacccagcaaatgcagatttatcctcctcgtgctaaacttccactggccggtgtgcccatctgtgcttttgaagtaagcagaggctgtcttcctggccggatcgatataccagctcccgcagcgctcattcgcgaccaacggcagctgcaacgcgtcagcaacactttcgacaaaagaggcgtcgtgttggatcgatctgagccggtttgtgatggaaaggttggagcgcttgaggtctccgagaatgcgtgaaaagttgtggttggcctgctcggggaatatcacctcggccagcgtgggggttgctgcagccatgatggaagaatcctgtccgggctgttggcgttgtggctctcataaaattacctcgaaagtgaatgaagctcaaagatgataccagatttgatcgtcccccgcagggcttgaaaggggtgctgtggttgggccgtcgtggtgcgctaaaaattccacgtttagcggggacggttagcgttgtctcgtagggctgaagataaactggggaacattccatttctttttccaggttccgctcttcactttgagtccgaggtgcgagattgctcacggtagagaatgaatagcaaccggtgagtagacctgatgcttgacaatagcacaggccgcgtatgccagatcaaattccaggatattgttcatgacgaccacagagagtagcctcgcggtagagggtatatcagattcaatcggccgataataggaccgttgcacacaacggcccgctagctacgttgcacgatcgaaagcttccaagcttcttcggtcatcaaataggcatggtggcctcccgaggccatcagcagcagccaaagctcgagacttgccgaagtgaaccatcggggtcaccgaccagatgcctagttcttggttctggcgccaaaaatatcatctcgttgtcaataatgtcagatcaacgatataacttacaagaaacactaagagaaacccatatttacacatttgtcaggcaatgggtttgaaacatgggattgttggggacacggagcagcgcaacatcgagaaacgcttgctcaacagtctgggcaaaccccaaaacctggccccgcgatctgactggctactagtggtgtgttttgaactcgaaggattcaaccagctgcggccagacacgtcccagagctggccaagtatgattcgggacccggctgccacttatcattgtgtgattttacacaacccatgggcctggactggatctttccttggactatggggaagcgattttggtcaagcaggggaaataaggacctgctgagatagttcggactgagagaatagtgactgaggtctaagccacacacatatctcctagcaagcagcttagtcatcagatcaaagcatgggcggatatacgaacgtgtgtctttcctctgtttacccggggatacacggaggatcgccggcctttggcctcaccgctcgtctgcacgaccgcagaccggctccgaacaagataacggacctgcttgcacggccccgttcgttcggtggcagaatgtttgcacagcctgccccacatctgagaacggattccagagtcggcttggggaagaggggccgaaatgcaatggacagcaccttgcagagaccgacaggaagaaaagcaaacttcccgcttcttggccaccattcttcggtggtcaagcttattccaatcccttcttagtttgagaaagatacgaacgagggatattgacggctagcttgataattctgaaatttgtgagtacggagtgtattggccgtccccgagggcacatggcgcgggatgtgccctcatggctattctccaaaaaaaaaccagtgggagggctcaccgcttccacaccacccacatcatggaaaaacctcccccaaatcagcaatgccacctccacacttggaagatgtggcgcagcatctcagactgaggcagccagccgtttgaagagcaccagtgacttcattttgcggggagatatcgacgccatctggattaaccctgcctttgagcattctgagattcgaggctcggcataaccctggtccgtctcaagtctcactctcccagtcagccggcgaatggcatctcacgagactcgacccccggaactctccgacgatatgttgatatgacttgccaaatcgggacacaactttcgaggaccagacggcgcaaatatcccccgcacccgactgaaagggacctgacgataggagatcgagtggctcagatgaagtccgacgaggatgagtctcagaccttaatatcaagcaagagtcgacgcatgaatcgcacgtctgcgtagggctgaactcgcgacttgcagaagccactcggctctgcatcaaggattgtccaatgcccgtcattgtcatttttcaatgtcttgacaggatggccatgcatcgatcgaccggctggtggttgttggttacggccaattggtaccatcaaaggcgaccccaaacatgggcgtcgttggcttgctcatagggctgaaatggaggggcaagctcttctttagcatagaggtaccactcaggtatggaccgtgctcgtcgaccccgccatccatcactctccgccttcccctccaacggcatgttcctatctccatgatatcggccggtatctggttcggatcaacgcaccggcgttttgttaaaaagacaggctgaaaagcaaggctcgacaagcaagccagcggcgcaaaggcttcgagctggcggtcagtataacgtatgtggtgaatcgggacacgatggctctagacctattgtcaatggagaaggaccgtctctgacaaatggaggacacgcgaaagttcccaaacgggtgatggtgagggaggacggcagtagtgttttggtagcacgaggtcgctgcgtcatcaccgtcgtcgtctgtccccccgtaccccgtgggattttggtggaggcgcggtgcagctgtcttgatgcaatactgatgtcgaagggtaaggtaacgggcggggtccagagcgtggcgtctgcattcgaccccaattccaggcagagctccttcccatcgaggaagacttgttccaaaacattccgtcacgtaataaacggagaaccgtcactgatgattatttcggcaaccaattacaccccgcatcagccaatcccgaactcaaacgtcagccaccaaggtgagacgatagagttgagcatcgcagccgtgtgacggcttgccacgcagactagctagagttcagcagacacaagtcggcattattactattctttgccttatttgccctcgctcggagcactcgataggactgacgcactggtttctctcggactttccaagatcgatgtgcgaaaggaaatcatcgagatgcaatatgcatggtacatataagtacctacctttaccttagtctagccctcaccccttgcgagaagcggcagggtaccctgggcgctgagacagacactagcccgggccgcccgcatgccctgaacgacaagaaaaagtgggctgaacggcggcctgaacgagccgtggtcgcctgcaggtatcattcatatcccattattaacgagcctcgcccaccttccccctcaacccccttgctcaggttctgtcttgcagcaaagctgtgcccacctgtctccacgacaagacgtttccagcagaaatgatgcgcccttgagctgacctccaacattaataccttttcccctggtgctcgaccaattctcctcttgcacactcaccttcactttgttttattgttgactgcaaagctggggcttccctgtctccatacaaacaccgtccgaactcaagcttccctgtttactccatcgatcaagggccggcccgaacgacttataccaagggctccgccaatcgaacaacaacgtgggcagtgtaggtaatttacaagaggtgacagctcaacgcgccccaagaattctgacaagccaagcgcgatggcttctctgatgccagtccacgctgtctttgcgccagctggaaatggcgcttcgaatggtggtggtggtggtggtgatgggcaaaaaccaaagcgcgcgagaaccagcaaacccaaggtcaagacggggtgtaacaactgcaagtaagggacatcctcccgctgtcatcccgccaacgaggttcaaacttcccggtgatgcatattgttgtgtctgttggttggtggcgctgacccctgttctccacagacaacgaaggatcaaatgcgacgaacttcgaccagaatgctacaactgcgtgagatcaaaaaagatttgttccggataccctcctcctccgcgcagcgccagaccgtttgaagaaattagaattgcaccaaaaccaattgccggtgccggtgccggtgccgttgcggccgctcccccacccgttcgcgatgctcttcaactgcagcctcacccacgacgggtggccaaacagctcaagcggaccacaagcccccttacaccagtaacacctcaagcgttcatgatgccaacaatgccaaccatgccggctttgccgattaacgtctcgataaatctcccattcaccgccgaagaaggactctatttccagctgttccgtgagcggacggcaagtgaactctcgggcttcttcgactctgccttctgggcacgaagcgtcctgcaggaatgccatggcgcatccgccattcggcatgcggttgttgctctcggagccttgtacaaaactctagataaaacaaacgagtcaccgccggggtcaccaagttcaaacgccagcccctatgatagtgccaggaggcactgggagatggctttcaggcagtacgccaacgctctgagcgcgctaatcaaggccgattcagcagagtcctccaacaggacgagattgatggcgagcgtgctgttggcatgctttgactcgtttgttggcgaccaccagcaagctattgtccaaatccaaaatgggcttcgactgttggagaagctccgccaggaacggagacgggcattcttacccaagcctgaggagccggtggaggaagagctcattcagatgttcactcgactagccattcaagcaaaatcctacgacatggccttccattttccacaaccctatgtcgtccgcctgaccgcggctgcccaagaccccagctcaccgggctctgagggcggctcgcccatttcaactgaccaaggtcccgtcccagagcgattctcaactgtgcaggaagctcgtatcgtatgggatcgccttgtcgagcgcatcttccgcttcaccgagactatgtttgttgaggctcaacacggtgtcatgggcatccttccaaccacgctggcgcagcgcggtatgcgcttcaaaaaggaaatggatgactgggctcatgcattcgaacacatccttcagtccagaacggcaccgggcgtgagcagccaggaaaaggcatgcattgctgcagtgaagatgcatcagatcatgagtagtattctgtttatgatgacattttccgacagcgagctgcactttgacaagttcacgccggatttcaagcacattgtggatctcgctctggaagttgttggtgacgaggaaagaagagcggcagccaagcgttgcccagatcagagattctgttaccaccaaagccgatgcgaacccgatatctttggaggccacgaatacgccgcacgccatatcaagcccagcttcagcgcggatctgggtatcgttccgccgttgtatgtggtggcgaccaagtgccgtgaccccatccttcgacggcaggccattcagctcctgaggagcagcgccaggagagaaggcatgtgggacagcgagctgacggcacgcatcgggatgtggatcgccgaggtagaggaagagggtttgtttgcccccagtgattttactccgtcgcccaccggttcgagccctgtacagctgtactcgccccgtccgtcgacaagcggcagttctttgacgccgccgccttctgcgacatacagcggaggccgatcgagcctcagccctcaacctgggtttgagtacacagacagcccgcctagtcagaatggatatgcacgacagtcgtcgctttcacccagtgttttgtcggtgcagataccgaaaaagattgtgccggcagagaagcgcgtcatggtcagggcagtcgagttcagcctgcgtgaccgatcggctacgatacaactgggctcgcgaaacctcagactggggacaccggatttgaggacgaaagtaacgaggattacgtggtgatggaattatgggtttatctttttgcttttctcttcttgaatatctcgactttctcatatacccggacaagtgctctctagtcttgtacagaggaggtcttttttttcttttcttttcttttttcttttcgtttcgcttcttgtcgcattgttgaaacgatattttttcatgtatgtgatgggggaaaagggggcgggaacgaaaacagaaacggggggttcaagaaaacggtacacaggagagcatgggtcgagcaattggatctcacgatcttgcgtgtattttgggtgttttgttttgttttgcctatctagcttgacttggtggcgttctgtactgccaatgttgaatagttgtttggtgttgggggcaaggagggttagacaaatcgccagggaactgctgttgtgtgtctcccagcaaatccgttcattttggaagagctggtatctgaagaagttagcgggacgggatgggaaaacagaacgacgatgctctagtcttttttcgcttggaaggagaaagatatttaaataaaccaacccatcttgatcaaattagattgctttggccgtgattgaactcttcgtgtctgtcttgagggaaagggaaatgcccgtcaggcgcgtgaagccttcccttttttttttcttcttttttttttgctgcatttctaacaactccttggtgggtttttagaaggaaatattcaataataaggcaggaagggggaatcttaatgtggccagcctcttttcatgaggaaacaattgggatgagctttcctccaggtttgggcagagagatgtgagggaagggatctgctatttgtctaccgcagtcactccttcctcacctcatctcttccacatcctgagcaacaagggcaggagcaaccgcgatatatagattccttcccagctccactcccgccacagcggcaccggccaaatggtcgagctggtaagcaggtgagctttttgctcccaacccaccccctccttccatatagttatatgacatgccttggatcgtttgctttaccatttaccgaccggcacaaatataatattggatcaaagttgatgatgaatcccatcaaattagtcgctcttcttccatcaaaaagctaccgcttacagcctaggaactatccatcatctgaccccatcatccgcctatacacactctttctcccctaggacatcccccaagcctgcccctgtccgggttgtcccccctccccctcccaccctccactccgctgctgctgctgctgctgctgtccctgcccctgtccctgatactgctgctgctgatgcgcatgcatcatctgctgataactctgctgctgctgcaactccctctgcatctgcgcctgctgcatcatataaccataacccatctgctcatcccccatcatcatctccggccccatcatcaacccatcccccccaaacccaaacccaagccccaacccccctcccggatcaagcttctccatctccctcataaagaacgaccgctcaatcttctccatcatcaccctcttccccttttcccggtcaaaaaccgccatcgtctccgggtacttcctcacgttgaaccagtgcgtcagactgcgcagggcctgctcgagcggaagggcttcctcaacctctgcgtcgatatcggagccggccagccattcgtctcgcagttctgggcggcagtagaggtacaccgccgtgattacccgcatgtttgactgccgccacttgcggccgcagtaggggacttggtttttgaagagtttgagggtgtacagccgtagttcctgctggggaaccttcagggtcttgcggaggatgggggatgacttgtactgcaccagcagcaagttccggtgggccttgttcttgcagatcttttgcatgattcgtagatagttgatcaggcaaaagaagtttcgccgcgaaaagtccgtgatgggctcgctggggagagggttgacggggtagccgagctcgtcaacttctgggcgcgtggggggtgcttgttgttgttgtgcatcaaacgattgctgtgcgtcttgggacgctcctcgctgatcaggtgtggttgttggtgatcgacgacgtttgatgggcgggggggccgcgtcgtcctcttcctcactgacttcctcgacatcctcgaattctgtagctgtagggttaggcatgcccggatggggtatcacgccagcccgagagccgcagaagtagaagaagctatgttaccatatcagcttcccatcacttccaaccaagacgaatgaagatatacacacctatgctcgagacgatcaagtttattttccacaacctgctgtacgtcgtggacagcaaacaacttgagtaccagcggaatgtagcaagaatccaacaggagctgtgtcaagtactcgaactttagaacgtctgaggcccatgttagcacactatcatcacaatgctcgctcctgcaaagaacttacgagagagcttcagccacttcaacaacaggatcaggatacccgtggcagccttggcagcaatttcccgattcctcatctcatccacatctgcatctgagggcgaacccggatcaggtcccttcccgccggccccattaggcccaggcgcctggctcggcccattagcccggccggcaggtggaccaccaccctgttgctgcccattaggactggcaataaccatgttactagcaatggccagaacctgcttcagcaacaccacaaccgcagactggagctgcggcagcgcctccttgtaaaactcttcaactgcatccaaccgccgcttcgtgttgtcgtcaacctccctggggccataatccgctcctgatctggacgcctttccgtctttgtctcctggcttcaccaagcccagttcctccttctcctcaagcgtcaactcgtcaaggtcgagctcatcgatgagatcctcatccgctccctcgcagccgcccctgccctctttaagaaacttctctctctcgtcccacagttgccgagtagcccgcgtcatacgcactctcttagagaagagttctcctgcttccatgatcgaggctggcacatcgctgccttcccacttcctccccaccagcagatcctggagccctgctcctcctttcccacctgcgctgttactagtcgcgtcaagcggtgggtacatgaaagggaaattctggttggtttggtagttttgtttctttgcgcccttaccaccggctgccgggctcgggggtggtgatggcgctggtgtcgcaatatgaacgggctggttaaggatcgatcctcctcccgtctggttaggaggaccggagataatcccagtttgggcggtgtttcggggtgggtgactgggtaagtgaggtagtaatgatgtgtgctctgcttccaatggaattgctggctgaggcgggacgtatgctgggtattttgatgtaatctcctgtcggaatacgtggtagtccaacggcgaggccgtaatcagttccatgtctttttcgttgatctccctctcgcttgtcgccttcttcgtctctgaaagctccttcataccaccaaacaccagcaatattgacttccaaaacaagaggaagatctgagtctgtggcaaaatcccagcctcatcccacctcagctttgccgtcgccagcatgagaaagtccaccaggttggggttcaaggcaactgcaaacatgttagcaaccagtctcccttttcttcaccaagaaaaaaggtgcacttacgcaacctcggcctgacctcctccatcccttctgaatcctccagagtgacctgaataacgacatacatgaccgtcatcaaatgaatcagctcctccacctgcatctgcaaactctgcggcggctcatccgcccaaaacggctcaaaggcccctctcagcgcatcccacatcacctccacccctccacactccgccaacaccctcaccccctccttcatagcatccaactgcaccttcgtagccgcactcttgcacttcccctccacaaccccattcagcatccccaccttcctaacagtcaccgcctccgtccaccgccccagaacaagatataccaccgccccaatcgcctcccctctgaccatcctatcgtcttgatcatcgctcaacggcttgatatgccccaaaatactcgtgacaaactcctttcgtttcgaaacatccacctcatcccatcccggcgggggctgagcctggctttctgtaggtgaagactcgggcgaggcaaagtacttcccccacgccgtgtgaaaagccctgttggcagcgttcaacctaacccactgccagaaattatacatgaaccactcgtcgatttcctcctcgagggggcccatgtcggtgtattcgtagtcgtaggctatcggttctctgttggggaagtcgttcacaattcgtctaagttgtgccaacgaaagggagtcgtttggtgagacattttgttgttgctgctgctgggattgttgaccctgctgctgctgcggttgagaggcatcattggtctcgttgctgttagctgtgtttggaatcggtggtgcggggacagaggggacagctgggggaatggaagtcgctgagggttgttggttacggacgaggagggggcgcttggccagggatgtgggaggaggagggggtggttttgatgtgttggcggggccagcagcgctggcgtcgaccgtgccatcttggtcgactcctgttttctgaactggtggctcagctgcaggtggctgcgatgcttcttttcctttcttggatgcgtcattcgcagcgctcgaggcacgggatggccagagtgagttcatgatatcgtttcgtctggaagctccccacagaagctatgaatggttcggcggtcaagaagttgcgaggggtactgtcatttttcgtgggggattaattgaataatagcgagtgttttgaaatggctgcgtaatctagtttcgtcggaggtgttgaaagtacaaataatctttttgatttcgtgtcacgtaacgttgacgtcggacgaggagggaagctcttcgtgttcagccttgggcggcaggacccagagtgttggtgtactaatggcgggaagtgggtcatttacaatctaatcaaaagtgggacactgcatgatcccttgttcacatcaacttcattgatattcatcagcagaaaaggatgcaattttttattatagagcatctttcaaacaatcctcaactccgaaacgtggtatacccttttctttttcccgtgacgccagcacaatcatataagacaaaaaatcaaaaagaacagtagtgccaaagagaacaaaaacccgaacgcttccttattccgctatgcatgcccctttcaatgatcccaatctttccttctcacgtaaaatctcccttcccaagtatccctagaagccgattatctcccttctaccgttccatccatgtttgatcctccacgctttacttcctccgctctcgcttcccagaccccccacttacagctctttattgtctgtatccttcatcatcagctgttcatgcctttgccaaaagcactcccaacccccaatcctgaaacggaaatcttgcccttgctccaccagtctctgatcgccctttagccaccaccctcgaaagccctcaacctcgcgcccagaactcaattctagtaagccctgtacgtctggctagcaatcagaaacctcttcccatacttcgactgcttggccagcgaatcccagttcggcaccagaataaacacatcgttgaaatgctgcttgaccgagtactcctcgttgctcctcttgctgactccgaagtagaccgtaccagagacattgaccatgatcatcatcctcacgccgtcgttaggcccgtgaatatcgatcaggttctgagtggcgccaaagcggtaatcggcgttgatgacgtgcgcatcaaaagtgtcgacgacgtagctgacgtgtttcttgtcgttggtggctttgggggcttcgcgctgctgggcaagaatcttctcccagtcttctggggtggggcagactaggccgttgacgcagatgtcggcaggggggtggccggcgttcttgtaggtgtcattgttggtcacgtaggactggctgacgccctttccctcattgatttggctgtagtaccagttgacgaactttgaagcagctgaaaaatcatgttagaaaggtggttcggcccttaggtttgacggggattagtcacggaccatcagcggcttgccgagtgttggtatcgtcgacgttagtcattgtgcgtgcttgattgatgggggaggtaatttgagcgatgcttgaatgatccttgaggggtgaaccgcagatgcgtgcttgaccgttgcgagttgcgagttgcgacttgtgctggcgaggttctcgatgaggtttgcgcgcgagataagatggttcaagttgcttgagacggattgtcgcgcgaagaggctgcaagacagagacaagaagtattggactgtcgtgatgcgctgttcagaaatatctttgcgaacgaggaggttgcgaaaagtggtcgctttggtcgccaagcgaacggttgatgttggggatgaaggtcgcgaaagtgagcagacagttgatggagaagtgatggagggggtcaaaagggcaagcgagtgaaactggcagagttgcgcctcaaaaagtaggttccaatcaagccgtacttgaccttgtgacttcgtgaatcaggtgaaggttgaagttttctgcctggttttgctccggtggaagaatatcaaggttgagcagaacaattgtgagcgaggctgtggtgctccaggggaaaagtgtacatattcttggcgacggcagccttgttccaacgtcagctgtcccacagccccactccagcttctgagccgcaaagctttacgcaccagctgccacagccgtttaccatctgccaggcggtccgaagccaagcttgcttgccgaacctcccaaaactttcggccggacatatcccggcaggtcatcaccacgcgcgacaccccgacgacggcggcacgattgagttcggtcaattcggctgccccagcctccaaccccatttctcagcccctctgtaaccgtcaaaatggtcagaataaccgtatcatccctcctcaggacggcgctccggccaaccgcctctgttcctaggtgcaccgccaggtatatcctcccccccctctataactcccccaccaaatactaaccctctcttagatccttctcctccctcccaaccctccgcccaacccttgcacccaccccctccgcttttcgcgccccatctcagacccttctgtcccggggacctatcctccagcaacaatcacctagcagtggggccgaaggagtcctcgatttgatctcttccacctccatctcctccaacccggcgatgcagtcgatgcaagtccgttgcggaccccgcccaacaatggccaacgccagtcgcctgatccagaaaaggagacacgggttcttgagcaggatcaagaccaagaacgggaggaagacaattgcgaggagaagggcagcaggcagaaggaggttgagtgcttaagctggggtgtcggcagaatgggggagaaggaggcatggcaaaaggggaagatacccacatggagggtacacgagagatgtgtatgagtacggcatggaaagtgaagagcggggaggattgtatcatatgaggcaatggaagagataaattaaaggaatctctatgaagatgccgctgtgtctggtgtagtgatatgctttcgtggcttgcttattttggcagagtctcacgagcaagtcatcgaggaagcggaggaaactggttcctaccagcgatggaaagtcaggaataaaagccgcccgcccgatttttgcggaaaagactgtccagaacctcacagaccaccggctacccctcgcttcgtaacatcgacgctttggcatctcgaccatcaaaaaacttcaaagtcaggcactctacatgggctccgagtgtgacacgtcaataatgaagacgccctgttacgtctaaacttgcgtcgccatctagtttactcagggcttgatgatgagcaagcttgctcatggagccagaccctttccatactcacccatcaggaggtttagcatatctcaattcaattcgattgcttcgtccaatgaccttcagctgccttgcgatcaaccaacagaacagcatgtctcacacctgggttagggttccctacctttcaacaccatcaatctccagcaacttctcttccacacagtcacatgcctcatcaaacctccctcatcaacctccccttccactatcaatccccacttacccaaaccatcaccgacaaaaccccgtcaggtcaggtcaggtccgtcgttagcaccatcacgacacaaccatccatgatatggcccaagctcccgttccctcgtacctctctcctacccaccccagatcttaactccgatccattaagcccgtgctataacttaaccaaccaactttcaactcaacggtttatgtcagcggccaatcccccacaacgttgcattaaaaccgctttttttcccagtctctccattgacaagtttgactcaactccccgtgaatttgacaaggaaacacaaaaggagaaggtctgtgtgtaaacaatgtttctcttttcctgcagatagtgtacatagggggcgtgtaactaagacgggcgggaggtcaatgcccaagcaaacaagcaagcaaagccgttcatccgaacttttttgtctttgtttctgtctctgcacgaattgatcgatctgtttttgagcaggtgatgtaaagaaaaacaaaaagcatagcccgagatcggacatgactatcgaaacatacctacctaacatgccttcccaacccaaccccaagctgcggcctcttttttttttcccctaccgtaccaagtcacccggccgaaaaaaacggaccatgctcgatgcctggctgacatccatgttcggaggaccgcagtccgaaatccgcacacgggataggggtataccttacctgaccaacctggaaacaccgtgcatttgggagtcaacaaatctcaaacggaaaacccatcttctttcagtcatctcgtccgtcactgcccaactaccgtaaatctttttgtttcctcggaattatgccgtgttgctattttttgtctccccatgtttcccaatgtttggtcttaattgggcaactatgcggctccagtacggagtatttcctgtttcaaagtcgctcattcatgcaacaacatcaagcacctccccataataaaaaaaacaattgatccaaaattttggtaatatatttctctgcgaattcgcgcacgcggcggccggcttgttgttgtcgtcctcgagtagtacatattttcttctcggacttgcctgatccatatatatatgtttatgtacaagtgagttttgagcaagcccgacagcttcctcggaagctgagagtgtcttccccccttccacctcccaactgtcatcgcccttcttttgggaagcgtataagataataaaccgtgaggagggcggacagaacagcggaccagaataacgagatagacatttgtgcgtctgatatgtagtggtgatttgtcctcgttagaaacatccgccttcgcaacgaacgaaatagacggggttgtgtagtaaaagatagataatatagtaaaatgatgatagaagttaaaaaaaggggtgtggtatcgatccttacataagaaaaacacaatgacaaaaatatatgagagggtaaaatgcggtccaaaaaaatgatgtgtgtgcgattgcaaaccaagtccaaaacaaaacaacaagaacaacagaggggatatccggtcaagaaaagagcaaagcaaatccagaaagaaaacagcaaaataaataacaatacaccccccacccaccaaaggccggtgttctttgtgaaatgcgaaccaaattttgtcaaaccagaaccccaaaccattgccaaaaatacgaaatgctccccccttcccctatttgatgagccggacagcattattcgtgaataattgcaaaggtatcacgatgcagtccgggtgagttgttgagatctcatttctcgcggacgctgttgttcccatgtgctctgtcctcctcaatcaagagattttcctgaaatggtgattggatacgtcctgagtaactcgaagtgggtggtgaaaggagcgtatgtgtggtgtggcgtctaatgtacatgtctagcgcctcgagccccgtcgatagttaattatggttccttgaaccgtagttatcttcaagtggcattccaggcataatgcccaaccccgccgtaaacgcctccgggggccccggaggaatgagagcctgggggtggaggggggtgagggtgttgctgttgctggtggccgtgctgatgcgactcgggcttcacgctcggaaacgcgtagggcctgtcggaactaccattgttgtatgagacgcttgatgctgaaggttcgcccgccgtggtggtccagctctgcgaagaggggaaatagtctctgggcggcggtgcgttgggagctgtggccgacgaaggcgctgaagtgttgttctcttgcgatggcgctccgtattgagaaggtccaccctgagcacttgatgggtgctgtgactgtgggctcatgtcgttcgccgcgtaggctgattgaggggggccgtaacggtactctcctggggctgtgtcgtttgaaatggaagaggctaccgactggtggctcgcatgacgcggcgactttgatggccgggggttgctgtcgacatatcggggcacgttgagcgagttatcggcggtcgtcgacagggacaagtgtggtggcgcggaggttgcttgcacgtaggtagcgaactgagttcggatcggtggtggctgttgatcttgcgagacaagggagagctgaacggatggcatcgatgtctgctggatgggtatctcctgaggctcagctgtgtagctaggcgcgccagaaagcggcagcttcgggtagggctcggatggcattgtcgcggtagggtatgtcgctgaacctgggttgtgtggcatcgacacctggctcgaaggattccatgtggtgggataagagctagtttgacttgtcagcaagtttcatttgtaaacagatatggagaagggaccgggacgtactttgaccgcatctgcatcgggctctgcggcatttgcttcggagcagtgaaggtaaaggctcccctggggacgtgtccgtccaagctcgagatgcgaggtctggcatcgtgtggcggcttgttgagaacaaccgcctgggcgacgattccctggccagtctcaacaagagtctggccccgcgagccggcactagatcccaacaaaggaatctcctttctggcctggaagttgcgcggacttctgcctctcaccacaatgggtgccgttgtcagctccgagaggacgagcttttgcccgtttgccaaagttccgtgaagcttgaggtgcaacacgaaatgctgttgcagctccttccgtcggccgttgttcgccgtggctctggcaacctggttagtgactcattcccatgtttacaacagtgttgctgctccccaactcacattctgaactggagacggcgccatccgatcgggtagatagcgtagtgttcgccacttgtgtcatcctcgtcctccgcccatggaatcaagggaagattgggcggctcctggtctggggcctggtttacctcaggcgagtttggtggcggtgtcttccatgggatcacgatcaaccggactgggtgtccatcgacagactcgatggcggaaatgctgacttccatattcttgatctggctggtctcgccagactccaaaagcaccgacaatgggacctgtgggaagcaaaggctgccgctgatctggaacaagttgcgccgatagcacgtcaactcggcgttcaacacgttgccgtcacccgcagccgagggaaactcggacaggaagaacatgccgtgaagctgggcgtcaatctccatttcgtgcatccgtcccttggcgtcgacgatggtgtgcttgtcccccactttcttgaacgacaaaagtttctggtcgtggttggagggcttgtagtcctcccgcaggtcctggaccatctcggtatagggcgcctggtcaacctgggagtatggccttttgaggctgttgatgctggggatgttcatcagagatgggtgcgggtaccggtcgtatccgtcgccctcttcctggccgggccgggggtggtgatattgcgggtagtccatggtgtgctggcgacttctaggacgcacgagatgcgatggtgctggtggcggtacggatggatcttgaggattgaatctgcccgtcatctgaacgggatttccatagttggaccagaggctaccgtgttgagtctcagccctcagctctgccatcgtgtatgtcgccgtggctgacatgggaacctgcttgttcccctagagcagcccagagttctccgcagcagctcccacccagattaccaaacagacaaagagaggagcaacacctgcctcgtagagtcaagtcccgcttcacaggtccttcttgcaatgatgccgatggggatgtcggtggatgatcaacaacaaagtggtggtaaaggatgggatgacagcccacagcaaggttgcagggcagcgtgtatgtatatgtatgtacgagccaatacggccaggaggtggaggggaaccgttttatgagaacaagaggcttcggcaatgccccgggggcgacaagggacagaggcgaggccaagcataccctggcgccttcaaggatgggatggtagggagaactgtttaacaacgcttgcagggcccgtcgcgcgaaaaggtgctccaaccatacaaggaaggagggtgaggaacggggcgatctggcaggcaagcccgaattcccctgctagtcgagatggggcaagataccgtcccagaagctcaaggacaggctctgctattttaccacgccctccttgaagcctctgatatgccttctagctgcttgaggtgtagcttgctatacatgcgatggaatagcagagaaaacagagcatacatccgattcccttaatcttgcccacctgcccaaacagggggccgtcaacaggtccgcacaagcaacttcacgcggtctttgctgtgtccaccagcggtcccacttgggtttgaaggaggggtggaggtacggggccggtaggaggaggagggcaagtgagtgatcagagaggtatgaggaccttgaggtgcatcattctgcttaggtatgcccccccccctgtcctgcaccacctgtctgccgagcgggaagagaaatacacatatcaacagccccctaccacccattgacgcacaacgtttttctcggaataactgtgggctatctctttcgggggatgacccgcgggcacagaacttgtgggtgggtgtttggacggacggcgcatggggtctgaatggatacacgggggggcacatctggccaagccaaacgatcagaggggatggaggagcggacaagacggcaagcaccccctcggcccctcctccgtccaatccaaggccagggtaggagagggcccccggttgtcgaccttgtcggccgagcgaacaggggcatctgattaggccaggaatcctccgaggactctgggcgaacagctagcgacccgcaattttctagaagaccgttgggtaataaacgcgccggcgaagggcctttctgctgctgcttttccagaagggaatggtctcttgtcgaggaggggggtaaaaaaatcggttcacgagattgctctcgaccggggtggagagggcgaaccagagcgccccccggtggaccccagtcagctcggctcgagatggaaaacacaattacacacccctgccctgtcctgcccaccccctcctccatcccctcctccccagttcccctccagtgctgggtgttgctgctgctgctccttgcttgcattctcgcgcgctgcccgtccgccgaaaagagggacgacagatgcaatatcaggccttttatacctcttggccaccgttgtggacgccctttgacacctcacaattggcagaggattttaaacgaaatcagcagcaacataaagaaaccgcctcggacgcttgctgtggatatcgcatcgctttgtcatttgatcacgaccgcgacggccgcgaggtcctgagcagacgatgggtgatgggcaacaatgggcagcgggagagcaaagtgcctgggcccgcagtggaccgaggcacgtcgaatcttttgcaaccgcctgcattgcagtgtctctggctggctgctgctgctcgggcaggaaggacgcacaagagtgatcagcggacgaggcatgtagtcggcaaaggactcgacagcaagatggtatatcagaaaggaggtgtcacttcggggacttgtgtgtggcggcgagatgcaggttacgggtcttgggtttcttctcgtccgccatccggtaggtggttcggcgaccatgatcagtgatataatttcttcgtgatggcctctctcttcttgtcaggaggtgcactcgagtctaggagcagacgactgggtaaccccggccatgccgcatggcccgatctggttgtagtgcagcacagggaccatccggaaagccgccatagcagtagcagcaaaatgcggaggtgggaaaacggcgccgcttgacgacattcccgaaagggaacttggtgcctggcgcccggcttgggcgcaaaggccatggcgataagttatgggagaggagcggtcatgccatttcaaatgcgagccgtggctagaaccgcatggccgacaggaggctggctgtgattggagcaggtgggcgggattggcaacagctcagcaacctctcagtgatgctcagaggccagctccttagtccttgctgtatcgtgcatatgtgtcgtgacagggagggcggcagacgagctcgtccgcgctatctcgatctccgtgcggtggaactcaaccaccacctactgctgcaatatccagccagatggtcgaatgggggagagtcactgcttccaagccacctgctgtcctcgagctggcagagaggcagcagcagaatctgatcttgatggaggtcgtcgtaaggaggtcgtaagctggtatcccgaagccacatgtgcatctcccaggtgtggtatttaatgtattttaaattgcatcgcacgcaggctggggaataggatgtcgaaaagtgagtgagaagcccagtggtgtttctaaaaaagaaatagtggaggggtgacaggtcaaaaaggtgtgggtgtgtgggtgatgccttccaatgggtgagtcggtggttgaacgggtgcgccttcctcgctacaatgttgtctcacacagaacaatctgtattcaggcagtgtcataattacacctacctaccttgactacagcttctcagtttcctctcctgtcaccggtgagtatgtctactatgtaggtatcgacgcgtagctgcttctcacttttttgacatgtcactcgctcacaaacaacaaacaaccccgatcccgatcagtcaaaagtcttgtcaacggtcttcggtccaacgatagatgcaaggtgggggggttggagttgctgttggacggcgctggcttgtccatcgggattttaacttttttctctcttttctcctcttggtcgagcggaagcggaagcaccctgaggggcagaagggacgccaaaaggtcgcagagcgcaccgagcgcacccggtcattgccgtggcggtggctgtcggttgcaacactgtcgtcgactccatgcattggcgaacgttacaatcacgattgcatcggggtaagccaggaaccagcggccattttctgaacacgatctgacctgccgagctaccaagtgcgacagtctttttcacggttgcgatacagatatctgtcagttgccttgcttgagcttcagcttcggcttcggcttcagctttcacctcattcgcatggttcatcaacaagggctcttcgcgcgtgctgcaggggcaatgccactctgatcacattctgaccgctccacgggctaaaacggctcgcttggtctttgtcggctgtctagcagctgtgctgatgctgagctaggaaccgttggaaatgtcacgattctcgatgacgaggcccctggtccttgacaacaagcaacagcaaaacttggcttgttttcctcaaaggctaggctgagtttggagtcgtgcatttggcgagtgcgaggggcgttttctattgtttcacgctccaacagccgcttacatgttgacatcggcgtacaaccaacaacaactacggatacaatccccagaaaccacggtaatatcccgatcttcaaaagttctcggcccgcaaccacggaagattcgaggctgccgtctccaaagttcttacaagctaccagataagtcctgtcaaccctcggttgcacatgctgctcgggacttcgacgcccccgaaagctggctgctctggtctggtatgcgtgtcaataatagctttcgtactgcacactgaccgagattgacccctacagtctccatcttacacggtcggtttaagcctatatgtgctggctaatatagggcttgtcaaccacaccaaaaatccctgttcaacttggtacgagcccactgtcgcccagcaagaaacacaaaaatccagcgctcttatttctccgtggacgtacatcacacagacaatatctatgcaagtacgcgaggttgtcacggttgtacgcccattatcacccttgtgatggctgctttggggcattttggcaggaccggtgtctgaacacggcgcagccccaggcggatatcgaggtggtgcaaccacgaaaccatcatgtcaatgtccagcactcgggacttgggcaagcaatgacacctggggtcggcactgccctgcaaccatggcccgatgtcatctctcggcctgccagtggcagccaccccgcgtgtgcacacacacacacaccaccgacctcgagttgcaacaagatcgaccagcccctcaaccaatggtgagcatgccgagcgggttctggtgaacaagcaagatttcaagatatccacgataggtaggccgtttgtcgggaactttggtgtatgttttatctattgtgcttggtcttgctcagcaaatatcggtcccgccattgccgaaccgcccaagtttggctctgagtgctgcgcatcatccatcaccatcccgccagcggccggcaacggagatgatgacaagcacgccgggagtcgaacactgcttccaggaatggagacaagcccagggtgaaaagaggggtggtttgtcatgctccaggcaggcactgagcagttggtgctcaggaatctgagcggctggcaaaggtccctcgacaagcagccaaagttcgtggtggaggaccctaggccgtattcagcagcccgctccgaccggaaacacctccattgcacgaagatcctggactccacttgtgtaccatttctcaatcgaggaaccacttctgcggccaattcccgtttctgcgccgccgcggagggggagcaacgcctgtcttgcggcctggcccggttgtcatcgctgaatcatcctacagtatgataatcacacggcaaggagttgttctcatctgccgcagagcttgaaaacgccgcagcggacgctgtgtggcccaaaatgttggactactacgcagtaaccgtcgtggggcagcagtaggcagggccccggggccacagcaagatgcacgagcatatgctattacatgccatactacagtacttgctacctatctcttcagcagcagatatattccggcctgatgggcagcacttgggttcgctgatgctccagacgagaaacgaaaagttctgtcggtctcccaatcagtccaaggcaaactcgcctggatgcatttcagccaatatcccggcagcttagagcaggttatcattgggcgggcaagatagctgtgtgtgccgcccagccttgtccaaccctggatatcttttatgatcgcgtatcgctgaaatctctagccattccgcgcgaaactgttcgtctgtcatcgttcgcaccaagtacccggatgtatttcctattccttcaacgctgcttgcaagcgacgcagatggtgcatacacgcacgaatagtacatcctccaagctcacggtatgggtctctcttctgttcgcatgtgccgccggaatcagggccgctccaagcttcgaccactcttcaacgaccaagaaggcaggagactacaaaaaaaataactcggttctaaaggcggtcgaccacatggcgtctacgttcagcagtgtgtgtgcggataagaccgcccctcacaaggggtgtagagttaagccgggccaccccatattcctgggtcgcttctcgacctggatcaccaaagatggttccttcacagaccgctcggtgaggatgtcctgcggttttctaagtaaagaaacactcgatagtggcccgcgtcacgcttctttctggctgccgtatcgctgagggctctgcagccctatccacagcacccaacgttcagttgggtagcttgggaaaccttggggttaagtcgtcgtaggcggtttcaatctacatgctacatcttcatgctgtcgatcttgaatcaagcggtttctcgatcttcgcagaggaacaacagaagcattctagaaacacagagttggcttcctgccatctcgtcgatattaaaacaacacagacagcacaccgttgccgggctcgagcacatcaaggaaccctcgaccacggacccaacgtgatatgcgtctgtaccccgcagtaagctcgggcgcccctctgcctgcataacgcaacaagacggcgagtgagacatgtgttctctgctttcaacctcattgccaagaccgctggccggaggacgacaaagacaacgacgatggcacacgcatatcggatcaaggccttcccacaatccagactctgcgaagttcggcgatacagaaatgtgcgtgctgttccttttggggagctgagatggaactcacgtccatccatctcagcaccatgcaaaagtcacgtacgggatgataccctgccaatcgaatccgggggggggaggggggggcggcaggccgtataccctaagaggggcaccgttattgcaaagctggtgattttagcctggaagggccgattcggcggcgctgctaatttcccagccaatggcgtctaccaattcaccagctaggaaaacaaggtgcggctgcgttgatcgtggcgcactgctcgatggcatgtctcctcccacactcctctgatccgccaacccaactgctaccaccaaccagcacgaagcagcacgcagcagggcaccggtcaagacgctcatggctatcgcccgcaatgtgttgcgccacgcagcacgcagcagctcgcagctcgcctgattggcttcgccttcctgattcctgacgcctccagaccaggaaccagtcgtctgagacctttggccgtttaacgttattctttggcgtcatctggcccaccccccgagcctcgtccttcgctctcgcttgtgggccagagcgggtgctgctgagcttctccccaacccactatctgcgctatccagcagcttgtgacagcttgtcaagctcgtcaggccttggtctgccgtgatcccgaaagccaacgcaaaaacctccgcggggacccctgttggcactttctgggttgcctgacctggtgccggcagtccagtcctctttggggagctgccaccggcgagcctagggacccaggtgaacactccggagctctcgatggcagtggagatggatgacatgcagccagggggaagagcaaaagagagccaccgaaaactaaagcgccgacctgcctactgcagactggacttatgggtgctcgctcttgtcacgaccggcgctgcattggcacacgaaaatgttcatcaaaagatgattatgcgacggggtctttgagagctgtcaaatctcaatgtgactgacagggtgcaagcaagccacctcatgctatgccagaaaagggttggagaaaagaaaaatacgcatggagaagccggccaaccgcttagcaaacgcttattcgcgttccacaaagtcttcatctcaaagttgactcttgacacccatttttcttaccgctcgacaaatcagcgggcttgggaaggtcaacatttagcatctggcctcgacatcaccacaaaccacccctggttgaccatcgtcatggcacgatgaagttgagatgaacccaaacgctggtcttgcgattttcccgccgttggaacgctggaacactgccatcacaggggatgctcagacggtcatctggctgatgagatcttgcgacgcaaccatgggaaacaagcccaagcagatgtgctccatatgtttcaatgcgctcgatcgtgccagtgtttacgcccaacgtctggaggctgggaggtgttgaaacagttgaaacgttcgcggagacggtgaaaacaacggttctcagcgctaccctctggcggtggaatgtgggaaggcccccgttcgcccgcttgcttccggaattgagcccaacggtgcccctccccggccctggacgtcctttcccctttgtggagagttggtgggcaataaacccacgccaagaggagatggcttttgttcccctgcgctgggcgacgttgcagcgcaagcgatgggccaaaaccgtcaaggcgcgctccactcgcactgcgtcctgatgtccaggaaggcctggtctcgacagcgacgagacctggaaggcatattgggcaatgagaccctatcaatgcacgtgtgttaatctccgtgacaagtgtcgatagcctcatcgtcatcatctccttgttgccggcgtgctaccgctatggtccaaaacagcaaagcgaaggggaaacgtccaaggaaatcagggaacagcttgggtgtgtggcacaccctcccccgctcgagccagcaagccatcccctggagcagaacaaggccccctggacacgcttgcggaatcaagtaccgaaaagacaacagcatcccctgcgcttttggttgagttgcgttgatggccacatttggaagcatcatcaagccagacctgccaggaacaggttaagcacaccagcaaaaggaaagaggcgtgaaatcacacggccaaacttggttaatgtacaggccaggatgccgagaaacacgagaacgaaacagatgggcacatggggacattgggccccccgatctcgtcccagactgtcccagaggcgtctcgactccatcctggaagagacccatcatcctgttcgggcaggctgtaagttctggctcacaaacatcagcaagattagagaaggggagaacacatgcgtctgctgtgcgtcgtgcagctgtacagctaatctattcggctgtggagagcagcaagcaacgtaacttgcacggaagcgacatggttgtggtatcatccgcctgctggtcctgattatgaccgcttctattcttccgagagccagggacagtgtgttcggaggtgtggaagggggcaaccaagcacgagagggaacacgcgagcgagatgcatctgacatcttggtcggtcgggttttcggcatggatatttacatgccagtgaccgacatatgctcgacttccttacatggttgacggcgacaacgaagggaaaacacatgcaaagttcggtatgtatacagattaaaactgctacctcgaaggaaagcggcgagagacgattcgttgtcatgtttccccagatgggttgtggaaattccttttctggtcagtacagggacccgaaaagggggcagcatgaggtgtttggaaccgatccgcctacaaggcatcatcggtcgaacaagacaccgaacctgctccgcactcggataggagggggggggcgggtggggagaggtgatgggaatgcttgaccagcagaagcagtgcgttgacaaagggacttggggtgcctatctacatgggcgatgctctttctgtatcgatgcctttctggccactcaccatcctccactctcgcctctggcaggcaaggagaacagctatcactcattcttgtagctgtgtgacggactgactcaacagaaacagagtacagttgagagataaacagcaaaccgacagcgtatgcgactagctgaacccccccgtttttttggtttcccatgcctccccttcccgtctcgacacttcctgcaaagcttgcatgtttaacagaccggaaccgacgctctccatatggcaaagggtcctccgagcgtgtagggggcggcgacggcagcaacggggctacctacctacctaccttgataccggcaaacacgactaccactactactccggacaagaaagtttatgaccccaactctcgctgcaactcggattaattaactactactataactaaactcgggtggtggctagtccttttccacgatgcagatagggatcacggtgcgcttcttttcccaccgcgaaggtatcatggtagcaatatgcatttctcccacgtaacaaaagggcgaagaaagtggtagccgaccctgaatgactgacctacccgccgccgccgtcgtcgtagcagtctggtctggcttgtagctagtgtgctactactaggcccgcccagatcggtacgaccaccactgggggggcgtggtaaagaaaaaggggggagtgtgtgtgaagaggaaaggaatgggtaggtaggaagtnnnnnnnnnnnnnnnnnnnnnnnnnnnnnnnnnnnnnnnnnnnnnnnnnnnnnnnnnnnnnnnnnnnnnnnnnnnnnnnnnnnnnnnnnnnnnnnnnnnnnnnnnnnnnnnnnnnnnnnnnnnnnnnnnnnnnnnnnnnnnnnnnnnnnntcattcaacaggcatccgcgtggagtgcatgtacaacgcgcttactctcacccactccgtgggttggaggggggggggggatagtaggggggaaagcctggaatggtctttgttgttgttgttattctgcatcatgcctttttgacattggaaagactctagaacgaacgcacggaaaataccggaaaaaaattgaggatgatgatcatggtgtgttttttgtacttttttttcttttggtggtggtaggtaccttgcttctttttgtcacgacgttagggtagtatttgaagaccgaaaagagaaacacaatcacacattcaggacagagagggaaaaaaataaactaacgcaagccacaaactgcgggttggggtggggatgccatgtgggagagatgcattttttggtggttagtgttgtgttgtagtgtcacacttgcgggtaagagtaggtgattattatctacatctgcggagagattttttttacaattgtgggttgttggttggggtttaaagggaagggaagaagggacatcatagcgtgcagtagtctgattgttccctttgttttctaccggagatgtcaaaaagagatcttattcggccacaaaagggttttgaagtaggaaaggtaggtggagtatcatcagggcggccgggacgagacttttagcattagggtaattaccagacaaacagacagacttgaggcgtcagtcaccggaccttttcatgcttctttttgttgacaaggaacggctggatgccagtgtttgccataaccaaggtaccgcatctcagaacctgccgctgtttacccttactccctactcttcggtgccggatcatggggggctaactacctacatatctacctacttaccaatcagcccccccttttcctcggctgttatgggacggaaaagactacctacgttaaagttgtatacccggacccagagaacatacgtgaaaggtaaggctgatgacgacggaggttttccggagacgagtacaacatctacttatgcaaagtgatagtgtaggtaaaaaaagtataagaatagaatctcggattgtccgacagacagactggatagtacctagtagaataattcacatttatccgctgcggttacgtaccttagaacgagtgggagcagagagggaaaagggacaagagctggtagcgaacaggttgctgttttcgtcctccttatgtacagttggctttcggggggggctgggaattgtgttctgctgagataccttacctacctacctactcagcgatccagctacctacctacgtacttaccgacccgtctcaagttgctctcttttcagtcttctacgatacatcaacggccaacaaagcttgatagtgaggcatacatcactatctcgtaacctcacctcacgcgagaacccccaagaaagccaccgtagcatacccgtgtccgacctaactctcccttcccactcctactcctcatgcccactcatacctctccttctaccacagctcgcttgcccccaagggggaaaaagccaccgtagcaacagtagcacttccccgtcccctccatcatatcgtaccatttctccacgtttttgtcccctccctcaagaaatgtaagagtcacagcccgtagctgatgctgtcaggaacacagttccattcatcgatctaactacctatgccacatgacatgctcagattacgcacttggatgcatcagaatctcattggcaacttagcgtatgccatgccaccattctttctagacatccccaaagaaaatccaaaggaatgcatcacacgcactcttcaagtgttgcccgcttgttggctggaagatgtaatgggtacgggtatcatcatcatttgtggactttcccattcgaccctacatacacaccaaacccaacacaatgccattgtaaatctctttccatctagctatattcaccaccaacaccaatgcaaaacctccagtgcctgaataacaccccccctcctccccacaaacccaaacccaaaagctatgctaaccccccattcccaaaccctcacctcggcaccacaaaatcaaaatcatcctcattaaaatcatcctcctcatcgttcaacgccaacctcacaaaccgcctcacccactcctcctgtctcgggtccagctccccgttcccatccagcatctccatcatctccaccatgttatgctcccctcccccagctcctgcttggttctggttgttctggttgttattacgacgctgcccctgttgtgcctgattattaacattttgccggtggccaccaccaccaccccctcggccacctcccctgttatggcctccttgtccgccgggtccaaagccggcgtgtcctcctccccgacctccccgaccaccacctccacctctctgttgatgtccccctcgatgtacacctcctctcccacctcgagcagccaacgcaccaccagctccctgtctcccacgcggacctccgcgggctgctgctaccccagcattattcccccctccctgcggcgctggcaccggagcaggagcagcaggcgccgggttattagcagcaatcctcaacaccagcggcccctccctcgcaatcccaacctcctgcgccggaccaccagccggttgctgtggcgccggtggccgaagaggaggctgttgaaccggtgctgcgaccgccggcctccccctaaccccctgatcctccccctccccctctaccccctggtgggaatcctcaaatataacctcctcagacacagggtgatactgatccaatccccggatttaaaatatcagcaaggatccaagcattgaagaccaccaccctagtttgcttgttaaaaaatctcagacccnnnnnnnnnnnnnnnnnnnnnnnnnnnnnnnnnnnnnnnnnnnnnnnnnnnnnnnnnnnnnnnnnnnnnnnnnnnnnnnnnnnnnnnnnnnnnnnnnnnnnnnnnnnnnnnnnnnnnnnnnnnnnnnnnnnnnnnnnnnnnnnnnnnnnnaataaactgctcaaccctctcatcaaacaccaccggcggcgccggcctccccgcccccccgcccgcaaacccataacccacatccgccccatcccccaactccagctcccacaacctcataaaacagctcgtcaccctcccgtcaggcgccgtgttgaaatgctggtacggattccccggatccaaccacgcagagcacaagtagcaaaagtgcgtctggcaccgatagcaaatcatgtggttgcacccgtgcgtcttctgcgcaggggcagcacacgtaggacaaggggtggtgtgcgccttcatgtactcaatcgtcgccagctcctccgccgtcagctcctcctttggcctccggcagccgacaaactccccgtgccacgactgcatgcacctgctgcaaaaggcaaagctgcacgtgtcgcatatcgacagcaggtcctccgtcttgttgtacggtttcgactttccgacttcaccttcgggcatctcttcgttgtcgtcgtcgtcgtcgtcatcgtcttcagaggtcgagctttcgtcgtcttctgatgcgtcggcgagttcgaggccggtaggtcgtttatgcctcttcgacctggcggcaccgttgcaccattgacggggacagtagatcgtgttcttgtccgactcgagctcggtcttgtatttgagcgtcacgtaacgtctgacggtgttctcgtcgatggggatctggagcagttcgctagggctgatgaagacctttggctttttccgctttcgacccgagggagaccgtgacttttcacgctctttggcgcagttgggtgctggacatttgactgccgccaagttcccctctttgatggcgctgttgtaaaaatcttggagacattcgacgcaaaagacgtgcccacagtccatcattttgtggcaaaaggcgccctttttgggatccagacatacaccacactcaaaggtccccttctcaaaagcagctctcctggctctgatgtcgtaatcgagaatggcaatcctgtgactcgggtcaacctccaacgcatctccgtcaccaaccagtccaaatatctcctcggccgcctgttgtatgtggtcgatgtagctgaagccgaccatatcacggcccatatcctcccatagcctcggaccgtcatcctggagcttcttgatcgtttcggatggaagccatggcggatttgtagaaatgctaaccttgggaggttcttcctgggggtatcgggggccgaaagaaagttcgagccgtatcgatgggaggtgggctagttcatgggagtcaacttgcggttcgccctgttggccgccaccagctatggcggggccggcatgggggttgacgccatttggggctcgtccaacggtgggatctggaggtggaccatcgttggaagcggtgggaaagtagacaatgacaggcttcgagggggtgacgggaagttcgagggcgatggtataagggtcgtccttgttgggcgtttgtatctctggaaatatggcctctaaagtctggagctcggtgtctcgctcggtttctgccatgggtaccgagctcttgatgtattcggaaaactatcccttccgccaatccacccgtctttgtccccttgtccaaaatgagttattctccgtgctgttgtgcgactgtccggcttgctaaaaataggcccgtgatgatcgcggtcggtcgtggattagaaggtgacagaagaggggttccggacaagcaattaatctcggcgcctgaaaaagtatggctttcgtttggaaatatttcgcaagataaataggacccgcttcgtcttgtagatttagattattaatggcttgaagtttgcagatgggtggtgggctcagcacggcatcggaatggcagtccagtggtcgagcagaggtaaacgacgcatgttccagaaggaccaaaggacggtgactccaaagatcaaccgggaggcaaaatacttgttttattttttttcttcgacaggtagttgttgggtggaaagttgaggacgacgcggcagatggatgatgactcgttcggtgacttggacgttgcacagttgccaacccggcatcccagcgctgtggcaccccgccttttccccaagcccacccactgaagaaagggtcccccttgctcgagcgggctgagccgattggccagccagcctgaaacagacacgctgacgttacctgctcgttgcttgttcgagagcttctggaacttgcacagtatcaaacctgccttcaacgaggtctctctcggggatagctatattcaaactaggtgccattcacgggacgccggcccttgatagctttttaataattgaataatgcggcaataggaccccatctttacatattttctttcgtctctcaagggaaccaaccaaaccgccaaaatgtccgacaacatcacccccctcgcatctctatccctcacccacgtgtactacgttagtgatctcccactcgtcaaccttaccactcaagtactaacacaaaccagaaccccaacgaccccctctcgcacctctgcgccttcctcgccctcgtcccccaagccctctgcgtcgtctacgccaccctcctctggtccacccgcgaagccgaagtcctcctaatgttcctcggccaactaacctgcgaactcatcaacttcgtcctcaaacgcctcatcaaagaagaacgcccaaaacacgtcatcagcaccggtggaaaggggtacggcatgccatcatcacacgcgcaattcgccgtcttttgggcggtagcactggggttatttctcatggtcaggcacaggccgccaaggtcccacatcaaaaaggggcagatgcagaaggaaaaggcagaaggaaaagaagaagggccggcgctggttgacgtgccgagacggtacaaggagggtgggttgcgggctgtgaatgcgcatttggaggcgtattcccacacgccgtggtcgtgggcgcagagggcggtggtgagcttggctgcgggggttgtggcggttttggtggcctggagtcggatttatcttgggtatcatacgcctaagcaggtgctggctgggtcggcggctggggctgtgagtgcggtggcttggtttgctgttacttatatgttgagggagacggggttgttggcgtgggggttggagtttcctgttgccaggtggctgaggatacgagacttggtggtggaggaggacttgtgtcaggctgggtgggagaagtgggaagagcggaggatattggctctgagtaagttgaaggaaaagaacaagtaaaaaggcgggcatgcttgagcgaggtgttaatacttggggtctaaactattataccatgtgactgcagaaaacgcaacgaagttgatattcacggtcttgtgtggatgagcaatgactcttgattttgagttatgtgcaaaatacctatatgtacaaattgcccgaaccccagaatatcccttcttggtaaatttacaaagtaaatggagcttttgagagcaacgaaagtaatcccccccaatatttgccgtaaatcaccccagcacactctttcgcccgacgtatcttacacttccatgctgtttcctctcacccccgatagcctcccgtgtgtgtatttgagttccaatacctcgccgctggctgcggaggcggaagattcccatacccattaccgctcccatcatacgtatgcccgttcccgtacgtgttaccgttggcaaccccattgccactattagcatacccgtttccactcccgttcatcaaccccatatcgccattcgctaccccaggcgaatgcagcgtctgctgctcatacttttgagctgctgcaagcccgccatacccctggttgctcgccaccctggtgttatcagtcccatagctattcctcacctcatccggcgtggtgtgaacaggcagggcgttcggatccggccccaaatctgtttggtgttgcccgcctcttctccgaccgaacagcgcgctgaaacggttctttttcttgccgtacccggcggtgtagtcgtttgcgggggacggtccgaaccgtttctctctcttgcggtggcgggccagggcgaggtttaccaggcaggagagggcgaagaggatgcttggttgtgggtgtcagtctcctttttttcacgacctaaaagagcaaaagagtaacaagagaaaacacaacaacaacagcagcaacaacaatatctgttggaaaaaactcaccaagcagcaacagccaccgaaaaaaccgccttctccatctcacacgcggtcccatactgcaaaccccccctctcagtccaactattccccacccccagcacggtgtcgacctcgcccgtgcagttacctaccccgtgtctgttcaccccggcgatgtacccaaagcaggggatgaacgccacatcaagcaccatcatcagaaagctcgggaatgggtggcccggggcgcaacatagtaacagaaaagcgaggattgtgtaagcggttgctgcgccggctatgccgaggactgcccggacgaaggtcccgatggggagggagtgggtgctgagagtggcgaggaagtaagcgtagactgccaggacgagggccgcgcagcagaactggagggtgcggaggaggaactggagggttttgagggctgttccttttgcggcgcccattgtggttgttggttgttcctgggtatgtaagtttgttggttggtgcaaacaaaacaatgacaattcggcagttgtctggctcctgcagaatgcaggttcaatcacacttcacaaaatagctcgatcaaaaattgaacaaaaaaatcctttcgatggacgaaaaggggggtgggaatgcaccgcttaaagggtcccatcttctcaaaagccaagagatgacatctgccttgtctcgagctggccctccgatagctcaacccacctaccaccctcccgggggccgtgtactttttgcctcacccccattgtatgtatgtatgtacacgcacatatgcggggagcccttatccccatgggcatcggagcgacccagcggcggtgcggcctgttgcatcactgtcaaagacccagaaccccgaccacggccatccccccactcactacattgctcggctttccgtttgtctacctcaccaaaatatcaggtgaaaaattccgtgagaagacagcatgacgacgccgtttcgtcgatccgagaacgagtatgggttgtagttgaaagaggctgacgtcatgctgtggcatgtgaaccgtgtgttttgtggggtagactaatgatgcacagccacaagccacagttttcatgggtaaaaatgtggcgtttagatggaaaagacgcgcaatatcagtttgacaggcggggggtggtcaactgccgagagaaaatatgcctggagagagcgagctagtgttctatttttgttgattttagagaactcatgttcaacataggagtttggtgggttgagagcagcagacgttgacacacgaaaagtgggactgccccagaacatcagcccctttttgccagagaacgatgaacagtcgacctagaaacatttccatgctgtactttgttggtgaccaacatgctatttaccgtaagtgtagaatcaaaactactggaaacatctatccaagatctcgtgtccccgtttcgatttaccctcgcgcccactatcccaggtcgaaacacgcctcgttgatctgtcacacaaaaccaacctcgggaaatccgcaaaaatccaaaaaacgttttggaaatctcccgacatgttccgtccatcccagacacaaacatttttctttccccttaatcagtgatgcacacgacagtttcactcccgctcacacccaccggtcccggccacggccacccccatctacggccctatccggggcatggtggcacggaaggttaatcaacagttttgctacacaccagtcatctgaacttttcggcaccgcaaaatcttctggaccagacaacaatcatctattgtcccgagcccctcattcattgtgcctaatcaagctttcatgttttgggtatccagtcacatcatcaaattctccgtcatcacctcccccaaaacttccaccacggcctctcatcatcctcactcaaagccctcttcatcctactcctatctggagcccccctccccctaaccctccagaaatacaccggcacccccgccaccacaaacgcaatcactatcagcgtctgcaacggctgcgcaaacacagctctgctcaacaaaaacaggctgacgcagcaaaagatgataggcgtggtgatccacgtcttgtatggtctttccagcgtaggttctctcactcgtaggacaatgagtcccagcacagtaatgaaataaaacgtgtaccccgccacgccgtagaatgtaagtagtgtagagaactcgcccacgagaatataagcggcggtcaagacagcgttcagaatcagcgccgggataggggtgaaaaacagccctgtgtcctcatcgccaaagagtttcgacatcttcttcttgaaccaggatcttgtcctgactgttgagagtgagtctgggctgccggtgccatttccgaggcgcccgaatacagaggggatgtacccttcttttccggctacgtacacgagccggctggaagtgaaagtggatgagttgagagcgccaaagcaggaggcgctgacaataagagctaggactaaagagccaatggatccaaagactttcgatccaaacatgacagcaacggtgttggtcgagttgatggcgtccaaaggaaggacaaagaagtaagcgatgttggcgaggacgtaggagatgatgaccaggggcatggcggtatggatcactcgcggcagatctcggctggcgttgcggaactcacccacaacatagtttgtctgataaattggttagctaagagtaaacagaacggaggagagggaactcgcattatcccacccgtcatacgcccagaggccagcatacagcgccacagcccaggccgacgtctccgttgatgtcccctcaaaccatccgcgctccttccattccacattcgctgtggttcccgaagccgagtacccagtaatcgccaccaccacaccaatgatggtcactgtgatcaaagcaacaaacttcaaaaacatgagcatatcgttcaacctcgtccccaatctcgtcgaaacgcagttcaaaaatgtgaccagactcaaccccaccaatgccaccgtcttgttgaaccaaggatcaatcatctccgcctcagcgccgatgaacgccctgatgaggtactcgcccataataatggcgataatagcggcgcttccaggcttcaacaccaacacagcaacccacgtaaacagaaaccccgagcactccccaaagatcttggagagatacacctgcgcgccaccgtttaatgggatcgcgcctcccagctctgcataacttgcgccgcccgtccacgccagcacaccagcaaccacccacacaatcaacgcagcccctggcgacccaacattcgagttgacctgactcggcgacgagaaaatacccgacccaataatcaacccaacaatcagcgacaagccattcaggtacgtcaacgtcttgtgcttttccagcgacccaccgcccaacccgccgctcacatccctcgccgaagttggcgcccctataggagcatacccagcgccggtggtggaagagagcggaaacaaattcgcggcaaaatcaaagttggaagttacagagtatgatcggtctggccgggtgcgcacagctgggtttgcgctgtcgaggggatcgtctcgttcgagggaggcacgccgagaggacgagatgctaggtcgggagtcggtctcgcttgtatcgacgcctggactagagctggcgagggaggctagttcgagagagtcgcggccgccgggtggaggggcggaggagtataatggcggcattgctcgcccggcctcggatgggttttatgcggtgcggtgtgtttgttgcgggggtactattttgttatacccttggaattagagacggaagaatgaccatttctggttttcgctcgatcgaagtacaggttgagagagacgaaacgagatttggcggtaaagactttggtcgctatggggttggccaaggaaagtgatcgcagacgtcactgacgttctgggtgtgtgtagattaaataggtgtatgcagcgcaaagttcgtcagggggttgtgagatgtcgaaagtgcggtgtaaggaaacgatttgtcgaccgcaaattaacgatattgagggtcgagttttagactttgatccaggagagaagttccaggaggcttgagaaagggttgcggcaggttggcagatgggaaccagagccaaggccgggtatggcccgtgcatatgcagccccggcgtaaaaggcttggcaggggtgcacaacagatctgtaaaacttggagaaccattgctgggagtatatatctgggtttcagtccactcgctcttctcggatatcatgtcaggttcagtgttcattgtcatttactccagatgaggacaacatgagcaaaaaagaacaaagcctattcagggcactcgcagccgtctccaaaccccagttttgacaaagggctggacccgttattgtgtggagacttacgccatgccaagcactgtcaatggagcttgacaacgaagcgagaatggagtcaaaaaatacagaaaaaaatacctacaacaccgaggattccccagtggtcacccacctgagtactagttcggccctcaactgtttcactaggggagagcggacgggatcccgtgctttcagttgggtatggtcgtaggtgtaggatggtggtgaaagttgaggttatatcgtatgagctgggatctcacgtagcacacaaacgaccagtctatccagatcttgtcttttgctgaggaatgtgaaagcaaattatcaaagatgcaattaatagccaaatccatacaaagtgtgacagataacacaactctcctaacagttcctccaacggtctttgacgtcggcaaacgccgttgagatttctcactgccgggcccgatctggggcgccaagatatcaactaatccccacttattttttctagctgccccctgcaggcagagagagctcctgcagctctgagcaatcgcttccaggcgcaagagagcttgaagcagctctcacaacttctgacttctctctaatcttttgacccaccaacgatgtgatagcaaaatgaccgtgatctacgggaggtcaatcggccgcgctctgcccaggctgggcgctcttcgttccgttctctcatgctctcgttttggggatgatattcgatacctcagcatcacagcccatagatacgccaacagcgatgccaaactggacttgccagctttggatcagaaatggcggcagagatgggcagctttgaagagcaccaagaccagcgacggagctgaaaagaaatatgtccttcccatgtttccatatccttcggggtatttacatctggggcacctccgcgtctacaccattgccgatgttgtcgccaggtttcactcccttcgaggacatgatgtcttgctaccaatgggatgggatgcctttggacttccggccgaaaatgccgctatcgagagaggcattgacccggccacctggaccaagtccaacattgccaagatgaaggaacagctcgacgtcatgaatggatcctgggactggtctcgcgtacgtttgcacctagccttgaacccggccacctggctgacatgactacccttccccccaggaactggcaacctgtgacccaagcttctacaaacacacccaaaaaatcttcctcctcctccgcgagcaaggcctagcctaccaagacgaagcagaagtcaactacgaccccgtcgacaaaactgtcctcgctaacgagcaagtcgacgccaacggctgctcctggcgttccggcgccaaagtcgaaaagcggaaactaaaacaatggttcctccgcatctcccaattcagagactccctcctccaagacctcgaaatcctcagcaaagacaacaactggcccgagcgagtcctaaccatgcaaaagaactggctaggcaaatccaccggcgcaaccatcaagttccccctcatggcctttgagcacatcacccactccgccatcgaggtcttcacctcccgccccgacaccctcttcggagtccagtacctcgccctcgcctccacccacccagtcgtagcccagctagcagccaaagacccagaactgcaagcgtttctagatatcctccccggtttaccccccgactccaaagtcggctacctcctcccccacatccgcgcggtaaaccccctagcctatcacgacgagacccccgaagcgacaaagaggtctgtccccatctacgtcgccccctacgtcctaggtgactacggcgagggcgccgtcatgggcgtccccgcccacgatatcagggatcactcgttttggaaaacgcaccacaaagacgagccagtccggttcgtccttgccgcgtcggaggatgagtccaccaccgccatgccaaacgagccttttatcgaccacggcgttatgaccgcccacagtggtctcttcaagggtcgttcctctcaggaagcaggtgagatgatcgtgcgtattcttgaagaggctgaactggctaagccggtggagaagtggcggttgagggattggttggtcagcaggcagaggtactgggggacgccgatcccgattattcactgcggttcttgcggtgcggtgcccgttccggaggaggagctaccggtagagttgccagaggtggatgagcactgggctggaaaaaagacgggtaacccgcttgagacgctggaagagtgggtgaatacgtcttgtcctcaatgccacggcccggcgaggagggatacggacacgatggatacgtttgttgattcgagctggtattttgcgaggtttatcgacccccacaacgatgaggtgccgttttcgagggaaaaggcaaggaagatgctgcctgttgatctctacattggcgggattgagcacgccatcttgcaccttttgtactcgaggtttatttacaagtttctcatgggttcgacgctggttggggagacggaaggggtgcaggagccgttcaagcggttgattacacaggggatggtgcacggcaagacgtacactgaccctgccacggggaaattcctcaagcctgacgaggttgatctcactgatccggccagaccgagggttgtgaggacgggggaggtggcgggggtgagttatgagaagatgtccaagagcaagtacaatggtgttgatcctaccgatgtgatcaacttgcacggcgcagatgcgacaagggcgcacatgcttttccaggcgccggttagtgaggtgctggattgggatggggacaagattgtgggggttacgaggtggttggggagggtttgggagcttgttcagcgggtttcgactatctcatcatcggcctcggtgagggagttttttgagcaagaagcggctagattgggaacgatgaaggaaaaggaactccaacagtgggataaagctgcgagggtgtggagggaggtgcaaaagactgttgagagtgtcacggggtcgtacgaaaaggtttacgcgctgaacacggtggtgtcggatttgatgattttgacgaatgtgattgtcgaggaggagaagggtgtgccggatggggtgaagagggaggcggtggaggggttagtgaggatgatggcaccgattacgcctgcttttgcggaggagtgctgggctgttcttcatcctggtgagacgtcgatttttaagagtgagaaggggaggtttccggtcgcggatgggacggtggatttgctgcagccgaggaagcaggtttgtgcggtgcaggtgaatgggaggttgaagtttgcggccgagattgcggtgccgcctgaggggttgggagaggaggagaggagggagtgggttgttggggaggtcctgaagacggaggaggggaggaagaagtttgagggtgttgatgttggaaaagcaaagaaggtggtggtggtcaagggtgggaagttggtgaactttgtcatgtgatgtgggatgaaaaagatgacttgtattttattgtattgatggagtggtaacaccaaaataaatgagcgatagattatgatcatttcttggtctttcttctcctgggtgtagaggaagcaaaaagctcaccggccagctccgtagaggtggccagctacgaaaccctcggtagggtttgcttcgcggttgggtggagggggggggggtttgttgttgatttggggggggtcggtcgatattcttgaaggccatcttgagagatagggcctcactgaggaatcgaactcaggcgtccatggagccctgtttccagggggcattgttcgttgcctgatccgggccacctacgtcttacccgctgagccatctgaccattccagttaccggatgagtgcgtaggtggttgttggaaggagcatggttaacctaatatataaaccatgggttgctcctgcctgctcttgctcttgctcttgccgtgaggcatggggtgtttctgaggaaggtgcgacttccattacctcgggagcaagtgccacgatggctaccttccgtgataccctccagtcctggaaggaagtccaccgcagattgaggaaatgaggaggttaagtataaacaaccggtttgcgatcatcattttgacttttgtggaacgagatcggatggtgggattaacacttcaacaaaccacaccacaccaccactcaaaccaccccctccccaacggtcttgtcaacaatccttcctccaaaaatacacccccctcccattcccccttcccttcacctcgacctcctccccattattcctcagcgatatcctctccttttcctccccctcaggatcatccctccaaatctccaccgtccccgcataattcttcagctcccctcccctaacaaccatctccgccaccctcctcgcctgctctacatcccccacctcaaaaagcacccttttcggctggaggacactcacaatctcgagcaatcttgcataaaacacatcctccggcaggcaatcatacccttttcctaggttcacatccggaacaagagcgagtttaggctcgtaaaaccggacagaacgttcagtgtttttgttgaagccagcgggggagatgtaagggggatttgatgtcaggatgtctaactctcccggggaaaaggggagggaagagaggaaggaaggagaaaaaatgtcggatttggtaaaggttatgcttttggaggcggaaagggggaggtgggagagggagatgttgtgggagaggttttggcgggagagggagatggcgaggggggagatgtcgactccgagggtttggctggtagacgggaggagggaggctatcaaaagggggatgcagcctgttcctgtgcagaggtcgaggattttgaggggggaggacgaaaaagggaggagggtggtgaggtgggttattatggattcggtttctggtctggtcatttaaggtgggttagtttggatataagtaccaaggaagatggaagggtgaagagggcataccgtgggatgagaacacctggtttgcagaggatatcaagggggccgaagggttggttgccgaggatgtattgtaatggtatccccttttcccgcttgaggcaggcttgccatattccaagctttcggggcacgagggaatcggttgagttgacgtgctcttttatccagcggagttcgttggcggttgagtcgagggttcggcagacgggcagaagcaggggagcaaagggtgatatttgcttccgggcttgtcgaaatagagatggtgcgagtcggggcattttgatcttgggtgtgttggtgagatagatatcgtgatttgggctaagatgagaactgacatgagtgagctgctggtgaggtgagaggaagagttttgagctaccaaccccggaatcggtgatggtatttcagaatcaataatgagatttttgagtaactgactacattcaacagtttcaaaagcacccttttggttgtttacacatgttgaggtgaagctgtatcctagtgaagtgaaatattttactatcgggtcttcgtgtatatgcataccctgatagcaccgaaacctttggttcacaagaacttggatatgattacgaatatacttgagacataatccaccaaggagctctctgtcatcatgcaactacaaactgcgtcttaccagccaagacgtccaacccgcccagtcattccttcgccatgatactgcaacgagtagctcaggtgtgcgccagaccaataaccctgagagggtttgcgaccaaagcgaagtcaccaccatcattcccgacaacgccgacatgtccctcgccaacatgtgcatgcgcacccacccccgagttccccgaggggtttgaaattgaccacaagacaaatatcaatggactgatttccaactacgcgcaacatgtcctggtttgcacgggcaaagacgactggccgtcccgtattgaggacgacaacagtggtgataacctcgctgctgacctgcgtgagttagttggacgtgggggtcagttcaatgatgtatttccccctcccccccccccccttttgagcctcacacttgcacgctgatattaaccatcgtcacaacatagccgttccataacatctcagtcctcaacgcttcattcccctcatcgcctgctcccaaatcacggcctgagttgcaaaccacgtcagcttacctcctcccttcattcaagtatgtcccttggctaccgcgagtctcatttgacagcgttgaggcactggtgaggggctatctcctccctgaaaagctgcacccattgcatgacgggctgtcacccattcaccgagaccgtttacttcgcaaacccgcctatcaaaacgctctgtacggtgtcaaggacgtcgatgaggttgtggtgctcatctgtggacatggagggcgggaccagaggtgtggtgcttatgggccactgctgaggggcgagtttgagaaacgactgcctgagaagggcatcgaggtggttacagggccggtggaggtggaggtggacgagacagttcaggccctggaagacggggaagggaagaaggacgaaagagccaagacggcggccagaattggcttgatcagtcatattggtggacataagtttgcgggcaatgtcatcatttatatacctccaaaccagacaaccaaggatggggtgcggcatccgttggctggtcatgggatctggtatgggagggttgagccgagacatattgagggcatcgtggaggagacaatattgcagggaaaggtggtagaagagctctttaggggaggtatcactcaggatggaaagattctgcgactttgatgtggcagagctggtaaggtagtccgtagatatagtggctgcatatgacagtttccattgtcggggtctagaatcggataggtgcatatgcacggaccctttttcattctggcccccatcttccattgacactcacctcgcttggtctttggttctttgaccttctcccggatacagaaaacaactttaccgtacacgatcttatgccctggagatgtcgggaagactcgtctcatcgggcatacgcctgccaaaatacgttgctggagatgggagactcgacctcatgaagatctcgctctcatcacatgctcagcgacagacattacaaagaatatacaggcaaaggtcccagcatcgccaatttcatgtctcaccttctcaggcagcaaaatctagatttgactcccccaagtcggagaaagatgaatccagattcgccgctgccaagtcgaagaaaaatgctccacaatcaaccccagagccaaacgcagcccaagaccagggggagccacgcgtcaccaggaaggaggtgaagcgagagcgaacgaaaatactcctagaacaacgggaacaaaaaatccgagagctagaagcacaagagaaagaaagactagaacaggaaaaacaagaggaagagagagcggaacaggaaaggcaagagctcaaacgactggtcaaagaacaactaggcctagaaacagaaaacccagcaaaagaggagaagagccggtcagagcagagttcgaatgtcgtccgcaagattttcttttccggagttgcctcggccggtgccctcgtcttatgggagatgtggaggtttgcttacagcaccgagccactcaacgaccagaagttttcaccatttgagattgttgaccggcaacaagtgtcccctacggcctttatcgtcaccgtcaagccggttgtatcacgcctgggcggtctcgccagccagtggaagctggcatggctcgagacgctccagcacaaacttgcgtgggagggtacctgggctgttgagatcaaacagcccgaactccaagtcgcgcgagattacacccccttgccggagctggatgtgcttagggctacaaacgagtacgacactcgcggccgtatcgaactcttccagctgctcaagggtctcttctccccacaacaatccatccccacgttcaagttcctgatcaggagaacagaaggcggggaggtgagcagctggctaagccgcagaaaagtgggggacaccattgaactacgcggaccacaccagagcttcaatgtcgtcgcccgggcggggtacaaggaagcggaagagcccaaaagggtcgtgtttctcgccggcggaacaggcatagcaccagccctccaagcagccgggagcctcttccgggaacacggacaaaccttgaagaaaatgccccaagtcgacattttatgggccaaccggtcaaaagaggacatcaagaccgacaaccctgtcattgagcttctcgagaaactgaaggaaatgtctcgggggaagatcaactatgtttgcgttgtggatgaggaggggagattcatcaccgcgaatgatatcgtcgccaagacgcaaatcacaccgccgcgaaagtcatggttttggaattcttcaaaggccgaatcaacccggtcaaaagacgatgtcaactgctactatcactcctcaaaacacctgatcacttctgcgggtgaggactatgagaaggttgatggggagaacccacgacggcagtgcgcctgccctgttggaaggccgagctttaagaatctgcttatggtgtctgggcccgagggtttcaacaatcactttgctggaccaaagtattgggctgacggcaaggagaggcagggcccggttgggggtgttattggggaattggcgaagaagtacccaagtttggcgagcgattggcttgtgttgaagttgtaatcaagcaggatcacgtaaccttggatcaggttatatgccatgtaggaggtacgtagaggggccagcaagagacttttggtttgggtggcggaccagaaagaatctaatgctagatattgtttgttgagcaccagtcaccacaacatggccataaaattctaacgagtagaacatgaagagaaacttcctagctatttaggaacctttttctccccacataaacgccatccaatgcagttaaataggtaaatgacaaagcccgcaccaaccacacatgcttcttcatccctatcttccccccttcaaatcccctgaacctttctgtaagaaggcggcttcatagtccgttgaatcacctttgccgcccaagttgggatcaagctcatggccaggatcgccgcaactctccagtaaaagcccctaccgtacttgttagccactgacccctccccccaaaaaacacagcaaggaaagaaaaacttacacctccatcaaaaaccccaaatcaaaataccctcccaaaaacggcacacttcccacaaacaccaaaaacgtgcccacaatcgacaccaccatcacccaatgccacgtcgtaatctccaccgccaccatcaacagctcattcagcaccagcacggtataactaaccgccaccatcctcgggctgtccacctcggtcaagacctggctcaacccctgaatcagacacccctggtaaatcgacacaaacacccacacaaaaaaagtccggtagctcaagctcctgccctcggtcaattctttgtacagctccggatacaggttcgccagctcctcgtccacatccttgtccaggacaagactcagcaccggtgccgccgtgtagatggtggcgtacccgaccatcaaccagtctttgtacaaccccaacggctcaaagtcgaccgcgatgctaaacattgtctggcacaccgcaatgatcaaccctctgtggatcacaaactgggccaacttggcgcttcgtttgtacgagttcctcccgtgccacaccagcagcttggtcaagtgacaaaactgctcgatgctgaaatcagccgcaagactggcctgtcgtccttccttgccaacgataccaacccctacatccgccgcctgaatcatactaacatcattccctccatccccgatacagcacaccctcttcttggtatactccttgatcagcctcgccacctccgctttttgcgtcggcgagcaccgacaagcaacaaccgtcggcaacttcaccgccacactgataaactcggtccgataatgcgtcaaaaacaaccccaaactctccccatcaatcagcaagcagctgtccggcttgctcctcagaaagtcaatatgctcctgcgcgctgtccttcctcctcaacttctccacagtatgtatatactgccccctcgccaccagcttactgctcacacccacacacctcgccgtctcaaccttgtcccccgtcagcatccaaatcttgatccccgcgttcctcaacagctccaaactaggcttcacatccctctgcagcttatcctccacccccgtgaccccaagcaactccaaatcatgctccagataccggcccaccaccccctgcaccccggcctcccgtccactaatcgccaaagccgccctcttatactcctgctcaaactccctgtactccgcattactcaacctcttcctccccaccaccagcgtcctcagcccctccctagccatattcgcagtctcctcatccaaccagtcattcgccgccacaatccccgtcatgaccgtatccgcccccttttgataaaaccaaatctccccatccccatcccctgtctcattcaacctctcggcaaacctaaccacaatccccatcctcttcccctcgctcgtaaaagggaaaatgtccaatatcctcaccttcaccaccaccctccccgtctcagtactctccaaaacaatactcctcctgtcccgatacgccaacctcagcccaaccgactcagtccacttcacaatcgcaatctcatccggactgctcgcctgataagaattaaccatcctccccgtcctctcatcctcctccgtagtaggcgtaacgttatgacacagcgccagcgccatcaccacatccctcaccctcgacccaatctccctcctctgcctcgtagccccagcccccacccccgcagcgctcgagctcgacggcgtggccaaaggcggattggacacctggctcagattcgtagcaccaagattaaacccctgcctcacataccccgccacctcgtccatcgcatcattagcatacgacaccgtcccgacatgaatcttcttcatctccatgtcgttttgcgtcaatgtccccgtcttgtcgctgaggaggtactcgatcctccccaagtcctccggtatcgtcgacgtcctcaccaccgcgcccgggatcccggggtcccgctggataaaccatgaataaaccgattttcccatgtcgagattgacacggagggaaatcggcacgatggtcgagaacaggaccagaaacttcataatcttgatgtaccacacgtcagtctttgtgttaccgaaaccttccgccgcgaccaggatgatggacagggcgagggtgaggaagcagaggattttggtaagcgagttgatttcgtattcgagaaggccagtcttcgagcgggagggcgaggttgacagggcggagcgggtttgcggaccgctgtagattaccaccgccaaggtggtggcgtgtgaggcaatgaccgtgttggcccaggcggtgttgtcgatggagaggggagctgccttggcttgctcatcgctgctggcaaaggcgttggtgctcacagcatcctgccgtgtgggcagcagctccaaggtgccggtgaactcgttgacctttctgtctggcttgccagcggtgacgcgaaggcgaacaagctcctcgattggtaggttttgcgagaggggagaggcaagacgtaatttccagtcagtttcaccgtcgagctggtctgttctgataaaggtttctccgtttgagcttccctcagcagctcctccggcagcggactcgacatcctttgagctgccctgcccaggatcgacagggtgatcgaccagtagcgactcttctttcggtggtggtgcttccggctctccttggtgggccgcggcttcgtttgaaagacactttagaacaatgacatcagccggtacacgatgccccttgctgagcttcaggacatcgcccaccttgagatcctttgactttttgctgatttcatgaacatgagacgaagcgaagcggtgtgagccgtcagcctccatttgctcttcctcctctctgatatccgacagtctgtccccttgtggaatagcacgttttgaacctttccgtacgtgagatgatttgagtgttttccttgaccgaagattcgcgctacccactcctggttcgtcgaactgcagtaccgtatacaattcagagttggcctcattgtctctcctcctcctctcgagatcatcataggcttccttccccagagtgatcaccaaaacaaacgctaatggcgcaatgtacgtggaaagataaccgattctcagcgccggaatgatctgcgacaaggccaccaacaaaaagtacatgttgaagaagaaggagaactcgttgtacagcgtcactggcaaaaagctccacgctgtgtacttggcgtttgatatcgagtttggtgggaaccgtattacctgtcgtgagccaacagccaccagtctggatgacgatgggtcgtcctcttctttttcctcttcctcttggttgtccttgccatgatctgcgcctgttcccgacatgaaactaggcagccggagtctcccaacccgaagggtgtcggcagcaaaagatcgtcgtcgccgccgcgggcctgaaccaccgccgtgctcgctgagcagcggggcatcgtctctcccgcccgtgctggcatcggagtagcgtgggttgtttccatcatcgtccctgagaagcgcctcggcgtcttcctcgcctgcggcccggctgcgtcccagctcgccgtatccattccggttagcccctcgacgtaggccacccatacgaagcgtacgcaaagctatcctcggagctcgtcgttcggtttgttttggctgctgactggcctgcgacgagccagaggcgggagtcgggtcgagttcttcgatatcgagatctagttcggagtccgagtcgtccggcgagtctggcggagcagacgggtggtactggcttgggggaggcattcccgcatgagattcgggccctcaaaagaggcgttgggtaccagggactggcttttaaattttagacgacctcctgttctgatttccgctggtcggaactgccttcccttctagaaaatgagtagcaacagtgtcgtccagttccttcctatcgacatgtcttgtgctcgacaaagagcttccataaaaagggttattgagtttgtgttgccagcggagggggggggggtgtgggctgaacggagccagttttgaggatacgttgccctttagtgcaaaaagacggcaaacctttctaaaactctctatgttcttgtagtagaaagcaaaaagctgctacctagagatgggatatataataagagagatgtcgaatctcaaaaatgacgaatgctcttcctgaaaataatacctaagccacagctggccaacactgggacgtcctgttacgaatgcagttgcgcacctgcagccgtttagcgcataaatgtaacgggactcggaagatcgcggtgtcctgctatgtatctgttaatgcaatacggcccacatggctgcgtcactgtctgtgcacgtgaaagcggcacagggtcttgccagctcccgcaagtacagccctaacagaagcagctgggccactggaacacacctgcagtaaggacagcgtttccctttggcttgtggcagcgcctccgtcatccatcgccagtcttgccaacttgcaccaagaccaggagtgagacttgactgcctctgttcggatccagtcccacacaagatgattcgctgctagaatccttttctgccttttaagtctccggtttttgctgtatactacctactaagtaggtgattttttttttcttcgccccccctttccagcttgggttttgggacaggggcaacaacggcagggttccgccaaacgcgacttggttgccgtgtgttcacgagatgctaaccggcattcttcaaccatagtacttctattctcttcaccgcgccattgcgcatagtagcgcatcttctaatcaatctcacaatgtcgtccgatgcgccgacggcatcatggcatcccgccatgatgcccaattatctggctgccgaaccacctccaagtctcccaacagaagctacttcgagtccaacaccgagtccgccgccgcaaaatcaacccgaagccgccagagagactcggcaactgagccatgttcatgaaacttcagaagaccacgacacgggtgcttggtttccggactatgggacttcaaatgccgattggatgaagaagactacggacgatgcgccagcaccggcaccggcaccggcacccgcgccagtcgaggattcagttgaacctgctcctgagaagcctgcttctgaggagaaggctgaagaaacagcggccgaaactaccaatgcctccaagcacctcagcaccatgtcctttacccgaaccgtatcctcggagatgaactggaacgacgacgatgaccccgagtggagtatcacctcacctgcggcccagcacgacccttccaagttccttccagagacaggaaggacaaattcgttccccaatacctcgcatttggagcagcagccaaccccagaattggagcaggctctccctgccactgaggccgaagacttgattagagaaatcgaacaagaagaggccgctgaaaatgcggccgacgcaggctttgacaaccaatttggcgaacagaatgaccaccagtatattggcggtaacatcacagggactgccgaggatgctcaggaggccaggttcgatgagggacttgccttgattccttcagctgagccagctgcgccgcagcctgcgaagaacgacgacgccggagacgatttgttcggaggggatggggaaagcgaggaggacgactttttcagcaatgtcaaaggggacgagaccgaacaccaggatgcattcgagccacaacccctggaacgcaagtctacaatggatgtcttgaactcgttgaatgttggctcagcacataacggtttcgaaccattgaaggagacagtcgaggaagaagaggctgaggatgaggtgccacaaccacaagaaacccaggaactcaaggtggaggagaccccggctgcttcacaggacgagccgaagcccgaaacccaagaggatcttgatgccaagtggaaggagatgtttggtgatgaggaagaggaagaattcctcctcgagtccgatactgagccaaaagaggaggtggacgcagctgcattcttgggcagcgatgacgagagtctgctcgatgacgagacaggcacggaagcgccagcagccccaggatatcagccagcacctactgcgccggttgctaccagccaatatcttccccagccgtcacctgcagctgctcctgtagtcagcccatatgtgccgactggaacatctaggaccccaacccaggcgaatccatatttcccaccagccccaactattccacccgctgctgtacctccatatggggtacctgcctctgctcccccagcccaaaactttggatatggcgcccctccactccctgtacaggagaagcccaaagcccaaagctttgtggataaaggcaagggcgggtatcaatcaccatatgatcttccaatggaggttgtgaaacccaagaagcgcgccagcgccttgcctcttcagagaaacagctcggccccccttgcccccggaccggttgtcccaccaccaccaagaagcgcaagcttataccagagtcaacccatggcctctcctctgccatcgagcggtcttgctgggcccagtctggcgcgccctggctccagcggctcgtcacaaggtcaggctcctgcagcagcaaagaagactccacaagaggccttctttgaggatcttcccatcacaacgaagcctcgtcctgcctcccgcaataagggcttaccatctccgtctcaaacaagtccatatgggcctccggcacaatcagtgccgccccacgctgttccgcctcctgtgaatcatcaaatggcaccgcctccgggacctttcagcccccccggatctcagtcggaattcccttctctagtggcaccccccaaggtcaatccttatgctgctttgccttccagtgctggcctggctcccgcacctgcgcctgcagcctcgactcgctactctccagccccccctggtgctccacagccgaatggccatgtccctcctccggccttgagccgcttctcccccgctcctccctctcgacaagccagtggtacctacccaccacacagcgcggcttcggcgcctcctatattgcctcaccagccccgtacttcaagcccgttggctcatttcgagattaccaatgagcgatctagaccacaccagccgactcatctcgctgagaacactttggcagagagacgtagtgtcagctccatgcacgattccaggctccaaagggtatcatctttgcccccaacacgggaggtggaggaagaagacggtccatccgcagcacaacagtcctcccctggccgtgcgatgccgtctcttccaatgtctcctccagagtcgaaatatgcaccatcagcgtttcaagcaagacaaacgccgcccccttcttctcactctggccaagccatcttgtcccctcccaagcgggcaatgtctacccacagtccgttggtcatgtctcccgaatttgctccgccacctaggtcacagacacagtcaccaggagcactctatggcaacagggtcaccaaacaggccgagccgcttcctcgaccatcatcggtccaggatcttacgtctcctcacctcaccggatatgcccctcaagtgccagccccagctgcccctgcctcgacttcctcgcgcccaagagggttctcgctcaacatgaatgtcattccgcctacggatgggcgggagcatgatccactgcagagatggaggggcgctcctcttctttcgtggggcgttggcggttcaatggtcaccatgtttcccaaggaggtgccgcgctatggcatgaaccagagtgtcccgtcagttgtgcgtagtcctggagaagtcaaggtcaagaacgccaaggacattgccccgttagaggagcgcctaaccaagttccccggtcccctcaagggcaagtccaagaagaaggaggctatctcctggctgagtgcgggcattgaaactctcgagcgtggtttgcccaacacttttgggatgcaatcccatctggctcatgacgataagcgggcgtttgagcgggttctcttgtggaagattctgcgagttttcatcgagcatgacggtattctcgaaggcaaccctgccgttgagaaggccgtaagagacttgctatccccctcccctgcgacagaagccgcggttccgtacctgaacgggggcgcttctcttgggcttagcgattcacccgcaacctccatgcggaccgattccgtcgactcggccactgttgagagcatccgccgacatcttctcagcggcgagagtgagaaggctatctgggccgcggctgatcagcgtctgtggggtcacgctcttcttcttgccaacgcccttgctcccaacctgtataagcaggttgcgcatgagtttgtgaagaaggaggtcaacttccctggccataacaatgagtcgcttgccgccttgtatgaagtcctctcaggaaaccacgatgagactgttgacgagctggtgcccgttcatgctcgtgctgggcttcagctcgttgccaaggacccatcacttgggccttccaaggatgctatggagggtcttgacaagtggcgcgaaactctcagcctcatcctgagcaacaggagcgttggcgatgccaaggccattaactcactcggcaccttgctttctggatatggaagggctgaagccgctcatatctgcttcatgtttgcacgccacaacaccatctttggcggattcgacgatccaaactctcacttcgtgctggttggatccgaccacaagaggcaggctgagcagtttgccaaagagattgagcctctcttgttgagcgaagtgtacgagtatggccaaagccttgccgggaactcgaacgtggttatttcgaatcctcacttggccgcatacaagctgcagcatgcatatgccctggcggaatacgggttcagagataaagctttgcagtactgcgaggtcattgctgcgtcgatcactgcacagaccaaacgctcgccgtatcatcatcacatcctggaaaatgcagtcgaggatcttatgaagaggctgaagtcagcccccaaggaggagtccaactcctggatccccaagccaagcatgaacaaggtctcggactcgatgtggaaccgcttcaacaagtttgttgctggtgacgacaatgatgagtctggtcagggcgctgctggtgatgcagctgaatccgggccgtttggccgaattgctggaggtaccccgtctattagccggcctccatctgcgaacaacctggagacgtttggcgctgccattcccagctacggtatgccggtcgcctctgtctccaacgggcctgtgatgtcctcggcgccgccaaccagagctgcctctcgctatgcgccaggaggcccgcctcagcctgcggccggtgctggcaatccgtacgctccacgcacttccatggagcgcagctcgggcgagtataaccggagttccgttgagctgcccaggaggtctctggacatgcagtccggatacggcccggtgaggacctcctccccagctcaacagtacacgccatatggcggtggatacaaccctgctggggagtcgccgcgcagtccatcggtgcagcaacagcctgctcagctcgctgcagccacaccaggctaccaaccatatggatatcctggtgcgccgatcaatggtgggaatgctgccagtgatctgcccactcccacttctgagaagcaaggctttgaaaccaagactgaggccgctgggacctctggttatcaggccccctcgtacggatatgagccgccatcgttcactgcttacgaggcactaaaggaggaggagaagcctgcatcggaggagactactggcgacggcggatatgagcctccctcgtatcaaccatacagctacgaacccccctcataccagcctgacccgccctctaacgaggacgaaaagtctggtgatgagaagcccaagcacaagaagaagagtttcatggatgatgacgatgatgactaccctcccatgaagccatcatcatcgacaccagcggagaagagcaaggaagagaaagacagggaaaacgcagagatgttccgcaaggcagctgaagaagatggtaggccccctttcgccccctttttcaccagtataacaccgctgaccatatcacagccaaacgcgccgaagcagccaaagcgcaaaagaaaggatggggcttcggctcctggttcggcggcaggaaatccgacgccatgccccagcagcaagaagccgccggcacacccaacaagcccatccgtgccaagcttggcgaggccaattctttctattacgaccctgagctcaagcggtgggtgaataagaacagttctggggaggacacagccaagaaggcgacgcctcctcctccaaaggcgggaccgccgggtggtggtgctaggtctgcgacggctagtccgtcttttcctcctccgggggcggctgatccggggagggccagtgcgcctcctccgagggttgcgtctgttgggaacctgacaccgccggggtcgggatctgagattggtttgagtgcgccgcctgctgggccggtgggcatgttgaggagtgcgagcagtactagcactgctagtgcgccgcctggtggtggggcgagaccgcctatggcgggtgcgggaccggcgaagagcttgagcaatagcagtagtatcgatgatttgttgggtgcggcggggccgaggaggccggggcagggaaagaagcctaggaagagcgctaggtatgtggatgttatgacgaaggattgattgaggattatcaaaggattgggatgggaataagggttgggggagatatgtgaatacgctcattatggggtttatgaaagaagggtataataaaacgggggggggagggggtggggtgtacagtgggttgtacagttgactgttttgtatttatagaagctgagccttttgtgtaataactttttggttttttgctggtgtttggtgggttggggttgcgaatatatggggttcacaggattctctgttttattatggcaaatactgtcttgctgtgtcatacatactaaggtgtatctatctgtctatcccattctcgatattaataacgctttttttcattgtgtcgctatccggccccaagcaatcctagacagcaaataacgccgcgctgcaaatcattacccgatatcccatccagctgctattctctttacgaactaaaagacgagacgtaatactaccgcctgttagcaaccccccggtctcaagatcttcatggaggaaaaactcacagtaacaacatcctccatcccccccaccccaccccccaccccaccgctagaatgcggcacgtagacatacagtatcaaagcgtgctcgtcgctaaaacaagcgataaccctcccctccagccgtcccacactcaacaccctgctccagtccttcccgtcgaccctaacagtagcccacttatccctccccgcctctctaaacaccgtactcgggtgctcctcgagcggcatcgccaattgactaggatccagctcagggttctccagcccgtcccagacagaggttatatccagcgtgtcagttctcagccgtagccgcaacgagccgtgcatgttagctgataactccaactttgggtccttggtcacgatgttgttgtgggaagaggaggagggagaagcggtagtcaaagcaagcttggtgaaccgatcggagattgctttgagctggaggagggggggaagttggatgtggacgtctggctcgcggactttgggctgcatgattgtttctactgtgtctgggtgcaggacgcggacggggatgtcctgggtgatgatcttttcgcgttctcgtttcatttggagttctaggggttcggtggggaagggggaggggtcgttgaaggggtcattgtcgtcgtcgtcggcggcgggtctggaatgaggggctgctgggttgggacccccggagtctttggtcattgtgtggattaccatcgataacatcggggcgccgtccttttttgtgaggcggaggttggcgttgtgggagttgatggcggagcggagggctcgttggaggggggcgagggggagctcgaggttgatggtgttggctggttcgttggattggagttggtagttgtcgaagattaggtctgctgagagggagctagatagaggcgttagctagctagtagagggtaaatggggggaaggggggacatacgcccagacttgtgatcccacctctgggatcacggtgaagcggaccgtgtcatcgtcgagacggatccaggcgatcttctcgagggagttcaacgctgcggcgagctctgcgaaacatgttagcaacaacccacataaatggcaatcagcgggcaataatttggtgtggtaatttacttgaaaaagtcctgatgttcttgagatccgtcttgaaccgcattttcaattttcataaatggcacatcacagaaaaaaggtaacacatgtgagatgagatgcaatcaattaagttgtgccgtcgcgtcgtgtcaggtcacaagcttacatccatggtacacacactaaagctagtgcggggtagtacctggggttcctgatctgccccgctatgcttccctagcccccccgcctagataaacccccccgtccagctgtagtctatcgatgacaattaaaaagaaatcagccaaacggcgcccttcgtagaaaaccaaaccagaatccaagttcgttgcaactgtaccctcgcgcctaccaaaaaattccatagatatcccccacatggtcgttcatccgtaacccgtttgtacacaatattgcgctcatgtcatcatacacagtccatcacttcatcccgttatacctcctgtggagcttgtgctttccaccacctctcccatcccgaatccctcgctctggccaggtccggctggccccatagtcccggcacataagggggatactgtggtgcctgccgacgattctctcttctccggcgagggttcagtgcgtcggcaatatatcgaaaaggcctccatagacggctcctcttcaccatgtaccctgcctggaccctcgcctgatcgcaatacccacaactcttccaacccagatcgccgagtgcagttttttgttttgtagtcgccttcctcagctttgagaccgtaccaacgcatggcatagggagcaccgggtgtccgcaggagtggtaggctttctggcggcaaatcgggcatgttggacggttgtctgccacgatgccaagatagtgcttgatgcaatgacttccgaaccggtgtccacaaggtagctcactccatgtttctgtcgtgccttctgggttttctgtgccgactaggtcggtgcagatagggcatgacgcttccgggtctggggtttcaattttcttttccgactcgacaacggttggcccgccttttcggtcgtagaaagctaccattttccccattctgctgtttaggtgaaataacgtctggagcagaagaaaaaaagataataagaggggagagcttttgctgataacagcggcgatttctgtccaagtccaaggcctgcctgtggctatttgcactggcggtacagccccgggtgacattcagatgagttgaaagggggggggggggttgttgggaaggaaggagtcccctttttgctttttgagcagcgttcggcgagaaaataggcgtggagcggagggcggacaaggctgccagcaaaaggcagattggctgggctgagtttctaagcccgaaagaacaacatgagagaaacaagcgcgagcaaaagaaaagaagtggaagaaaaccaggactcttggggacagcacagctgaatgtcaagaagaagaagaagatggagaaagggcagggcaggctgccagaatatattttgcacgctcgatgtgtgaacttcagaaccaaacgacaactggtacccggagctcggcctccctaacttataccatccacatcaaccttaaaaggcatgcgtcgaagcaaacttgacagatgccggcgcgccaatgaaatgacgcagacacatgatcatgacctctccctccacactcttgcctaggctcagcgccggtcccgtctgccaatgggggtcaatcaaagctaacagctcccgtcagctagggctacccaggactcccgcatcaacctgcgtccctgaggcgcctaaattccgacagctagcatctcgacgggctgctttcgtacgatttgtgctttggagattttgagtttctgctacacgtcctggcatcccccagccctaaaacgaagccgttgtttcttcccaggccctcttctgtgccttcaccatgtttgctccttgaggtgagaggacctggcccgcaaggttctttcgagacatgcatcacgggtggggcacctgatggatccacgcgggcatcgaacccacaggccacaggttctctcgaactgcaactctccggcaaatgcagatatgatttgatgtatcgcttttcccgaggttctgggagggtgttgaagaaggtgagctcatgactgcattattctctcttgccagtagctttcgtgcgtggcttcgtgaaatggtcggcatttcttatcaccttatctacatgcttccccccccccttgctgcccacccccgccgaacagccttggcaagacacggccgcttggcaaaaggtgaggaccgaccaccgaccgcaaaacgccacaagaaagtacactgcgcaaacacgaccgttgacaccttgacaccttgacaccttgacagccctgtcaccaaccaccacgtcgcatcacgcatacacgatggattccgctccagcccagtccactgcgctcgttcgcaagcggacagatacagaactgatgccaccacctcctcgagcaaaacgcatcaaacgaccaaagcgagtcctggacgaggatacctacaccgatgccttgtcccacatcatcgcccgcgacttcttccccggcctgcttgagagcgagacccagcaagaatatctcgatgccctggattccaaagatgacgagtggattgcgagtgctggccgccggctccagcaagtagttatgacacctggccgacgacgaaacctcgcgactcctttgcggcagcccttgcagacaacaacgggtcagacacctctgaatttcgtgggtgacacgcctgcctcgatcgcatcatcttcggtaacagccgcgaccaacaaggcaacaaatgtggacaccaacatgtctcttgcagccttccagtcgaaatacacctcggaagacaacgagtccttttacaagctgctcgacagacaaaatcaaaaacacgtcgagaaatacgcctggctatggactggaaacaagctaccttcaaaacaacagcttaaacaaaaggaggtgcaggccaagttgctcgctcaacggggcgcgacgggtctaacagacgatggcttcaaaaaggaccgactcgccataatggatcaggatgcttttgaccgcccggcagcaccagaccaatggaagttcaagccacaaaacgagctcatgttcacgcctgctggcatcgaaggggtggagacggtgtcggaaagaagagaaagggaatcaagaatggatcagaagagggtcgtctacgagaacacaagagtgccgggcccaaatctgaaaatcaccactgaaggtgaagaagataggtctcgggctggatcacctactctatccgaaatccgaaacgccatcgccggcaagagaagagcgtgtgacacggaaactaaagctagcagcgtcgcgggaggggaaacgccaagggtgaacggctatgcttttgttgacgatgaagagccggagccagaaccggtcaggaggtcaaaatcatcaaaggcaccggtcatcaatcttggtccgggggatgcaacacctaatccgttcaaaatccaggaacagcggggacgagaggcgctgcatcatcggatggtggagagaatatcgcaatccaagagaacgagcgcgaggctgggggtgactgggaaggtggagaggacgccggcgcccaagtttcctagtagtcctaaggttggggctccggggcttacacctgctgcgcagaggttgtgggggaagattgggggttctgggagggggaacgagtcgccttttagcgggtcggtgaaggcgactccgagggcggcgacgcccaagctgaagggatcgggcttgaagagtatggggaaatagatggggcggcagcatgggaatgggagtttggcctgtgataccctagagttttccatttgatttgaatgttttgtactagcattttagatagcgacgtggcttgtagtcgggaatgtacaatgtattgcggaatatatgatggtacctttcttgaggtgttccaaacgcgcgtggccatcccgcgcccgccaaaaacagtggggctggttgtgtcccgagtccacggatcactaccggccgctaggcaggggcccccggctcagcttgggacaggggctggatcaacgtcactcccaaatttttgcggctctttccaatttcctcggctccgtgcccacgaaccggccagctccattcggagtttaggaacatccacacagtctacgatatcactcacccagcctcacaatatgagaggtgtatcgcagcacaatatctctcgataacgactttctttttttttctttttttcacaatcgagaattgcgggattaactgcagcgcagaatgaggttagcggacctcctcgtcgacctggccgccgtggccagtgcgtcgaaaagcgtggcggccaagcatgtcgcgctgagggcgaggcaggtggagaggtatgggcagacgtcgactatattgagggatgctcttcttgggaggcagaaggcagcacaaggtcaaaaagaggaaccaccaaatgtggagaggggggatgaggaaaaagcaacaccaccaccaccagccgaaactcaccagcagccagagccgccaaaagaaaaggaggtgtcgggtgccattcccaaggaagcaccaccgccgccgccgccgccggaagagacaacacaacccgctcctaccccagaaaagaaacgcccaacccaagaattcaaaccagccccctgggcagaaggttccatcgcccttttgaagcaggggtttgtcccgcccagaagaccaccaacttccctccccagcattggaaaacagaagatcgacatccctcttctgaaagttgacgagacagaagaggtagatgtcagttctctgtttcacacgtctaaggggtccaaaatcctggaggccttgaagtcgaaggaggacgaaaccaaagaagcggcaggggagtacgtccaggttgctgaggctggcaaaaccgaaaacaaggtggttgaaaaagaagaagagcagccatcaaaggaggttgactcggcgccggcggtgaaagacgtgatatccgaaccgaccaaagaagtcgtggcagagccagtaaaggaagtcgtctccaagcctttgaaggaagccgtttcggaacccatcaaagaagtcgtctccgagcctctggaagaggtcctctcaacccccgaaaaagaagccacagcagaaaccaccccccctcccccatcaccaccaccaccaccacccgcacaatacgaactccgcgagtcccgagtcccctccacccgcctcggccgcctctggaactacggcggcctagcagcaggcatgcttgccggcgcagtcaccgagtccgtctcccgcaccttcaacggctcctcctcctcctcctcttcttcttccgtaatgctctccccatcaaacatgacccgcctagtcagcaaactctcccgcatgcgcggtgcagccctcaagctaggccagatgatgtccttccaggacgcaaaaatgctacccccccctatccaagaggtcttgcaacgtgtccaagacagagcagattacatgccctcctaccagcgcgaccgcgtcctcggtcagagcttgggagagaactggagggagctattcagtgaatttgacgagaaacctattgcagccgcctcgatagggcaggttcaccgcgcggtgttgaaacagtctggggagagggttgcagtcaagattcagttcccgggtgtggcggagagtatcaattctgacttggacaacattgccgtgttgctgaccgcgacaaagctgctcccgaaggggttgtacttggataagacgatcgagaatgcgaggttggagctggggtgggagtgtgattatgagcgggaggcggagtgcgcggagagatacaggcagaacctgctgtcggatgaggtgtttgccgtgccggggatctatcccgaggcgagcgggaggcatgtgctgacgatggagtggatgtctggcaccggagtgacgcgcatcgcaccaaacctgacgcaagaacaaaaagattggatcgggacgcagatcttgaggttgtgtctcagggaaatcacagagttcaaattcatgcagacggacccgaactggacgaatttcttgtacaacccccaggaaaacaagctggagctgttggacttcggggcgtcgagggagtaccctgactcttttatcaagctgtatgtccagcttttggaggcttcgtcacggaatgataaagatgcggtgaaggaattgtcggaggagttggggtacttgactggtcatgaaagcaagcagatgctcgaggcgcacttgacgagcgtgatgacgctcgcggaaccgttcatggagacggcgccggaggtgtacgattttagggatcagacgattacggaaagagtaaaagcgcagattggggtcatgatacatgagcggttggcgccgccgcccgaggagacgtattcgttgcatcggaagctgtcgggcgcgtttttgctgtgtgcgaggttgggtagcagggtgaggtgtagggagttgttccaggacgctctggaaaagtcggggtataagaaggactgatggacatgtgtaagatcgtgtaagatgagttgtttaaatcatgcagaaagcgtcaaggcaagctgtgtcgtgtcttgggtagaatacacctggagagcatgtctgctagaggagatcattatcataccaaccccctccacgaataatcacaactacatccggcatcgagacaagtaaacgtgccctagcgcttactatagctatgtctgacttaatgatattatagttggaatgttaatagtaacgaccaacgaaccgactaataaacgacccgctcaccgtcactatcaaccaaccattccaaccacctacaaacctctacccttcccaactcgtgccccataaccccccaaacaaatcaccgatcctccaccgtcctccgagcccaaggcagcaacttcttctccttacccgccaccttcttcctcctcctctcaatcgccctatccacctgccccttcttcatccccttgaacgtctccaccaccaccctcttcttctgctcgctcctcttcagatagaaaggattcttcccctgcctcaccagctccttctccttcttcttgtgctcatccagcaccttttgcgccttgtccttcctctcctgcgccttcttcttgctctccatcgacagcaacgccttctgcagcttctccttctcctccgcgttcttgctcttcttgatcgccacccgaagctcctgcatctccttctcgcggtactcatccaaaaaagcgtacgcttttcgggctttgatctcgtctattttcgacgtggccgacatggtggagggcgcaaagaagcgggggtcgcgatgctggggtttggtcgatgttgggtcgaggaggaagtcacggcggcgggagacctggcgttttgacgacaactcgacaggggcgtgtttgcttgtgcgggagggcttttccaggggtttcttgtgattcttctcaagagaaaacttgttgtcgttgttgctgttatcccgagagctggacgcttcggaagcggcgctgctggagcggcgcttgcgcttgttgagcttgtcgcctagggctgcttgggctttggcgagggcgccaaaggagagctggtgggtgggttggggggtgtcatcttccgattcatcctcgccgtcttcggggtctgagccgagttcggagttttcctgggaagattttgttagcattttgttctgaaagtgaaaatatggcgagttgcaaacctcatcgctgccgcttctcatctcagcctcactcatctcctcgtcttcactgtcaaacccggcaccctcctcacttggcgcatcgctcatctcctcgacatctgattcaggctccggctcatacctggggcgaacccgcctctgcaggagagtggcaggcggctgcttgcgtttgacggatgacatggtggtttatgagtgacgcttgtttgcaaagtatcggcaggagtgatgagcgtgaatgagaataactgagtcaggcagtgagattctgtgtcgctcgtttagattgtttgacggtgtgtagtgtcggtgccgtgttgggtggttgatgagatttcgcgatagaaggcgaaccttgattgatgccttgtcgttgaccagttggaaaaaaatgttggagagcaagcgacgtgctgcactaacaaaaacgggtggaaagtatggtggtaactgtttacaccgtacatagacccacttttcgcggatggctatgttctttatagcagtatggcaacagccatcagttcaacggagcaggatacaagaaattcacaggtaattcgaagttccacaggctcaatagcctacaagaatatttatattcataccatccgcatacagccccaaatcaagtcatcgtcttcatcaagtgcaagcaacaaactctggtatcattctccctaacaaaatcaccacccaaacgccattcccatgatcgctatgacatcaaacctaacagaccgcccattcatgacataaactgtacaaatccgctccccaagccttaaaaccgcggccttttactaggagcatcaccgccactgcccctcgactcccgcgctctcttcctctcaagctcctccatcatgatcctctccccagcactcatcttcttcggctgcgcaaccatgaccttcttgggcgccccagcaagcgcgttcctgaacacattcttcgccgccggtggcttaaccccaaacttcaacgacaccttcgccggtggtgccgccgccgccgccccctcagcaggcttaccctccccctcctttaactccccctccttcatnnnnnnnnnnnnnnnnnnnnnnnnnnnnnnnnnnnnnnnnnnnnnnnnnnnnnnnnnnnnnnnnnnnnnnnnnnnnnnnnnnnnnnnnnnnnnnnnnnnnnnnnnnnnnnnnnnnnnnnnnnnnnnnnnnnnnnnnnnnnnnnnnnnnnnaacacccccctctcctccgcctccctcctagcccgttcaatctgccccctcaaaacagccatctccctctcctcatcccccttgtccatcatctccctcctcctaaccgcctccctcctcctcatcgcctcaggactgtcatccacccaagcaataaacaacccatcctccttctccacaaccctacaaatcccctcccgcccaatgtacttcacaaactccgtcaagctatgccacctcgtcgcattcaaatgaacatgatccttctttgcaatcacctcctgatagaatttattcgcgtgaatctccttttctccatggctcgtcttgagaagggagataaactcttgttggaacgcacgggagtaatcgtcggtgacttgcttgatgttttgccctacagacagcgcgcgccgggtgtgcgattcggactggcagtgcatcttgaaggcgttctcgtctctgcaggctttttcgcagatttggcagaaccagcggaggcgcgtgaggcctttttgcttcatcttgttggagaggtatttggttgagccgacttctgctttgcccatggttgatgaagaagggggaactcgctgcgcgcgagccgagcggaggtagaagggtaggtgggtggtttaaatgacgggaatggtcgtcgcgattatttgacgagggtcgaggactcgaggtttggtgggtgatgcgaaagtcgagtttgcgacaggttttgggaagcgtggaagtttgaaaggcgtgaatgcgagggggaagcaaagtcgcccccacaaggctgattgattaactggctggcctgaaaggctcggcgccggagctctttcacaaaccctaacccgattttgatcaagcaagagggcagaacagttactaaatgatgctcgcaatattcacacatagacacccggtttatccaaaaccttccatgtatgattccttttaaacatatgctgtaataatcccttcgaagtccactccctcccttccgcacgcctaccaggcgcctccctgtctctcatctacagccccttcccaaggtatcacctcttgctctatcgcactaatcatctcttaaagcaaacgccatgctttcttgcctcaaattatcaacccccgctctatcatctctaaccccagcacccccaatcaatcaagtgcgtgttcctgtcttcaccattgccgcccatgttagctcctctgtccctttctcggaaagagcaaaactgcaaggttgcttatcggtttagttcccatactcaaggaaagtaaacaagctcgtgtgcaggatattcatggccctctcagcatcccgcgattctatcacgcacgagatgttgatctcgctggcacctatacatagttcaatcagtcagcatatgatatgtcccacaagtgcccttgcactctgaaggcaaaacataccctgagaaatcatctcgatattgatcgaattctcacccaacgtcgaaaacatcttgcccgcaatacccctcatgttcttcatctcggcccccaccagactcaaaatcgtcatgttgtgaatcaccgtcacatcgccgcactccctcagctcctccacagcctggttcaggctgtcatactcggagctgccgttatgtaccgcaatggaaacatgcacctcgctcgtggagatcaaatccaccgagatacgcctctggttgaggatggaaaacaccctcgccaaaaaggcgtgggcaatcgacctcttgttcgagtggatgttgaggatcgagatcttgtccttgaccgtcacggcagtaggacgcttcggcttcttgcgggccgatgggtcggatggtttcctcggccgttggatctgctggtcggcggccagggtagggtctggcttgacgatggtgccttcgccgcgggggttcttgacgttcttgattctgatggggattgggggctgggccttgatcacttggtccatggtcaagtggtggatgacttcggagccgtaaaaggtcaactcggcggcctcggctggggtgatggaagggatgagtctggcggtggggaccttggtagggtcggcggtgaagatgccatcaacttccttccagatctgaagctcatcagccctgaggccgacagcagccagggaagcgcagagatccgtgtagccacggccgatgtcaccatccaaaagacttccagggacgttaccgaagaagccagtgacgactggtacacggtcctcacacgcaaggatcttcttggcaatgacggcggtgacttgacggtaaaagccggcatcgagccgccctgggctgtcaaggtgtagtacgtcagccaagtcaacatactcggcatcgactccctatgtcgtgtcagtattgttcaccggcgcaacctatccctcaacaaaacttaccctgtccttgagcagataagtcataaacctacagctcagcttctcaccaaagctcaccaccctgtccttcgccctcgagttgatctccaaattgaagcgcttagcagccaagagatactcattgagcaagtggcagtccttctccgtatacttcttcacggccacgctcagctccgcatccttgataaaagtctcggccgcatccacatgatcatccagtatgtcctgaacaatgcgcttggcctcctccagtagcacatcctgtgactcctcatcaccagccgaggcaacaatagccctaagctttttgtacacctccaataacctatccgcgcaacaaacaagcacgttgtcagtccatcaggtaaactttcaggtaacaacaacgtggggcgtgccgatccgggtgtgtgtgtgatgtgtgggggagaggggtcaaggaaaagaacacggggaatgcgggatacccccaaaagggcatgggaatttccaacattcagacacatacatgtctctccccaaacctgcacattctcccccgtcccgcactctcacaagcggtctctcccgaaaattgacacccccaacccataccccataccccataccccatactcgacaggaaaaaaaatcaaaaatcaaaaactcacctgctcgtggtccccgtcaccttcttccccgtgctcctcgccgagcacaccaccaccagccgattattctccacatgcgtcctgatgatatcctccgcaatcctatcaggaaacttgcccacgctcgtgccaccaaacttttgcaccacccacccgttcgtgctggtgtttttcagtagcgcttggaccattttgtcgttgtgtttctagtgtaccggcaggcaaaaaaaatattgcttcttccgctttgctgacccttgctagtgagggtgactcaaaaagaccgttggtttttggcggggtattcctcaaaaatgaagaggataaataaaacgtcgagtgagaaaccgatgaaacggtctatatatctcaactcaactcaattctctctcggctgtgtctcaacaagaccgggaagaaggataccaccaaaaagcgcaatggctccaatggctaggctgaggaaagatatttgaatgctgaagagggtgagtgatgactcttctcttgtcccctggtcctgagtgaagtggggaggtgtgtaatctttaaatatcaacagttagcgcattggatgccatatataaaaaattcaataaaagaaaagaaccctccccccccccccccggggcacgcccggctgctgctgtctgtcctgaagaggtgagtgagaacgtgcagttcctcgtggggcttcgggtgagacacatatgcccactacctactacagtcacatgctgcgcggcgggaggggattggaattggtaggttcgggcaagtggaagtatccagatgttttcgtgctcgtgcaatgcgggatatgaccaaccacctcgtgaaaatgaaaatgaaggggtaggtgaggtgcaagtaccttttttatgtggtgtatatactgacaccccaaaggtccaggcgcaggtgccgtaggtgtaggtaggtgggcgggcaaaatcctcgtccagtagtagcaattggttttcaatgcagttgttgaaaaaaataaagccacactcccaaaagaaagcggtataacctctcggtctagacaaccggaagggatgtttcgccttaacaacctgggcgagggctccgcataaaaaaccggagagagagtgagatatcggagatggaggggtggtggtagtaagaaaaaaagaactaagaagcggatgactcctccgttcaacacaagcaatcaagcccccggtcctggttctccaaactgtaacaaggaagagagagagagagagaagaaaaatgtgtgtgtgtgtgtgtgagagagagaggagacacaaaggccgatccggtaaaaaatcccccaaggtaatcgagcaacaacccacacacccccaatccgaccgagtcacaactgacaacaacccgggaaggggaagggaagggatatcggatgctcgttaccgcgccggtacaggcgtccggggaccgctgcgcttgttagagaccgcctacttcggaggcagggttttcgcgactttgctgtcattcatcagaaactcgctgctggagtacctaggagtgtggggcccgcccgcccgcctgtggtggggtcctgtctgaagtttcgcgaaccgccacgctggagtgcatgtgagatttcgacaaggagaaatcgagttcctggccacttgcaggccacttgttcgtgggtctcggtggatatgaatcggggttgttgctgttcaagtctgcatctgacgtagtaatggcccttgaacgtgaacatcacggtcatatttggaaggatacacacacggacgggaacatattcagagagtagaacaatttcaaaaagctctttcaaaatcgccacaaaatcacgccttcgggaggcaacaatgccttccacccaggcaatcaacaccacctaatatacaattgttctctcctcttcctctcaagcaaaaaaaaaatgatcttttggtctaaaagagctaggtatatccgtatatgcccccttttcgccaaatttttgaacaccttttccctttttctgtctctgtttcccatgtatcgagtggagatttccgctcaccctgaatcccgaatgatgtatacacattaatccataaatgcaaccacatctttcctgtatatagacagacgcctctacccatatatgaatatgcaaattccgcggtggttaggtcccgtctttcatatgcgacgggcacacgcgaacaatcggcttctccgttctctcaaggagctcagatatctgggtccatttaggtgatcgcacaccagtcaccgatcgagcaacccgttaaccttgagcatatcgtaaagaggatgtctcctcccagatatccctggttcatttaccgcttcttctcctcaacctccttaacctcctcagaatgctcatcatactcttcttcctccaagtcctcctcaatctcctcagcctcggtaatacgaggactggccgacgtggggacatcagcaccagacatttgccactccataagcttgctgaaagcgctgttggggttgttgctcagctcagtgtagctgccaatttcggccacggtgccttcgctggacagaacaatgatcttgtccgaccgtttgatggtggagagtctgtgggcaatcgagatggtggtgctgcgtcccttgagcaattcagcaagggcagagttgacgagagtctcggattcggcgtcaagtgccgaggtcgcctcatccaggagcaaaatatcgggatccttgaggagagcgcgagcaatggcgatgcgttgcttctgcccacccgagagctgggctccacgggcaccaacctgcgtttccaagccatcagggaagtcgctgatgaaaccgcagttggccttttgagcagccgcaatgatctcccatctcttagcttcgggccgtccatacgagatattctcggcaatggtacccgaaaagagcacgggctcctgtgcgaccatgccgatgcgtcgcctaagcgatttgacgttcattgtcgaaatatcgacgccattgatagtgatagtgcctgacgttgggttgtagaagcgaagcaacatggaggctacagtcgacttgccaccgccggaaggaccaacaatacagatattgctgccagaaggaatctcgaaatcaaggccgttgaagatagccaccgccggtctcgtggggtaagcgaagtggacgttggagaacttgatagggccctgcgccgacttgactttcgtacccacagtttggtgaatgctgggctttcggtcctggagctcaaaaagacgactagcagcaccaacacctttcatcagttccgagtagaagccgctgacaccgaacaaactggaccctgcaaagacggtgtacatcataaaagacgtcaagtcgcccaatgtcatggccccagtccgaacaaggttgcctcccacaatgagcatggccaggatagtcatgttgcccgcccaactggtagaagcgaagaatgtgccagaaatgatagcatcccgtctgccgagcgcaaagatcttcttgacctgcttgctgtaccgtccaatctcttgaacctcgccggcaaaagcctggctcgtcttgatgttgcccaacctttcctctgcaatcttcataagcgtgccgacattcttttgaatctgtcgactgaggttgcgaatcgaacggccgtacaagacagcgccgataccgataggagggaccataacaaggataatagacgtcagcttcgggcttagccaagccatggcgacaaacccagcagcaccgctaaccaaagatcgaagaccatccgagacgttctgcgtgatactcttgccgacaatgaccgtatccgagttgagcctcgagatcaagtcaccgacccggttggcatcaaagaactcggcatcctgaacatacgtcctccggtaaagctgcgtcctcaacctagccacaacgcgctcgccaacaattctgagcagaataatccgcccaaagttggcagtcgcaccaatggtaagcacagcagcaagtccgcaaaagaactgtgtcagagtaagcccaaatagcctaacctcgtcgacatcttccttggtggagagatccagaatacggcccacggagaagggaatcgacatggtgacactggaagaaatgagcagcaggacaaaggccacgcccagccatctgagctcaggccgggcgatcttgatcagacgccagacctcagcccagccaggcttgccttcctgacctttcccttccttggacaagcgcgccgccatgttgatgtgcgcagccttggccgcctttgcgctcttttggaatccatgcgccttgaggtgctggtccacctcttcctccttttcctcttgttcctcttgtgttgaagactgctggtcctttttggcaacagcctgctctgggtttggtggtgacgtagataaccggcgaagaatgttgatcggcgacgtccatgttggctgggcaagcctaggtcgtagtccgagtgatgattgtggtgaacatgttggtgttgctgccgcgggggtcctccccgctcccacgcgggaggagaagtggcggcagggttggagctttgcgggagctgcggccgaggatggcctcagcgtctggaacgcatcccgggataatataagcgacgctggtgatggtgaaggtgcgagtaagggcgcatttgcatagcatatcccgcctgcacataatgtgcgttgcgggagcagagccgcgcggcgaaaagcagccgctgcgaccgcccccgaaaccatgacgagtgctttctaagctcgagctggctgtatgagagaattccaagtcgtcgttggggtggaagtgggcctcgctatctcgagaagatccaatattcgggggttgtcatgtcgaccaggcgcaggccgtagtgtgcgcagttgtcggcctcagggcgcgtcgacttccatgtgaatcacggagcaatgggggagcggaagtgaatggaagaaaaatcgcggctcggatggatgaggttcggtcgcagtaccggctgccaaatgggatccctgtcgataaattgctgggcatcgggattccgtcatcctaatcgccgaggcggcaagcgtggggtccactgtgcggtttgagcctgaacgggccggatgcggtttttcttcgtggcttcccggtgcctgccaggtggcaggtgcaattgctcttggcatcatttagtgtagacatatgaccaaacttaatcccaagcactacctacataagagcctacgagcctagtcgatgccagtgaagcgtaatgcctccgcttgatcgctatataatacagcaacaaaactatacaccttgaaaagtcctgattcggagaaaagaggaacctcggaggaaagcctcaactccagttcaaattccaaaaacatttgaacataaattgccgtcatctctcaaagtgattttgggagagaatcaaggtcaaggtagagtggttttggttttggttgtgcttgcgggcggtttttcccgtcttgccatgcgcagtcgcttaaaagagagaatatttgcccctgaataagagcaagttgcgcatcaaatctacacctttatatgccaccacatgttgtacatgcgcagaaacggcaaatttatatttcacaagataacagatacgcaactcacgtaacaggaagtaaaccttcaagataccgttcaaccgggtatcatttttatgctttttctatatcccacctatctatcattatttatatcttaaaaacccttttcgccaccctctcttccatccctcccttgtctccgtttacttcgtcctcaccaccgtcgtcccctccgccggctccagcaccttccagctgcacgtaatcttgttctcctcaaacttcttgatgatcctgctggcaatctcctcaaagttgctcgtcgccaacgccagaatcgtcggcccggcaccagacaagcaaacgcccaacagccccggctgcgtagcaggcgtcatgctctccacaatctccgtcagccccggaatgagcgtctgcctgtacggctggtgcaacttatcctgcatagcaagatagatcagctccggatcaggcgggctctggcccagcgcaaccggcaaaagcgctatcctctggaggttgaatgtctgtttcccataaaaatcagcatcacttgaccccccactgtcccttcctcacccatccagaaaacggaaaaaaaaaaaaaaaaaaaaaaaaaaaaaacttaccacatcgttcctaggatactccgccggcaaaacctgcctcgccttcgccgtaggcacctcaaactcgggaatgatggccacagccttgatctcccccgcccaagggaacttgatatggtgcccaatccccaccggcggctcaggaggtctatcccccgtgtcaactcccccctgcggcgcaggcaacacctcactgagcgggatctccaccctcgccgtgtcctcgggcgtcaacggcttcaggtaagtccccacaaacccgccaaacaacgaagccccaacattgtcaggatgtctctctgacccgtatatcagcaaccgtttccccaaatcatcccaaaaagactcaccaatcatcaaaataaaatcaaacaacctctccatggtcaaatggtgcaacccgcccacctccttccccaacatcacccccgccacaaccgccgtcccgctcgacccaagccccctccccaacggaatagggttcttgacatggacgtgcgtgttcttgggaaaggccctctggtcgtgacaccggagcacgtacagcgccaccctcgtgatgagattcacctccgggtcgagggaaatctcatcctccccttccccttcgtatgtgatcttgcagttgagggggtaattctctgttgaagatgcaggtgggtcgacagtgacgtgcagctccaggaacattgacagggcgaggccgatgacgtcgaagcccgggccgatattggcggaggagcaaggggatctgatgacaaaagattgggaggccatgcttgctggttgaggagagaagaaggggtgttacaaaggggtcgtgatgtcgggaagagccgctcccgtcgtgtgtgtgtcactctctcacagccaaaacgtgtgagtgatctgtgtaacacctggtgaatgagtcgaaatatttttgttggagaaccatctgcccgcgcatccacatccacccaccgggtcaacccccgatcacggagtgtggggtcgcagcccacccctccagggcctgagcgccgccagcttggctgaagatgccccgggccgcttgtaaccgctgcaacctacgcagtacattcacctgatactaaattaaattcacaatgatcaacagtatcatgccaaaaacactgcttgtattgcataataaactaatcctaccaaaacgttgcagcaaacaaggggcccgaatgtgttccttcatccatcacccacagaagacgattcagccatcctatcatctcacctcttacgataaatctgtccagcagccagaataataacaactcaactagcaatcagaagggcagacgaaggcagaattggcgatgcagaccgacttcttggcagggctcttgtcgagcgtgcaaatcaccttctgcgcaccatcaccgtccttggatggctcgggagccttctgctccttctcgatcttgggaacggcaccaaagcgcgagttgccctggtcccaaatagcgtagatggacttcaagaacgtgtctccaagaatatcaaacggcatggaaccgcgcgactggacaccgccgtaataattgctctcatcggcttccgcaaaaatgagatcctctttctggatgacaaactctctcccaccgacagccacgctaaactctggaagactgtcaaccttgatagacttggggatgagatagccctggtacttctcgctgtaggcagctccgtcgatcttcttgtacagagcgtcacaagcctcgtctgagatgagcgcgagggtagtgccagtgtcagcaatggccttgttgtcagacagttcgatcttgtcaccatcaacgctggcactcgtgctgtcgaacatccagaaaccctgagagttgtccaccttggcccaggtgatctcctctccgcatttcttgaccagatcttgatcgatccagccaaaggtatagaaagactcgggcttgagatcacgagagctataaaaggccgatgtgaatagctcggcttccttggggatatcctcctgctcaatcatgttgtcgactggggttggctgaggatcgcggatgcccatggtcgagtgtacagtgttgatctgcttgaaagccagtccaaggagaccgcccatgacgccctggctgaattgagaggacacatgcttggccacctcaaccgcttgtttcttgatgacgaggccaccaatggagatggtatcctggccaacaaagccggacgcagagctgccatcaccgtactcaatcttccagcttttgttgtgcataggtgcgaaggtgctggactgatcgttcttgaaagcatccggacgaacctgtgttggtaactgtcagcaggccatagcaatctgaaggggagacgttgtagcaacatacccagaggtcggcagagccagtgtcaaagtccaacaggactttctgaggaggggtaccgatcaacacctcgcaaaggtactccatgtcaccttgttggtcttgggccccaacctctcccggcttgttgtctcccgtcttctcaacgagagaggtccacatgtcgcgtatggcccccacggcaaacttgccagaggtccagttggtgctcgggtcgcggatcttgccggaagtaagagggcctggcttggtgggctggaggccatagcggttgatggcagaagcgtaggccttggtgccatggcgctggaacttgctgttggggatggccttgactttgtgcaggccgagctcggcgcggagcttggactgggcaatgaagatggactccatgatgttgtgttggtggtgtgggttttggtagttgggagagtcttgggtgtagttggtggtgagtagagaaaggagaagcagttgttgaaggctgagggtagtggtgttgctaaagtaggatggtattgtcataggaaatcaagtaggaaatgaatgggaaaaccgaagagggagttcgtttgcttaaataagactcatgctgtcatgtgtgactgggttgatgtctggatggaaagagcgaggtgaccttccccgcgcggaggagctcacacatgatggctgccttggtaccagccgtcaatttccgttgtcgctctttcctctccataatggctatgttgataacgcgcgcaaaccgcagtcgtgtgtgactcaaatcgcagaagcattacgtcgacagcaggaagggcgcaatgacagagcattgtcatcggtcggctggttttaacggccgagactggtgttgacaagtgttatctgaagcagagccgcggtgagccgtggtgttaccagttccatggtgtttaccatgtgacaaaaggtgcgactgcttgttttgaccggttgataccaagattgtttgccttgtcgcagagcctgttcatgagccatcccgataagccagtcaactatatttctccagcaaaacccgcccagcctcccataagccttacacgaacctctgtcgcggatttcctatcacggtagactcaacatactgctatggtcgacgtaggccgcctcatgatgccacaggtgacagaattggcttgccacgcgtttgacgtggctagagaatcatctcatgggttcagttttacccgcccaagtatgaaccctctaactccggtgctcagccagcatttttctccatcaaccagagactgagctaaaacaacctcctcaacaacaagtcccctacccaaacccgttagtacatcgccccatatcaatcatccccttcttagaaacatacctctccagagcccacctcctggtggtaccatcctgcccaccatgccattctttatcagtctccttattcacgaacggtgtgacccatttcccatcccgaaagaaataaggcgtgctaatcgacccctccattaccgacccatccttgctatccataatcaagacttccctggaaatcgtgggtgacgtgataccggcccgttgcctcgcctcctcgtatacttgtctctggctggtcttgtaatgtgtgaactctgatggattgacgttgtctgttgtgtcgactaccacttcgaacacactgcccgagtacaagtccagtgtaggggggtctagtgttgttggaaagagtcttgagagggggactgatgggacgggagcggacgtcactgttagtttcccgttctggaaaatgtccacccttactcgggctggctggtctttttgagcgagatgagctgtgatattatccgccaaaagttgaagtccagcgtcaccagtgagagaagagatgacagagtcccatttccaatgatgagctgcgcgaagcatgcggtcgcggtggtagtctagcatgtaaaagggagaggagtggccatggttccagcttgcgtgggtgaagtctgggtgggagtgaacttggaggagggcagggtcgtaacgaagagaagtaaagatctgaaaatcggacgatgccattttgaatcaagaattgaacaaagtgttgagctatctcccaaaatcaagcggtaatttgattacttcctgatactgccaaaaagcgtcccctcctaaattgcccctgagggttactgtggggacccgcagaagctgggcgttctgtgttgacacaagacaaagtattggtgcctcaggttgcaatgctgcttctgcttggtgttggtgggggtggagcttggaccttgattagcaaagagtgaagtcaccgttttcttatcggtggcaggaggcaagtccaaaaggtgtgccaggtcaggttccggaaaaaccgcgtggtggagcaggttgcagcagttgcaattggcgggccgcgctggaccgattttttttgatcaagcttccatggcttgctgtcggctgctcagttgctgggagagacgtcaaggctttgcttcgcaggatattcacaaataatctgcatcaccaacccggccgtccacccacacccagtccagtgttgagtggcttgttatctcactttttttatcgtcccttcccagtcttgaccacccgtatcatctttctccggctgagcccttcactaagcgctccctgcacccaaaagagccatggctcccacgattgcttcaggccccgcggggaccactgtaacagtgccgggcaattcatcgctgtgggaccgcatctccaactgggcctctgagaacaaaggcctcgtctataccattgctggtgtcgccgtagtggtcaccggtgccggtgttgtttactatatccgcaagggtcctgatgaagtgagcagaagcacccaccctgtcgtcaaccccatcatacccctcgtcgccgccgttatcgtcgtcgtcatcgtcgcctaccgggatactgaccctttgttctcttttctaggagtctgtcccaaagcccagcaagaaggagaggcggaaacggaaacaggccgagaaggaagccgagaagggcgctgccgccgagaagcaagcagaaacctccaagaccgccacagtagagaccgccgatgagctgccagaaattgacgaggccagtgtcatcggcctatccgaatcccaacgcaaggagtatgccgctaagcttaaggaggctggtaacaaggcctacaaccagaaggatttcaacaaggccattgagctttactcgaaagccatcctttgcaagccagacccagtttactactgcaaccgcgctgcctgccacaacgccctgagcgaatgggaaaaggttgttgaggacaccaccgccgctcttgccttcgacaatgagtacatcaaggccctcaaccgccgctcgaatgcttacgaccacctcggcaagtacagcgaagctctcctcgacatcaccgccagctgtatcatcgatggtttcaggaacgagcagagtgcgcaggccgtcgagcgtcttctgaagaagtttgccgagaccaaggcgaaggaaatcctcgaaaccaagcccgccagactgcccagcgcgacctttgtgggcaactatcttcaaagcttcagggccaagccaaggccagcggggttggaggatgacgccgaattggacgaggagactggaaagggccagctgcaaaagggtctgaaggcgatggaaagcaagattgcgccatcgtacgaggaggctgccgaggctttcgagaaggctctgactctgggagacctcggtgaatacgaggcttacgctcacaaccttcgcggtacattccaatgcctcaaaggcaagcatcaggaggctttggccgatctgtccaagagtatcgagcttgatcccgggctcacccagagttatatcaagcgggccagcatgaatctggagctcggtgccccagacaaggctgaggaggatttcgaagccgccctcgccaagaacccagaagacccggatatttactaccaccgcgcccagcttcatttcatcaagggcgagttcgccgatgcgcagaaggattaccaaaagtcgatcgatttggaccccgatttcatcttctctcacatccaactcggtgtgacccagtacaagctcggttccatcgcttcatccatggcgaccttcaggcggtgcatcaagaacttccccaagatcccagacgtctacaactactatggtgaacttcttctggaccagaccaagttcagcgaagctatcgagaaattcgacactgccattgagctggaaaaggagaccaagcccatgtcgatgaatgtgctgcctttgatcaacaagtctcttgccctcttccaatggaagcaggacttcagcgaggctgagaagctctgcgagaaggccctcatcagtaagtggttgcacattttcacatatcttctttgttgtttgctaacatggaatttcgtagttgaccccgagtgcgatatcgccgttgccaccatggcacaattgcttctccaacagggccgcgtgaccgaggccctcaagtactttgagcgtgctgctgaacttgccagaacagagggagagcttgtcagcgccatctcatatgccgaggccacgagaacccagatccaagtgcaggagaagtatcccgacttggctagcaagctgtcgggcatgggcggcggtgtggtccgatagaaggctgtgtgggtgtggggaagccggacaggagcacagatgcgaagaatgctatttcgttgggtggtgatatgaccgtcctgcgatctcaaaattgaaccgtgatgaatggtataccccgtcaaaacgcgcgccgcaactggagtctgaaccgtttttccaaacatgtatcatgagcagtccatggtgttttttgtatttttcttgttcatctcatacatctgtatgactgcatgcttggggagagggtgggtaatatctgtgtacgatgacgggagagaaagactggggaaagaaacaaaccagcgggtcgtcccgcaacgaaaaccacgccactctattacgcaacccatggaggaatgaacatctccttttttcatggtcatgattcttgtttttattcttgtttgtcattataggtgtgggagtgttttgtttttggctgggtgggaaagggggtgagggtgagggtgaggttggtgggaagtatacaagtacattactcttgtttgtttacatatgtagctttgggagaagcgctcaatgagaatcgatcaaaaagcggtataagaaaaaggttgaactctttgctttttgtgttgtgtcaagggatcccaaataacccaggcaccctgcccacaacaaattaatacacacaaataggatagcccccatattatgttgcaaactacaccttgcgggataaccaatagtctttgaattatagttaatagcccttcaaaagtgttcagaaggcccattaatttaccttcgatgcatggtttacaacatcatatgggccaaccaacctacttgtgtctatcagctattttgtggtgagggagccagggatgaaaggattgcgcaacgtccaaaggggtgagcgaagggaacaaaaaaaaagacatgaattaatccgtatgtactctgtacttttgtacatgctacatagtggtttactcaaaaagaattaacaacgcgcgtgagcctcctccccaataaaaaaaaaccaaaaaagaacaagaaaaactaccatcttctcttatacctagactgagaagaagaaggaaagaaacccctgatttcccgctcccggccaatgacggacccatcatcattagcagcatgttccatcaaaaacccgtcattaagtcccgcctaacatcaatcaccagctaccaccaccaaaccagggtcctgtttttgcgttgctacacgtcccccccccaaccctattgggagtctattataatgatcttgtaaatcaacatttccaccgcccacgcccttcgctcatacaacatcaacagattgcatgttgaaaacgctctgctccactctttcgcattacgccttttctcctcgacaaaacaggcgccaaaaagtgccaaacacaacccagtcaatcagcgcttccgcaaacgcggattctaacattggcatgcttattgagcgggagggttgttcttttggacaacagaaacaccgacaccaacacccacagcgatgatgatcaggatcaagatggtaatacccaagcaccaccacttgagctttctccggttgcgagcgctcttgacagcagtctggatctgggtgttggcattgccgaggtggtccgtcgtctgctcggccttttgagccacatcctcgatgatggcgctctgctggacgatcagctggttgaggatgtcgagaaggtcgacaaggtcgttgatggactgttcaatcttcatcatgtcgttgtggcgagcgcggacattgccgagaacttccgaggcgcggccagagcggttggagcggagggcagtctggaagataccctcgtcaccccagttggcatcagcggcttgctgcagctcggcttcggtggcgttctcgttgacgattctgtactggcgcatgatctgctcgcggcagcgctgtctgtaggcttgctcctcctgcaagaacttttggatggtgtccttgaaatcattgttgagactgtcgaactggcgcttcttcagggaaaaggtgccgtgctcggctgtcgtccgctccgtatccgtcttcaaagactggatctggtccttgatggccgtgttcttgagttgcgatttggcgacctcggcgtcgagctcggcctgagcatggccgtcggtgctggacaaggcagcatggtgaagagattcgactctgcggataatctgggtcaagccttgaatttcctggcgaatggccgacacgcgctcgaggaattggttttgggtgaggacggtagctgatgagccgtactgttgctgaggagggtcatatggttgctgttgtggcgcgccgtagggttgttgtccgtaagattgtccaccgtagggttgtccatactgctgtccatatgattgcatctcatgttgttcctgtcgacggaaagcgacgagttagcatgtcaaacccatgaatagtagtgcgcgcgcttggcggtgaccgcaaaaagagcatccgtgcctctatgaaaacaaggcatatgactttcggcactgtccggcccatccgcacctgataccgcgacgcgattcagagaaatactcacaggttgtccatatccaccgccatatccagcttcggccgaggggccctggttataaggattgtacgacattgtagctgacgcaattgcaccgctttctgttcaattgatgtgttttgtcctggtctcgtcgaaggttgctgtaatgatatctgtcgggatcaatgcgatggcgcgctccgtcgttgttcaacttgcttccttgaaaattgactggaaggaagaagtggtaactggttgttggtggtttgtgaaggctcggattgatccaatctccccagcttgcgctgccttggccctctcccgtccagtgcctgcacgttgctggccggttgacgagcacccgagtggtccgttcaggtgtggctgatggctttttgtcgctgcacctggtctccactttgacggttgatggacccgcaaatttcccttttctctctcagttttcaggacgaggtccaagccgccgcccataccaaaccctttttggttaagatgatgaaccctgcgagtcttagccccgtgcttacgaggcctgcagcgcgaggcagtgacttttttttttggttcttcttgttaggggtcttttcagggcacgagacctaggatcggtgaatataaacgtactgcatagaagacgatgttggagagcttggtttggaaaggagctcatgtacgtaaggcacggagtacttgagccccttttgtcacaagacgaagctgcttagctgaagcttcgtcgtggagatagcggagtcgagctcttctgtgtgttctggaccatcccgataaagcggtcaaaacaaggaaggtataccagctcacttctgttctcggcaaccgttggatatcgtttgtggaatggcaaggcaacctccgagacgggcagcgtgagagcttcgagctcctttaatgacaactggtagaaagtcctgggcctggaaattgttccggtccatttatctgttgatacttgctcattgaactcccataatctgcagcattgtctcatcgccagccgtgttaagcaattatacccggatacctactaggcacttgccctcagaaataacatgtcgctgtccagctcctcggaatcatatgcaacggcggcaaacttgatggcgtcacctgcagcgaggctgagactgatctgcatgtctccccacaattggttgaaatggtccactatcgcagctctggctttccgttttttagatggcagtcaccgggcactgaaacaaaagcgagtgacccaacgtcttactatgaagcttcacatttaaaaccgagccttgtatgtgctggatcgcccccagcacactgcccttgaaccccttggttatataagcaacccgatttttcccttccattaaacgccctgtcgccattactcctgcatccacccacttctttgcaccgattctgcgtccaccaacatctggggtttccgtattgcgctgagcccgtgtctcgccatagagggatatccccctcccacccaagcgcctacttgtcgacgcagctcttcgtggtctgccagatgtcctctagctggcctgaccgcgcttcttcatacgggcggttgatcacctttcaccgtcccttcacttaaaaaccaggccaaaagtaaccctatgccgctcagaagtagttcttctttctgctggtgcgagtatactggcttaggtgccattcgctatcggcatccttgttctcgagtgttcccatggtgatggagaatggtcgcatagtgaaccgtgggccaacctcggaaagttcgactgagtcgtaacttgtcctcacatacacgtgatgacggacctcgatgcagtcgtcttggttcacgaaagtaataactctgttgcctgcggctttgctggcagtaacgtctcgtggcgggaacaaatgcttcaggatcttgacaattctcagacccagttttgttgtaaagccgtcgaaaatgaggtgcgggtaggattctgataccgttcccttgatcgaccttggaatatcggctctgagtacaacattgtgaagggaagccatcaatgtcgggccgtgggggaaatggctgatggtcatggccgtgggtgtaccactatgtcgggttagaagacattcaattaaagccagtatacataactcaccgatgttcgtgcagcaaaatcacatcactgagcttctcggcttgcgctgagcggaccagttctggcagcaccaaattaccacgattcagtctgatgcccgtgggaaatagtaatcggatttccttgctgaaggacatgagtctcgagctctatagagaaaaggttagtctcacaatgcaaagatgacggcaaatgacacttacggggtctcgagaagtagtcacaagaatgcgagggtctagaaggaatatcagcacctggccatgtgcgctttcaccacccacagaagagagccataccaacgacacctgaaagctcggagtattcatcatcgatatcgagagaatcatcctcggcgacgtcgcgcgacgcatcgtagtcgtagtctttgcgcagttgggtatctttggcgagttctggatccagcggcttgcccgaagccaaggcagctctcagcttcgccctcttctctgaaacttcggcatcgcgcagaagaactgcttttcggtagagatagtctcgcctttgcctggcttgtttgcgctgaagatacttgttagatggtggatacgcgaggttcggggcagcgacatccaagtactgacaatcattgtgaatgttgttggtatgacgcttaatctggaggatggcgaacggtgcgctgagagatatcgctttcggagtttcgggatctgtaaattttggcgtagtttccttgctgaatggccaaaagggttctcgaaatggctttttgatggaaggttaccacagcgctggagaaaataattcccctgcaaggctgagaagccaacgctatcagcgcctatcaatcggccatatcagtggaggggcaccaacagaaacaggaagcacggacccctggccaacttttttcccacctgccgtgcagctgtacccgcagcctgatagccgccactttccactttgggaggcgtctctttgcctatgagcgctgacaaggtgcaggattcccacagccaaaaaatcgcaaaccgccggcagcgagcaacgaaacacacgaatttccagagcttccctcaccacccattcattctgtggacttgcgagcccatcagctgcctcgatttcctgtgtcagcgatgatgtgaccgtcccgtcgcttgcaattccatcagctctttttttgtctctatcaacgtcctgtcactgcgacatcccaacgatacctagacagctgcgcgcagtgtgtgccctccaacctaccaaataataattctcgaccggtgattcaaggttagcctcggcagcacccaacacgttgtgcgccattcccctccctcacttcgtcgcgttcaagcaacattagcatacttttgccccccgtcctcttgtcacacatctctcttgcctgcaagtcccatgattgcgttcgcctgcttaccatcctgcagcccaagtgtcccggcacccttgccgtctgtttgataatggaggacgccttcaaccacctcggaaaccaccttgtttccgactctgccgccaccattaatgccaccgccgacgacttcgacgatgaaaccgagagcttcctgggcgatcttaaggaacacggctccccgacaaacgccctccgtcgccatgatgacaatgacaaccagggccccgaagacttccgcgatgatgacagcaacttcagtggcccaagaaacgatgtaaactcgagaggtccagaagaggaaaaggagctgcccgctcacgcttgcgcgtaagtcatgggttttgggagcatggtggggggtatcataactgactggtttatgtaggtattgcggcattcactccccgtcctgtgtggtcaagtgcattgcaaaggaatgcaacaagtggttctgcagtgctcgtggtaattcgagttcctcacatattgtcaaccaccttgtacgagcccgccacaaggaggttcagcttcatcccgagtcagcccttggcgataccaccctcgaatgctacaactgcggcaacaagaatgtctttatgctgggcttcatccccgccaaatccgataccgttgtcgttcttttgtgtcgccaaccttgcgctgctggcagttcggccaaggacatgagctgggatgtttcgcgatggcaacccctcatcgaggatcggtcctttctcaactggattgtctccccaccgaccgacgccgaacagcttcgagctcgccatttgaccccgcccatgattgcgaaacttgaggagatgtggaaagaggctccaagtgccactgtcgccgatctggagaaaggaaccggcgtagacgacgatccacatcccgtgctcctgaagtacgatgatccgtaccactatcagaatgtctttgggccccttgtgaagatggagtcggactatgacaagaagctcaaggaagcgcagtctgaggaccacctcgtggttcgctgggatatgggtctgaataacaagcacctggccagctttatcctgcccaagatcgaatccggcgatgtcaaattggccgtgggcgatgagatgcgcatcaagtacaagggcgaacttcgtgccccatgggagggtgttggatatgttatcaagatccccaacaaccagtcggacgaagttacccttgagttaagaaaggcggcgaacgacaaatcggtccccaccgaatgcacgcacaacttttcggccgactatgtctggaaggccacgtcctacgaccgtatgcaattcgctatgaagaccttcgctgtggatgagctcagtgtttctgggtacattttccataagttgctgggccacgaggtagccgttgctcccatgaagacgcagatgccgaagaggttccacgttccagggttgcctgagttgaatcacagtcagatcactgccatcaagactgttctgtccacccctctcagtttgatccaggggccgccaggtaccggaaagacggtcacctcagccaccatcatctaccatcttgccagaatgaacaatagtcaggttctcgtctgcgccccctccaacgttgctgtcgaccagctttgcgaacgtattcaccgcacgggtctcaaggtcgttcgcttgacagccaagtctcgtgaggatgtcgaatcgtccgtcagcttcttggccctccacgagcaggtccgcctttacaagcagagcagtgagctcacaaatctcaacaagctcaaggccgccgcaggtgaactgtcttctcaggacgagaagaggttcaagcaactgactcgccaggccgagagggagattctcaacagcgctgatgtcgtgtgctgcacttgcgtcggtgccggcgacccgagactgtccaaaatgaagttccgaaacgtgctgatcgacgagtctactcagtcagctgagcccgagtgcatgattcctcttgtcctcggatgcaagcaggttgttcttgttggtgatcacaagcagctcggccccgtcatcatgaacaagaaggcggccaaggctggtcttaaccagtctctgttcgagaggttggtcaagctcaacctggttcccattcggctcaacgttcagtatcgtatgcacccttgcctttcagaatttccttccaacatgttttacgaaggatcgctccagaacggtgtcaccataactgagcggcttcgcaaggatgtcgatttcccctggcctgttgctgaaactccgatgatgttctggtccaacttgggcaatgaagaaatttcggcatccggaacatcttacctgaaccgcaccgaagcttccaacgtggagaagattgttactcgcttcttcaaggctggtgtgaagccgtctgatatcggtgtcattactccgtacgaaggccagcgcagctacattgtcagcaccatgcagaatacgggcactttcaaaaaagagagctacaaggaggtcgaggttgcttcggtcgacgctttccagggccgtgagaaggactttatcgttctttcttgcgtccgttccaacgacaaccagggcattggtttcttgtccgaccctcgtcgtctcaacgtcgcgctcactcgagccaagtatggtcttgtcatcatcggcaaccccaaggttctgtccaagcatgagttatggcatcatcttcttgttcactttaaggatcgcaagtgtttggtggaaggccctcttaccaaccttcagacttccctcatccagttcagccggcccaagatgagcttccgtccccgccacaacgcacaggcccagcatgtgtctggtggttataccaacggcagaggttatggcggcggtgtcaacggctcccaccgcgatttcgacactggctcggtgctttcgtatgctaacggtattccggatgatgtctcgtccattcacagctctgccttggggggtgcgggccttacatcggcctaccctcagatgttctccaacttccatccagagcagtggcccggcttgcccggggccaacccggctagccgtcccggggccaagggtcgtgctcgcattgctgagagtgttgctggcgagagcgttgccaacagcgagtttacggatgcgagtgcgagtgttattggtggcaagggcgtcggtcagggtggtgcgagcctgggagctggtcttagcgaggctatcagctcggctcgtcctacctcgtacagccgtagcgaccgtctcaagcagtacgtggagagcggcgggcgcagtcttggcttgggcagcggatatggccgtcgcttcgatgatgacgagaagagcgtcagcacagcgtttgctagtcaaattgggacagggttcgactgagtgttttgagcagcgtggttgtgctggtattgtttttgaagcaaaaccaaacaactgaagcagttatcgcaccaagcagcatatggaggaccatctcgtctggctccgcccagcatacctcggtcgagcacgcaacttcggatccgcccggtcgttcctgatcagtcatgaaaacgagtcacagtttccgggagcgctgatcctacctactttggtagagactgggtacatatatccttctgcgcctcgcagcgacccgccgctgccaaagcgttgctctgacgacctatggtgcctgtcgattcttgacaggcagatgtggctcgaccggcctcggaggcctcgagttttgagatgcaggaggtagttgagaattgttagggtcttttgttccagcattacgtcgctcaggggagggagctagtgtagcgagccgaggtggtcacacatgtggcatggacaagtcggtccagccttctgtaccacccaggggcatcctgttttggaactagctatggacgagaaggacagcggtggtagtctgataaattttggggaggaaggctgaaggttgccgctcattttcacgcctgttgggcattcacttcgtacaggctggatatctgacttgatcagattctagtgctgaaacactaaccactagtcactcgttcactcctatttgagattggtgatttctaagcaaacgagcggatagatcaatagaggatcagaatagcactatcatttattccgctaccatatgtgccccttatcattgtgaagtctttgagccgccagacgcgacacgcttctttctttgtgagcctcgacgatcaagtaacacgaactcacgtgaagatagccgataaacgccatgggttctaagggaaagttccactgtgacctcatcccgccccaccctttgcctgccacgcaccaccactgggcaaccccaccccgccttttggagtcgcagacccaaccaaagctgatgatcatgctggttgggggttcagcgatgcacgttctagattacctagcacacaccttaaacttttggcgccacggtacctgaatactcgagcctttcaaaagcccaacatataaccatcatggcgtcgcccccgaaagatctagcgccggacgtgccaacaaccacagtcacccccgacaccacggttacagaaagcggagcgggcgccgctgccgccaagccggagactaatacgacgttgggcggtgatggtgctgggacgacgacgaggagggcagctacctttagtgtctcaccatcacagtcacagcagcagtctggaacaaacggtggcagtggtagtggtggtggttctgtcaagtcggcggcggccaacaggaactcaacagccgacattgacacgaccaaccccctcgacttttccgaagacgtctcggcggacaactcccttcctacgctggcgacgctgaagaagattgacaactacattgtgctggaccgcaatggaaagtcgcacacgtttcggtcgctgtacacggggcggcatgtggcgaggagggtgttgcttgtgtttgttaggcatttttactgtggtgtatgtgtactctccgattacccctcccgtggtatgattgatgactgattgtgatggtggggatagaactgtcaagattacctccggaccttgtcgtctgcgttttcgccgtcggatttgctgggtttgcccatcccgacgtttatcgttgtgattgggtgtggcgatccgggcttgatcgatatgtacacctctgagactgggtgtccttttcctgtttacacggatcccacgcggaaattgtatgcggagctgggcatgattcggacgttggctttgggggagaggccagcgtatacaaagactcatctggtcaggtcgagtttggcgagtgtggttcagggtctgaagcagatacccaaggggctggcgcacaaggggggcgattcgaggcagataggaggcgagttcttgtttgagccggttggtggggaggatgtggctagtccgatcaaggagttgggggagtgggtgaggggagagagggctgggaatggggatggggagagtgtgaagatgggggttaggcatagggcgagtgagacgccgagtattgatgggaagaacatggagttgggaggggatgggagtgagggggtggataagattgttagttggtgtcataggatgaggaatacgagggatcatgccgaggtgccggagttgatggaggtgtttgggatggcggtgggggagatggagaagatacccggggatgtgaaggggttggagagggagaggtgggagagggcgattagggagaggaagggagtaggtttgggggggaaggggagggggagtttagagagatgacttgagggtgtgatggaaagctgattggattgggtttattcaaaagtgtcaaagcatgcattttagcaagcaggagttttcataaatgggaattaaaatgatattatgctctaggtcgtggtccgcacggatagatttgtgaagtcaggttgtgtacacgacatacgggagtttccgagtgcatcgatgtttcacgcccttcatatgtttgtctctcctgagataatagagcaaacaacagtcaggaaggataacccctggagggactgtgataccatcggatgtgaatagtgcgcttcatcaaatgatagccccatattatccgatgtcgtcaagcgcactgcgtattggtagtctctcgccgagtggctagcatacgctaggtatgctctcatcgtgccctttccaccaagtaatccggtgcaacatttctggtgagagtctggggaagatattctgtggtttctctggcgtggtagttcaacctccaagtaacgaagcacaaggccatttcccatctaacccaccgtgtaatctcttggttgtcttgtttacaataattccacattgtgccccccctcccccccccttacgtaccctttcccccgcctacctaatcatcatctctgtatttttttttttttgcctttttcatcctcaccgcccatctatctcctttcgatgtctcctcgatcaggatggcttcccaggtaccctgccccatcccaggaaacccgtccatgtacggcctcggcctccgcacgtccttttacctcctccacctctcgaccctgttcctcgagctcctggagcaggaatatattgtccttctcctatccgccgagctcgtcctcaactttgcgcttttgcttgcattgatattgcaggttgctgctggggggttgcatgttgttgaggtgtatattcttcttcttctcctctctgtcactgtctacctcttcgtcccgagacatgcggcggatttggcaatggtgttttgtcctcatttggggttgcgggtgaaaagtagggggtggggggtagatgtgctgggttgtttgagggggggttatggattggttgtggttggtgtgcaggtttggttttggggtaggggggtggattcggttaggtatgatgacggtggtggtggtggtggtggtgatgggaaagggtgtttggagtatgggtttttgtttggggcgatggatcttaagagcgggagtatgaaggggttgaatattttgttggtgttggggatgctggctggggggttggcggtggtgggttgtgtgaagagtgggtggtggggggttaggaagggagggaggaagaagaaaatgtgagtcgcccctatttttcatctctgcccctaatcgttgccgggtgggtttattttttttttctttttcggtcgtggtagaaagtgatcattttccactttcctttttcggaggtggtgtggtaggccgcagcttgatgatagctaaccgtcggggacaaacctcaccgagattagccgctcaaggtgggaagcacaaaagtggttggaggccttggggggccttgcggtcgccgtaaccgtgatcgttgcgattgagctgacgattcgatggaaccgcatcggggctgagaacagtgtaaatcaggcaaccaccgccgcccaactcatcccgctcttgctggttatcgcactcatttcgacatttttgtacggggtcttcagcaacgacaagtcagacgacggtagtctggttgttacgcttgaagcagggtcatcatcgtcgccatcgggctcaggtactgggtcaagcccatccggctctggtggttccggtcctacaccagttgtcgttgctgaaaggtaaaactctattgagtcttatcaacttgaatcttttacttacatggattcagatcacgatctcaaacacgccgatctagatctcgtcaaagttcccgcagaccaccagccccatcgccaccaatgccaccatcaagacacagcccgagattccctgggccaccacccggtccacctccagcttctcatcacagcggctatagtcacagcggctcacctactcctccatcgcctctgagcccaaggataatcaacgtctccccctccgggccagtagccagaccatcagtcaactattatcgccaagtggttccccatccctacttcccgtatgaaggacccgagtactacgacccgaacggatcacctccccgcatgtcaggaggtatcggggcaaggtggccacgtttcgcaaaaccaatgggtccccgcccgcctccctctcctaccaagtcaatagacccagccaacgacaaactctgggacgaagttctcagcggcgcaccaggcacgcaaggggaaccactgataactcaaaaagacatcgacgacttgttcaacccgccaccgtcagcaatgctgattaccgatgcggatgtggcggctgtgatggagcctttggtgacagacgcagatgtggaggaagtgataagggagatgctgacggagcaggacatagcagacgctctgaaagataaggttactgacgctgatgtcgacagggttatgaagtctagttttactgatgccgatgcagaagccgtgatgggggatttgataccggatgagttggttgaagaggtgatgatgagtggggcgataccggatgagatggtggaggaggtgatgagatctcccagacaggcaaaggtcgaggatgagagtgatcacctaagtcagcaggcccatgactccgaggattcagatgaggaggaagagtcgagttcggatagcaattcggattcaggttcaagttcaagttcgagtggagagaggcatgatgaagatgaggatgaagaaaagggtccggccgagtcgattccggagacggagactgaaccccgtacacctaggtcggtacgttgggcgatgcccctggacgaggaaattaattcgaggtatgcttctgatggtgggttctatcactcacctgagcttagaagcagggacgatgacgtggaagaaattgtgagagatcgatacggtgatgatgatgctcgaatagttgctgtagttcgctattttcctactcctgggtattcatcaggctatgggtcgtcatggggtcagaaatactaaaacaaaacgcaccattacgaaagcaactttttgctgtggcggatgatggtgttcaggaagttcataagacaagtcataagaaaggccaagcgaacttggtggttggcatgctgggatgaagaaggatggtcacgaagtaatgacaaaaatagcaagccatggtactcattcctctgaaaaaacacaccaagtgtcagttattccagtgtgacttttcccttgacaactggttgcacactctagactctagatttcgttgctgtatttcccttctgtgctcgtcgcatgaggatcttgcttcctgccccacttgctcttaatttcaggcattttttttttttgaaaaaaaggctggaagtttacggatctgcccaaaatgccttcgtttctatgcaggccaacaatccactattttgcatcggatctcacctggtgtccgttctttcattgctttgaagaggcaagctcaccaattttcacctctttcttcgcctcttcttccatgcttgctgatgatcatgaagagactacaacctcggacacggtacacaagacaaagtgcgactatgtaggttagaatatgcttagggttatgggtctaggcatgttttttaaagtcaggatggcagggttgtatatgtagtggaatggttagttgatctgagctgcttaactgaccctcgggttaagattccaccgcaaaacgtgaatgagaaatctcagcagtatatatcagttttcgccccattatttcgcctgatatcatatctttgttcccgaaaactctgccaacaacgtcaaatcttgcctactttgagtgaacttcttcgaatgtcgagtgaatcttgcggaattgccttctacaagaggacccatagccccaccttcatctctgggccaagctgctagtggcaggcagcatctctcttcccggcgacagctagaacatttgaactttctacacttcccttcaccaaccatcccacgcccgggttcgtaaacaccgcggccactgcagactaccgcgccatcatcgaacccccaccttttcatcgcagagcttccgcttctcttgcaactcaaggtctcgtgatcagcgcctcgcatacagccagccccagctacccccaacttttctgatcgatcgctcaccatatccacctaatatcgtcaccatgggttcgacactctgccagaaccgtctgattgaggagaggtaagtcgcctctttcgtcgcttgcagatgcgcgcgccgaccttcggacattttcctcctgttcgcgacagcctcgctgaccggcgccatgccctctacagaaagcagtggcggaaagaccacccgttcggcttctgggccaaaccccagaagaacccccaaggtgtgctggacatgaaggtctgggagtgtgctattcctggcaagaaagacacaatctgggagggcggccagttcaagctgcacatcacttttccagatggtatgtagctaccctcggtgtaacacatgatgttgcagatggactttgatagctgacctgtctctttttcccttcctgcagaatatcccacgaagccccccaagtgtaagtttttttcgccgaattaccccaacatgggcaggtcacacgactaatcaacgtcctctccttgtaggcaaattcgtccctcctctgttccaccccaatgtctacccttcgggcaccgtctgcctttcgatcctcaacgaggaagaggcttggaaaccggccatcactctcaagcagattctccttggtgtccaagacctcctgaacgacccaaaccccgagtcaccagctcaggccgaggcttacaacctattcaagaaggacagagccgagtacgaaagacgtatcaaacggattgttcgagagaatgctgctccatagacgagctcgcttctgggggcatactggaaaaggacgacagtagaataacgtattagtgggatctacgattgtggtcatttatttctggagttacttgggaacatcatggacggctgggaaggcaggcaggggcgtagcattgattgggaacgagcttgtagacggacgactctcgacagggaagggttcttcttttcactcaacgaactggtatttgactttctggagtgggggttaatggaattggctttttttccaacaatacgaaccactgaatcaaccatcccgtctctggcacccgtgacttgcgcctccatgcagtgtttccgatacagaatttgtgacgctggtgtcgtgtgtggcccctggctctgagctgtcatagctacgagcaatacccccgcgtaacattggggaagcaacgcgggctcccatctacgattggcgataccccacactcgggatgaagaagagtctggcattctgtcgctcacagctgatggatgatgtcctctcacatatgcagagtctcacgtggacagtttaccaggcactttgcaggctcccacacctttatatcgcgattatcgcaaacttcttatcagggcggtttatctaattgtggagggccggaacgggttctggcacacggctgggacggtctcgcctccgagtccccaggttccggaccgcgctaacaaattataccagggggtggatttgaggagtggcgatatcggcgtccacttggctcctcacgattaacaatggaggactaggaagccccgggtaccaagaggtctggggtcttagaaggtacttaaaattttgcaggggcaatgtagtcgactcatactccaaagccaaatttggaattcccagacaaatttctgtgactcttacccatctcttcctttccacacctttgtgctgtggcctccttccttcaaaaaccatcccacgctcttctgcagctctcacctgtagaccaaccatcagctgctcacctacgccttgccggatcgaacgccctctctcccatcgcaacagacaccagcttgcgcgcgccgcgacggccagagtaagtataaagaccgttgtcactgactggcttgtagtccgctctcaacgtccgctccaaaatcccaagaactagttgcctcctagcctcccgtccaaaaacaagagaatagacagtcaacatgtgcggcatcttcgcctgccataggtcagtctcgaacacctggtcttttccctggctatcatgaacaattgctcggcattggctccgtggtggtgacttgtcaacgactttctgtccttggaggggtcaatgccccaccacaccaccaagccgttgtccttatcgccgttatcgcttcacaaattctcgagatcagcatcaacaccacagcaagcataacgcagaacgctaatatgaagagcaacccagtcacccagacgtcgccaaattcaagccgactgctctgaagctttccaagcagatcagacacagaggcccggattggtgagtcaatcccttgcgcaacccctcctggtagctccaagacattttgtgctaactgatttgataggagtaagaatctcacccctgagtcggacaaagacggataaacaagataaggagaaacaattggtttggctaacacattgtcttcccacaggcggcagcgttatctctaacaacacgagtacgataaggaaccccaacccccctggacacatagaaaacctcccacttttctcgaatgtctttgaaagagcgatgctaacgcggcgccacagttctgtgccatgaacggctcagcatcgtcggtgttggtgggtctagatctgtatatctggtttcgaggccgtcgtctaacctcaaagcagagagcggagctcagccacttaccaatgccgatgacagcattatcctcgccgtcaacggcgaaatctacaaccaccgtcttgttcgcaagaccttgaagaccccctaccacttcaagaccacctcggattgcgaggttgtgattcctctggtgagtcactgcgagaggagaactgcgggggagagcacatgagattaaccggtgcaacagtacctcgagtatggcattgatgcgcccaagcacctcgatggcatgttctccttcgttctttacgacaagaagaaggaccgcacaatcgccgcccgcgaccccatcggtatcacaaccctttaccagggctggtcctccaaggagcccggcactgtctacttcgcttccgagctgaagtccctccaccccgtctgcgacaagatcgaggctttcccccccggacacatcttcgacagcttgactggcgagaggacacggtactttgagcccacatggtgggatggcgagaagatcccccagacccctgtcgacctcaagaagctccgcgagactcttgagaggtctgtcaggaaaaggttgatggctgaggttccttatggtgttctcctttccggcggtcttgactcttcgcttgttgcttccattgcccagagggaaaccctgcgcctgaagaagcttgcagaggaggccaacggcgccgctgaggagaagcctgaggatttggacaagggcgagggtcttgttggtctcgatgacgagggcaagctctctaccatgaccttccttccccagctcaactccttctccattggccttcccggctctcccgacaacgaggctgccctcaaggtggccaagttcctcggcaccaagcaccacgtcatgaccttcaccatcgaggatggtcttaacgccttgtctgatgtcatctaccacctcgagacctacgatgtcaccaccatccgtgcctcgactcccatgtacctgctctctcgcaagatcaaggccatgggcatcaagatggtcctctctggtgagggttccgacgagatcttcggcggttacctctacttccacggcgcccccaacaaggaggagttccacaccgagtgcgtccgccgcgtcaagaaccttcacttggccgactgcctgcgcgccaacaagtccacctccgcgtggggtcttgaggcccgtgtgcccttcctcgacaaggagttcctcgaggtgtcgatgaacatcgaccctgcggacaagatgatcaacaaggaaagaatggagaagtacattctccgcaaggctttcgacacctcggacgacccgaccgccgagccctaccttcccgacaacatcctctggcgccagaaggagcagttctctgacggtgtcggatacggatggatcgatgccctcaaggacaatgccgagctccacgtcaccgacgagatgatgaagaaccccaagcctgagtggggcagcgatatccctgacaccaaggaggcctactggtaccgcctgatgttcgacgagcacttcccccagtcgtgcgcgtcgaccgtcatgaggtggacacccacatggtccaagcagacggatcccagtggcaggtgagttgaactttggttctgaatggacgcggtttgagaattgatactgacgtggcttttacagagctatctcgatccatcaggccaagtatgaggatgcttaaatgtctttcccatcatttttgtatatgagtcatggcttccggagggtctggtatctagcagggcgtcatgtcaaaagatagggtgagggatgcgttgaagtacagcacagctagcctgtgagaatgcaaaagctctgaaaagttcattttggtgcagggtttttgatggttgaattgccttggcaaggcatatccgtagatatgcaggctgtgaggttgggggtgatgggcaggagggaatgcaatgcagatatcaacctgataaaacctggggaagaagagccaagctctcaaagctggagccaaagtgtctgcatagaggaaacagccgccaatatgcttagcggattcatccacgtggaggaccttgacataaactaccactctatatgaacaaggggttctgttaaagggaacaaacaaataactgccttgaaaaacattaaatataggtaatgaccaaaagattgctcagacatgccatatttgcatctggttgttgaaataggtctctcaagtctcaatatcgtggatagacacatacctgtcgtctctcgggatagcatacagatcggcaggatggtctttcttgagaatctggcttgtagacaaagtaactgcaacctcaagtcaagcaaatatgaaacaaacgacagtgcaactgaggcaatgcccccaagtcacaacggccaagaggaagccattgactgatgtgtttcaagggttagggtaatcccaggcgatggcagccgttgctgctggaacttggcacttcccacctgggagcgatggcccaatcacggtggagaaagaaatttggcagttccgatactttaccttcccaacatttccacgcctttcgagttccaccgtccgacctagtctctacaagttttcttgtttactttgtttgctcgttatcaccagttaaacacacacaatcatcatcaaaatggctgctgtccctgcctactccgatatcgccaaggcggcgaacgatgtacgtcttactccccccatggctgttgttggcgaaggggggtttgatagagcggcatttccaaagcttgcctatgcgccctcgcccacagcgacaccaccggccacaacacttgcgcataaccaattgctaactctcggggtcaacccgcactcatgtagctcctttccaaggatttctaccatctctcctccggcagccttgaggtcaaggacaccacccccaaccgcgttgccttcaaggttaccggcaagagcagccacgatgctgccacctccggcgctgtacgtacactcctttgagacactgcacacgaggacactggctaaccgcgtccgcaatagatcgaggccaagtactctgacaagtccaccggtgaatacgccccgccccccgctgtcaatctgccaatatatcgggaacccctcgattgccatgcggtgctcagccgtatcagaggacccaggctacacaaggcccctgtttagtggacagtggttctttcaccaggcaatacacagctgctaacgtcctggcaccgtgcaggcgtgaccgtcacccagacctggaacaccgccaacgctctcgagtccaaggttgaacttgccgacaccctcgccaagggtctcaaggccgagggtatcttctccttcctccccgcctcccaggccaagggtgtcaaggccaacctgcagttcaagcagtccaacttccacggccgcgctttcgtcgacctcctcaagggccccaccaccagcatcgatgcccttatcggccacgagggcttcctcgccggtggttccgctgcttttgatgtccagaaggctaagatcaccaactactccctggccgtcggttaccacgcccctacctacaacgccgctgtcaccgccaccgacaacctgagcgttttctccgccagctactaccacaaggtcaacaagcttgtcgaggctggttccaaggccacctggaactccaagactggcaacaccgttggtcttgaggttgccgccaagtaccgcattgaccccgtttccttcgtcaaggttagtctcctgaggatttgcttgtttgtgtgacaaaactgactttgaaaacaggccaagatcaacgaccgcggtgtcgccgccgttgcctacaacgtcctcctccgtgacggcgtcaagctcggtctcggtgcctctttcgacacccagaagctcgaccaggccacccacaaagtcggcaccagccttacctttgagaactaagtttgatatccccgggattgttgtaaaggtcgggagttggggacaagccatggcgttgaatgattctctgttgtttttctgaagaatgaggatacaacatcaatcaccgtgtgtgtgtgtgtgtgtatcgattagacgaaaataaatggatcacgatgatcagggcaaacaaacgttagagttgggtccttagcaggatgagcatgatttgtatgaattctgcgatctttccaacagtgccaattaatatgattaggatatctcacgttcgtttatgtggcgtgcgtgatgctgcttgacatatctcacggcaactagcctgggattatgcttcaccgaggttttcaaaggactcttgttggcttttgttctcattgttaagtatcatatgtaatctcatgtaatgtatatacgacaaaaacagcaagtaaataaatgacttggccatgaatcaggggggtgttgtttacatcattaccaacacccccccccccacacacacacccccctttctttctatcttacactcttgattcactctctttttcgggctctaccttccaagcccacctccaaacccccctatcagcatcgcgcccacaacactagcagccacgcacccgctcaagacaaaaaaagtcccaatcatgctgtcatccgcgtccaagctcaaccccctccgcttcatggccctctttgcccgccgttcctcatgccgcctgtgcgtccgctgatgagaatgcgggtcaaaaaacgggttcgatccggtgttggtcccgtacccgaaccccccaaagccgtatttataatagggatcctgaccgaagcccatcccggggttggattcagggccggtggtgttctcccatccttggtggtcttttgcactggtgtcttgtctggcatgtgttttcccctctggcgagccctgctgggctgttgagctctcgtgggcagcgcgtcgttttgaggcgtgagcgccccacccccctgacttgtagaatgaagggggggggccttggaaggcggttttccgacgggaggatagacctgagggggggcggccgccagctgggttgctggagtggtaggatcccgactttggggcgtgggggtggtgctggtgggcgtagcgggggtttgtggcgcgggagcggtcgtatctggcgcggtttgccgggtgggagaggatggtgtaggcttccgagatgcgcatgaagcggtgggaggaggaggggtcggaggggttgtggtcggggtggtggagtttggagaggtggaagtagcttctgaagggtaccgttaacaaccattgggaggggggatatggtacataagggaggcggactttttgatctcggctggggaggcggaggggtggacgtttagggtctcgtaatggtcatgggttgagtcgtctgggttgctgctgccggcaggggcgcgatcatggcgggaggagtgaaagggtcggcatggttgggggttgttgacaagaacatggtgaggagggttggcgatatggcgtgggatcgcgctgcgcggaggatggtagtaacggaatggcattcctcatcccgattgttgaaggggctgttatgtcgaggtttggtgatgttgtcggcctcgtgtaagtcgagacgttgggaaaacgctccaccttgaattggcaccagtgacgaaatggatgcgcgagagaacggagactgaggtccaattgtggcttgtcacggctgtcaaacctgcaaatttgtggctcttgcccagcaaacgccgcacttgccccgcgattggtaccaagctgcacgccctgccaagaacaacggaaaaaaagaagcggggcttttctgacttgccatcactttggatcaggcttttggcttccttcaactctctgaattatttcacatagttgaaagcataaaatcacatatttgaatctcacaatggcggctcaagcgccggtagatgagatcgcgcagctcagcggtaagctcaacctccaccgggagactgtcaaagcgtggcagcaactgataggatgagggagaaaagtgagcgatgcggctaccacaaagcccaagccaggtcttgattcggctaccgccaccaatggcaacctgaaccgtgacagcgatgattccgacgacgacgcggaaaatgctgccccgggcgctgagacgggggccgccaagaagaagaagaagagaaagccgaagaagaagaagaagaaccccacggcccagtccgaccccccgcgggttctgatctcgcagctctttcccgacaaggtgtaccccaagggcgaggaggtggaatatgtgaacgagaacagatatcgcaccaccaacgaggagaagcgccacctcgacaacctcaagaatgacttttacaatgactaccgtcatgctgctgaggcccaccgccagactcgccagtgggcacaaaagaacatcaagcctggctggtcgctgactgacattgccaacggcattgaagacagcgtccgtgctcttgttggtcaccagggtcttgaggagggtgatgctttgaaggcaggtatgggtttccctactggcctcagtctcaaccactgcgctgcccactacaaccccaacgctggaaacaagatggttctccagcaggatgatgtcttgaaggtcgatatcggcgtgcacgtcaacggcaacattgtcgacagtgccttcaccttggctttcaacccccgttatgaccctcttctcgaggcttgcaaggcggccaccaacgaaggtctcaagcaggctggtattgatgccagacttggcgagattggtgggtacatccaggaagtcatggagagttacgaggttgagctggacggcaacacgtaccaggttaagccgatccgcaacctcaacggacacactatcctcccatacaacattcacggaggcaagagcgtgcccattgtgaagagcaacgaccagaccaagatggaggagggtgatgtcttcgccatcgagaccttcggtagcactggcaacggctacgtgcacgaggaaggtgagatctctcactacgcaaagagaatggatgcgcccaaggtggacctccgtctcagctcagccaagtctttgttgaacgtcatcaacaagaactttggcaccctgccattctgcagacgttacctggaccgccttggccaggacaagtacctgcttggcttgaacagcctcgttgccaacggggttgtggagtcttatcctcctctggtggacaagaagggttcatacacagcacagtttgagcatgtgagtatttctttcccttgcgcgagagactgcggaaactaacgagtgacagaccatcttgatccgacctaccgtaaaggaggtcatcagccgtggagatgattactagaggaggtttgagcatcgtttggttggtctgacagcatgaaacctgccaggccaggcctgatgccacaacaaaatatgtgcaaagtctgaaatgaccctgctagcaataccattcacggtcttgagtttgatctcctaaacaaacaagtctttagaaatgccaagcattctcaacactatgtgaattatagactgggattccacgcaaaactttcctgccaggtgtttcccaggcacttcaggtccaatcccacgtgcccaccttctccttgtatcctaggtgagactgtaaggtgagttggcaagcgtgccccactgcttccacgcgtggaagtgaatatccacgaagcgttccaaccaaagacaccgaacgggccgggtccggaccgagggagcattctccacccggatccgttccgtaggtctgcaaacggcgtcacttccgtgcaacatgtgaaaatcgcaactgggacttctacggggttcgggatcgtcgccgtgttctaaagtcctgacgccgtgatgaagtcggcggctgacgataggaaaacatcggagccaccgacgcatgcacgaagggttaacaatgacggcactgacagctatctgggggccagcgcccaccgtcagaggcaaaatgacatatccgttgttaccgcttgcaaacgtgggggtaacgctcggcattcccattgggccgattgggttcgagaacggtcgacggtccccgcaccgttccgattcttttcatcatcgctcccctcttcttgggtatgacagggatgcatcgcccccctcctctccctcaaagattttgcgcctgcttgtgcctgtcagtgcctgtcagtgccgagcagggaccgggacgggggaggcgctcctcttatcggccagtcccagaaagaaaatcttcaggtgttaaaaaaaagcccgcaaattccggggcccccccccatctatctcctcccttcggctccatcttaccaataatttttctgcctcatatcttttttgcctctgtcattttttttttgcatgtgccacagagcgaacgggtctttgcgcctttgaaacaaaccaaaaaacgaaatacagcacgacggagcatttattcacttgatacttggcaacgcgaaaggtcgattgtcaaattcgttgtttcgcaaccacctgcaattgatttttcaccctccctctttctgcgcggcgttcaccaacccccccccttctcgcacgcgatcgcgaaaatcggagattcggtacggtcggcgatcctttagacgcccaaccaacaaacggaaaaccactctctgactgagagcacatcctcaagaaaacaccgacaaaatgaaggtcttttccaacacagaaaccttcaactactcctgggaggaggtatcaaccgccaactggcggaaatactgcccatggaacgacaagtccacccacgttctcgccgtcgacaccatcagccggaccgtcgaccccgagactggcatcctgcgcacagaacgcctcatcacctgcaagcagagcatgcctgagatcttgaagaagatcctgggcgccggcatggaggatcaacaagtttttgagacgtcctatgtcgacccaaagcagaggaccgtcaccatggtctcggagaacatcacatggaacaaccttctcaacgttcaggagacggttgtctacagaccactcaatgaccatcagacatccttcgagcaggcggccaagatcaccgctctgtgcggcgggtggcagaagattaagaacagcatggaggacgcgctcgtcaagaggtttcgcgacaacgctgccaggggcaaggaagggttcgaggctgtgcttgccatgagcaggagggtgttcgccgaggagcagcagcgggagaagatgatgctcatccaagcccaggccgtcaacatccgcatggctgcttaggaggctgccgtcgactgcaacgatattgaagttgatggtgagcacgacagcagcaccggcgatgacgaaaatagcaacatcgccttcaacgtggatgaccgctgtcatcgggagaaaacggagcaattgaaagagtgtgacggcgcaaccaccaacaaagcccgacgaacaagaagcacaacaacaacggaccatcaactgggaacaacgccttcaggacaaagacgtcatcccgggggtctcatcaccaccactagcatgttttgccctacaccacggggctggttacggaaaaagggtcttatttcacactatcaaaaaggtggccgcgggatagaggggatttattacactgggctggagctttggcgtcggggcttcttttacttctgagcattttcgcaactgtaacatcatcaaggggttgtttttttctttgcttttcccagcttttacctctccttttgtcactctgtgcgtttcttcattcaaaaggagttctggggaaaaataccccgatgttgatttttgattttcatgcctttctttgtattgtctacacggatagacgttttgttttagagggcttgctttacaaaagaggagcattagacagtttatagaactggttgcggtgtgctttcgcgtttgaggagatagaggaggaagatggtggtgaagaagatgaagagaaagaatgggaaatgaaatggacactctccgctgtgctggtttaattggttagacccttgtttgcctagtagtttgccttcctagcttcttttatgatcatgattcatggtttcatgactgttgtctttttgttcgctgggtttcttgaatactgggtgatgcggtatatcattgtgacgactccagttttgatttacatctcccctcatacttgcgcagtagctccctcgtctccaggtctattttttgttctcccccgtcagccattatctttttcacgaaccctatcccgtcggagtagcgtcggtagaaatacaactcctccactgcgtgcagcaagtcttgggcttggggtttgctaatcagaccgccgcggttggcgtctggttcgggggtgagagggagagggatttgagtccatagctgtgttgcggtgattagtaacttgttctgatggggatgggatgggggggtgaggggcatacatcgccgttctcgactcgggggaaatattcttttttcagggctgcaaacgctgactgtgagagagcggagcggtcagctcgggagacgggttgtttggcggggcaggaggcgaggtcttcggggtcggagtcggaggaggagcctaggttgaggttgaagaggaggtcgtctgccattttgggatgcgggcaactccgctgaaggagctggaggataaaatttgatgagagcaacttgaggaggtctggttaattgtaaatattttgaatgtgagattgctgtgagaacaaaagttgagattgtgggcgagtcaagtgagtgaattgtaaaagttgagaggtgaggttgatggatggagcttttcggcaacggcgccgtggcggagtcaccgctttgaacctccgctccggcgattccccccgagagctgctgtctccgcaccggcgagttcaacttcgtcttcaacgacaactgttcggaaagctggggctttctaacgttcatattgtaactgtgttttttttttctggttttcgaatgtggtgtaaactgacaaaaactcggcatttgcatccgagtttgcagctgctgcattgcttgctctgaacccaatcctcgagcgactccgaagcacaaactacacttcccgtcggcacctttcacttacaccttgaattataccacacttccccaagtgtagttgttttgtacgccattaccgcaatggacgagcacctcgcccaaatcgtctccctcgcccaagccaaattcaagtcaacaccccccaaccgtcggctgtgtaagtccccttcctcctccccatctcacacacccccatcaaactaaccgtcccaaaaagtaatcggcatctccggccctcccggctccggtaaacctccccatgctctccaacacccccccccaagtaattaaaccaaaaaaaataaaaaataaaataatatttaaataatacaagacctcaaacaagagataagagaacccttacaaactattatacggtattgggcgacatttatctctatctattcactctcatatcgataaaaagaaaataaaagatactaaacaatcatgtagataaataaataatatgtgggacgatttgnnnnnnnnnnnnnnnnnnnnnnnnnnnnnnnnnnnnnnnnnnnnnnnnnnnnnnnnnnnnnnnnnnnnnnnnnnnnnnnnnnnnnnnnnnnnnnnnnnnnnnnnnnnnnnnnnnnnnnnnnnnnnnnnnnnnnnnnnnnnnnnnnnnnnnccattttcccaattgggggggaattttcccaaatttttttccttgcccaaaacaaattttatttcaaaccccccaaaccttgggttttttaattccctttttttttccccttttaaaaacccccatcaaaaaaaaccccccaaaaactaatccccatttcccgccccccccggccccggaaaaccccccaaggttttcaaaaacccccccccccccccccaagctcctcactaacatttttccctcgccccccccaggcaaaaccaccctctcaaccctcctcaccacctccctcaactccctcctcccccaaacaacaaccttcctccccctagacggctaccaccacccccgctccaccctcgacaccttccccgacccagcccgcgcccataaataccgcggctcagaaccaaccttcaacggccccgccttcctctccctcgtccaatccctcgccgaacccatcaccccctccacatcccccatctacgcccccagcttcgaccacgccctcaaagacccggtcgagaacgccatcgaaatcctaccgacgcacaggatagtggttatcgaggggaattgtaggccccccgtccattttccctcacacccgcccccctttccttgcttaaaatgctgatgatcaaatggataaaaaagatatcatgctcaacaaaccaccctggtcatccatcccgccgttactggacatcaagatcttcatctccgcgcccgagccgattttgcggcaaaggctggcaaggagacatttggctgctgggttagtcgacagtgtggaaaagggggaggagagggccgattttaacgatgtacccaacggtaggcagatcattgagaatctggttctctatcagggggacgtaattcagatcgggagcgcggatgatgtgacgtggggacctgtctcctcgtcgtcaatgtagatatcaaacttgaaatgaaggacattgtgaccacacagtcactcagtcttgctgaattctaacattcacagtcagtcacttcaattcttcacttcagagtcagaatgggcatcgctataattcagaacgaacaatcatcttcatctgtctcaatcgagtgcctctgcagaccctaaagcaagaacacttacgcagcccatgctgccaagtagtggttgatatccgaacccaagatcccattgcggataagcaaactcctccagactccagacgccttctcgaaacaactagcaaatcccttcacaacgctttccgccgcgctcttagtcttacgaatatactcccatgaaaatcttctgtgctactccaaatagcaccgatattaatcatatgtcagctccatctcctctatcccaaggtgggaaccgtgccaattcacttgggaaggtgaaaattaaagcggcctgcggtcggcggcgcggctctgctggcatgacgggacgctccaaggccgcgcaatgtcgacgcactggatgatctacgcgtgtttgcgggcggtggtgtagccgttgcaggcacgaatgcgcgagcagtcggtgtgaacgtccgcgcggccgcgttcaacggcggagttggctcttcgatggggatcagttgtgatccctgctcgaacgcgtctttacgcacggtagagcacgaggtcgctcgtgaccctgccggtgactcaagagtgagccgtgacattcggcggtcaagatcgcccacctgggtgtcactgcccaaatcgcgggcagacggctgcaaagtcgcaagcgctccggcacggtccccaacagcacgcgaacccggaaagaaaaagtcctccaggttctcagcctcgtcaatcctggtctcagggtcaagctgagcgaggtcgtggaaatagctaccctccttccagcgcttttcgtacgggaatcccgtgaaagcattactgttttgaatgggggcatccatggttgaggaccaccgtgaggcaccaagtccagcatcgggttttcgatattcagccatgggcatcacaggggcctggactggcttcaaggcggcagctgatgcctgcggtgaaatgttctccacggccacggacgactccgttttggcgatagtcataggctgcttttgagttgtggcagcggatgactctgctttccccaacacccagtccataccaatggtggacttccggatgtactccttcgtgtcaacaccctcaacaggaggagtgggggtcccatctttgccgtgtggatacgggacatctgccaaccaggccgggggttggacctgggagtccttcatggccatcatctcttcattcgtatactgaagacgacggggcttgacaaacgccactgcagaggagttgagatagtcctctatctgtgcgactacctctcgtcgctcggacttggtgtggtcctggcagaccacatcgatgaatgcttcgcggataccttcaacagttgcggtaatctcccgcttggtcttcccgccagccttcttcctgagaaaagccgtgagcatgtttcggagcatggcaactgcatcagggactgatagcctgactggttcacgtgtcaaagcatcattctctaccggcgtgctggttctgctgatgtggtggccgagtgaagccacagcaggcgccacctccaaggcatcttcgttgccgtatggctccaaggtcgagagcagtgccgatgcctccgaacttccacgttttaggaccggactggtgtccttcccctcgacattgataaggacaccttgtgtcgctttgagctccgactcgtcatcgtgttggcgcgtgccgctggcttcacccgtgatgaaccgagaagcgtactgcaccgccctgttattggacatgctagcctgtggcttgaccggtggtaaacgaatcacagtagtgttttcgttcgcgggagcagcgtttgctggagtagccggcggctgaggtgcaatcgatggcttgggagcaaccgatggctctggggcaggcttctgcccggaggtttcaaaagcccccacggcatatttgccagctttgaggtctctcaaaactttgaggaaactctcaagctcaccagcggtactaaaagtcaggccgaaatacagaacgttctgtccaaaatgaagagagagggtcaggtcgcttgagacaaagtcctgatattcggcaatggtgaactgaacgaatagtttgttttcggcaaacatcatgcagaagcccagtgtgggagctggagccactgtcaagaagacaatggcaggcaacggctgatttcttccaggtgggttgaggagaacctttgcccgagcgaccatgtggggagggttggcgacatgttggttcccaccatattgggatggcgggactgggacgtctctaggagcttgctgcacaatcctggaggggcctgggagcgggctcaaaaccggttggcgaaggggagcagactctgacggctgccggaggtggacagacgctgatgggagccgggatggaccggcatttctggagctggacatcttctgtttgcggttgcggttgcttacgaacggggacccgctcttgaccatttgctgaacgtgcgcaaacgagtgatgtggctcctgggccggaggcatctgacttcgggtcgcatagggatgaaggttactatacagtatggttagcactagggcttcttcttgacccaacaactggcaaaatgtgacccacttgcggctctggctctcctgatatttcagcaaaaccgtcgcctttctcttggcctctgccttcagctcgtgaaggcgaggacctccaagatcagcaagccctttgaccgcggcagcgtcatcatcctcgaagacgccggacgcaatggcatctggcgaaatgtcagcatctaccattctatcaactttggatgagagatcataccctgccaaacattcgacatcttcgcgcccctcgctacgagcgcatcattctggatttggggccgacgaatatactcttgtctgggctcgcggtcgccccggtcaccccgaccatgtcggccattctttccgcctcccttctttttattcatggccgccaactcgccgtcatcgacgggaagttcgtccaggcggccgattcccaaatccgcctgcagataactagttagcagtatgtcgcatgacaataggagcagagaacttcaccatcatggcctgctggatagcggcctcctccgccagctcctctgaggtcttcttgttctctttgtcgatcgacatgatgactagatgcccgtatgatccttgaaggagtcgtgatatttgagcgaacgagtgacctaagctgggtctgtaacgggtgatggagtcgatccaatcgaaaagtcgtgccctgtcaagtaggacaaaacgttgctcacgacaactgatcgataatagcgatctgaaagatggttacaaaggcaattgatatgacaagatcccgacggatcgtttgactagacgctttgggttgaacagaggcaggaggttggcgaagagtggtagagatcgaagaacgagagaatgttgtggagaggtaagcaggcaaagtggggagtgcaagcttcttagaggcggccactcgcgagctcggtcaggctaggcaacgagagggttggtatgaaggaaggtacgcgcgtgcggtgggaacaaggcgagcagggatggcaggagcactgctcgttgaggggggaggaaggaagagagcacggagagtagaggttggtcgggcacacctcgaaggcggtttacttaccgaatgagctgcccacctcagagtgatggaacagagacaacgaatgtatcaaactcgttttctgcgtgtagcagagtcgtcggtattggtttcttggagcaaagcggaaaaataccggggagctgtcgagtcgatctgttagacgtctgcaattattttcgactctgtcatgtacataccttgatgatggcgacgatgatggaaacaccactcgaggtcgcgatagatcgtcaatcatgcctgagttcccttgggtggtgagggagattgtcggccgacggggacctttgggtggtcgtgttgtcaagaccacggaggcaaggaagccaggaagatatctccagcctgttgaggtaacaagataagttgtcaaggtactcgaaggggataaatcgaaagatgaagggtaaggtgagccagtgggaaagctaagtagtggtggcgggaggctgttgagttcgcagttagatgtctttgttgtgttgtgtttggttcaggaaaagaaagcaacgactgagggagaaggaagagactttataccctttgtgggacccacgatgcggtctgtgggtgctctcaatatgagccgcaccatcatgccgccgccgggttttgattgcggccgaggctagggcttggaggttgtcgtcgtcgagatatctcgggggtcgtcgggggtcatcggtgggggtcgtcggcgggggtcgacgcgggggttagacggcgggtgtgacagaggagattacgcagagccgtggaggtcatcaatacttgctttcaacttcaagttctgagttgcatacacagtcacaagccactttacctcacctaccttgcattacattgcctacgaacaagcgtttccattaagcaccagatttcgtaccatggccgccattaactggacctcggggtcggtttgtagggcttatcttcatcttccaagaatctcccatgtctttaagactttgccatgtagctcagaaggcttggtcacacatggtctatgatcaacgaagttaggtgcccagtcgggcagctttgagtaattgccactgaatctgggttcttgcgttataaaggttgttatctccacaggagaatcatggaaggatattgccaccatgtgtttttttgtaaggaacatatatatattttgaacaaatagctacattttacaaaggacgcgatcaattcgtccattttacagtgtgcttgttgacttgcccctattcttggaccttgatatggtccgtgcggaggatacccctgaatttggacttgcagcaatttgggccaaggtattccacttcattgggtcaccgcttgcttgtctacttttcccaatccgtgccctcgcgtcacactcactcactgtctgtcaacccattgcacgctcatataccacccagggacccggggtgcaatgagcgtgactgttcggctgaggggctttcttgatcatgaaaacgggcaacaagccatacgtataccgactcacctccctcttcaatcacaactcttagaacaacggtaacggagacaactattccgatggctgtgataatgtaaacactgtctacatctaggactacgccggccagtatccgatgagagcaacaaggcttctagttatatgaaattgggcgacggagagctgtctaggaggaagacaatcttacctgtcttgtgatgacagttccaattcaagatgatgtggcaaataagtcaagaccacccgtgggagacgtgcagattctagacagtggtgtctcctccactgggctacttactcgcgccaggtttacaccgtttgaaggtttatgtgtgttctttcaacacctgatttggacttcaacagcgtaaccggagaagcgagcaagggaagtaagtgtacgggcatgctgcatgtggaatatggaagttgaatccaatatcttcaaatggaggatacagcggtgacgtttcggcaggtagcaacaacaacatcaattcaacacatcataatattctgtcaaagtctagtagtgtaagttcaaattattttatattcagcggcgacagccatcatgcccaccaccatgccctcataaccattatgcagtaaatatcgctaaaatcaaatcccatcattctctcatttactttgaccgagcatccttgggaggctcactcagaccatccttgccctgacgaccaattccgctcatatcaatatcctccgaagccttggtcgcaggctccctcagtccagctgtggaaccgagaccggttgaaacatcgctcgaaaaacgaccactgccgacgttggtcttgctagcgtcggcggactgccagtcggaggccttggggggcatttgcgggagggggaggttctggcggacctcttcgatcttgtcggccttggattgagtcatgttggttgtgtttgtgtgtggtttctgataggggtcagcacatctgcttcaaactcttgagagttcaaggagcttacttgatgtggtgattgttgtcgtgagacaaagtcttttgagttggtgcttattttgaattgcttgattgattgattggtctggtgaactgattgggaagaacagaattgaaaacaggagacctctaaatatctcgactggagtgtgctttggcggaatatgaagctggaggacatcacaaatgacgtcaattacatcacagaccccagagagcccagcgaggctcctgtcaccagcccctgcagccccgccctagggtagcgggtggggtctcaagtgccgatctgccccagccgactggctggtggcgccaatgtcttggctctatgttcaacgacatctttcgattgttggagctttgggagcggatggaagtttccacagatgatcctgcgggttctgtctgcgtgggtggctgctcatcacttggcaatggtccgacttcttcgtcacttgcccacatgtcactttaaagccaagttaagagccgttggaaagtgtgatttgatcgatttgatcgagatttgagatgccgatggcttgttgaaagcctcaagactgacttcaggcacgctgaatacatacatacgacgacgacacaatcggccaaaagaaaaaaaagaaaaaaaaaatcatcgcacaacaagacagaagtaacctgtgtatatttcatcctccagaccccatcgcctatcaaaccacgctactaacattgtgtatgttggttggcggcagaaataagaagcgtagaccctttccgatggagcctatcctaggctataggccactcatgaagccgagacttgatgaaacccgattgatgattgaggaaccgcgtaaacccatccgtcgaaaccagagaaagaaaaacgatgaacaattgactcgatttccgtaccgcagatgaccaccccccaaaacgccgtgtccttgtcatgcgcatccggcgcgtgtcgcaaaaattataagaatgggaaaatcaaaaagaaaacaatcgaagagcgtaactgcataacttgcataaccgtaactcgtgtcgtttgatgtcgtgtgtagcgtcttttgggtgagttccgtatgcctctctatgttggatagagagtggaaattgctgctgacctaattggcaggagtggaggcgttgaggagagacgagtgctagaagatgggagaaggcaactcaaagtcggagatggagtctgtgtcctcgactacagcagcgacagccttcatcttccacttcttagcagcagaggaggtgatgggctcgcagtcctcgtcgacaaagatctcaaagtccagtttctgttcctgctcaccaaggtcaaagcccaacttcgtcttggtctcgctcttgaaaagagggctggagctgatgcggccagacttcttgacgagtcggcgaccacgaggagtgcctctcatggacatgagcttgcgagactcggcattccattcctcgcactcttgaatttccttgcggtactcgagaacccactggcgagccatctcggcgtgatcgggcgatccgtcgttgttgacgaaagatgggacgtgaatataatgagtcgaaggtccagcacgatgagccaaaggcccagagcggcggcggggaggcatcgagagaggttgggcgttctcgttctgctcaggaagctcaaccttcaaattgaaactcgaagcagcgttattgcggtggttgcgaggaatgtcggtggcagcctgggtttttccagagggctcaggctctgggccttgctctgcaactttgtgggcctgcttgggagcaaagtcgtgggaagtgggacgggcaatttcgggcaggccaaaagtcttggagttggccggaatggtgagaaggtgagtaatgtcgcccagaggaacacgggcagagtccttgtcatcgtcatcgtcgaatttgtcgtcatcgagcttcttctcattgatctcgtcgtcgtcggtcccggaggtttgggcagcagtgctattttcagcctcgtcggtcagagaagcggggccagcagtggtcgtagccggggcgtcctcgtcgatagacggggcaccctcgtcaatctgcgactcggggtccaaaaccaggggtcggagcggagacgagacgtgaggctcaaaatagccacgacccaaccgggaggtttgggcgatcttagtggcctgctttgtcatcgacatctttcctgacgggtcggaggttgatggtgaagttggtgaggtcgggagtgtgatggtgagttgtgagagggttcaaagacagcacaaggaaatttgatggctcaaatatgaaataaattgcggagattccgtctatcaaggctgacagtgctcctgagcgttctgatgaactgcgcgggtctcaattgctcgtgaggctccgcgtgaagctcggcggtgtggtattgtgtgaggggagaatgagaacaatgacggggaggtccgcgatattctcttggagctgtagagcaggggtatggcgacttgaacacgcacaacgatgcgagcataaacatctcctagaacccctgtctgggcgcctgaggaagcaaaacgaaccccaaagacaaccaggaaagagctgctttgtgccaattcctgcaagtattgattatccttaaggtacctagagagcgatggccgatgactacacaacgtagaccttcctaccacgcgctattatatgtagcaatggacaggtataaggcacgcaaggccttgttaggcatcttcctcttgacgactccctgtccgtattcacttcagggcacggattcttcgtattgttcatgtctattgggtacctgtaggggcctttcgctccttccatatgtgtctccatggccagatatcaccgaaatcggaatcatctgaagttcaataatgggctgtaaaactcttcaactaggcagacgccttcacgtcgcttcccagaggatattccttttcttcaactgccagcttaatgacaaccacgtgcagaggacaataattacaccgctaaacgcccttagagacaaggagatgtggtttgtctatggcatgggctgatatagggcttggggttttgagatacaaattgtgaataagataacagagactgatatctcacaaatagatctgaatgatagtcaattctaataatctctttctatcacccgaaatacctggaatgggaaactgttcttctacaatagccccacaagatattcgctacttgctcataacttcaaccccgacttaatgcagaagatctgatgaatattggccccacatacctgggagcattacacttttgttacctcgtggaggttctgccgggacatattgttagaataggggcagcatccagcaatttacacaatggttcacagctttaaaacagccagtcccacaatctatagggaatctggtaaactggcagagaaagaagactgtccgggctcttgctttcacaaggttttggtggacatatttccaagagttttgcagtctcagagagtctttgtgcacgctctttgaagatggtgtgtgttgtcgtggagccaaaaagggaagcattcacttacacgcatgggacaggggtgcctgattggccagctttgggcatctctacccagcagcatctttactctcggactctgccaccttgacttaagatgtctgttcgcgcgttcatctgaacccagtttggagataaagctctgcttgcatcagctgtgtagatagcctcacttttatgccttctgaaattctcaaaatttgacagtatttattgttctattcacatcatgatgtcccgcttcaaccctaacccagatcacccatgaagatccaggctgtcccggccggcaccggtcacccgatccaattaatgctggacatggcaggtgcccgtgcctcggcgcggccacttttaaaaagtgaaagaggcgatgccctcaacaatttctctgtgcattgcgccaattccgatgccgcctccccagacgtccgccctttcctagattttgctcttttctctctaatgccttaatacgattcttttaatatacgaaaacgacgaaatgttatcctcgagagcctctctcgccgccacgaggcgtctagtccccactacgagtttcgctcaacaagccggttggacatgtgcccagtgtcgcaactcgattccaacacttcgaaaaggggttccgagcctacttcgcgcgaatggcccgacaacgagacgatatggcagtaagactggtgaaaacggagggcgccaggaccataactatggtggcagatcgagagccaggaggtcagctgtgctggccgcaacaggaggtggtgtcgccgccgccgccgctacggttggtggaagtttacttgccttcggggacgatatcaagaactcatatgaagcgatggagagaacgggcagggtggctgccgcactggtactctgcatcaacgactactacaccaccctcagccggcgggataaggtggagaagccagaagagaaggaaactctgctcaaggcctgccaccagagatgtgccgacaggacactaaaggttctagagcagagtggtggcatcttcatcaagttgggacagcatctggtttgtggcaccccctttcgttcgtcgttcactgaccattcaggggctaacatgactttttcaacagagcgcaatgaactatctcctcccacccgaatggaccacgacgttcatccccctccaagatagatgccccgtttcctcgttcgaatcgatccaagccatgttcaaagccgatactggacaagaccttttggattacttttccgagttctcccccgagccgataggtgccgcctctcttgcgcaggtccatatggctacgatcagggaaactggtcaaagggtcgccgtcaaagtacagcacccatcccttaagaaatgggccaaactcgacatgaacctcacctcgtttaccttttccacattgaagcgcttctttcctgaatatgacctcgagtggctatcctccgaagtagaggtttcgttaccgcaagaactcaatttcgaatgcgaagctgagaactcgaaacggacaaaggagtactttgggagtctgtcacagcctctgccgctcgtgatcccggatgtgctctgggcaaagaagcgcattttggttatggcatgcgaaacgggcaagagactggatgatttggactacatggactcgcaagggatcgacagagacgaggtatctgccaccttggcgaggatattcaacgagatgatttttggtgagggggccccgctgcactgcgatcctcacggaggtaacatcgccattcgaaagaaccacactagaagaagaggaccgaactttgatattgtgctctatgaccacgggctgtatagagatatcccccaggatttgaggaggagctacgccaagatgtggctggcagtgattgatggggatatggaagggatgaagaagtatgtcaacgaggtggcgggcattggggaggacaagttccctctgtttgcctcggccatcactgggagggactttatgattgtgagcgacaccaatgagggtggtgtgatgaagccgaaggaggcgagcgagcaaaagaccatgagcactgcgttgcaagagggtttgctggcggacttggtgcagatgttgggacaagtgccgagaattatcctgttgattctgaagacgaacgacttgacgaggagtctggatgagagtttgcatacaaagcaggggccggtcagacagttcctgattctggccaggtattgcatgcggacggtgttttacgagcagctggaagagatcaagaagagagggagtctgtactggccaccaaatgccatcagggtgtttgccgcctggctgggattcttgagggtagagttgaagcttgaggcgtttgaactctggttgagcgcgaagcggttgctgggatacaagaacttggggttagaggcggctgcatgatgccatagacgcgcgtgtatatgagatgccgcgtttaggcagactctcaagtattcaggcagccatgtttgagcgagtgagtgagtatgtgtgtctgtccttttctcatacgatgctgatctgggctgtgacaaacagtgacgagacgaattgtcttcaggactttgaattcatggcagatcacctcggattggacctcgtaaaagtcctgaaccgggacaccataccatcctgagaacaggggtccgaccagccctatgaggcgcgtcgcctctgccaagagcccaggcagctacctcgtggtttcaaagtaccaccacgcctcgttgtaacaacacatcatcaccgtagacatagttttgtacaggcctcttcaccctctccgctccctttttcatcattcaacaggacatatttatcctgcacagcaaccaccatcgttcgccaccacctacagacatctcacccaacagtcccctcaccgccagtccgtcaccatgctctcctccatcaaatggcccttcctctcctcctcctcctccgaggaaaagaaacccacaccccaccctcacatccaaccccacaagcccatccaaaccaaatacgtctccctccccgtcgacatccccccctctttcctctccctcacccccgacccggccctcgtcccagacgcaaaaccaatcaccttccaccccctagactggacctcaaccgccatccccgaaaacaaggggaagctagccttcatcctcgaaaacgtcctctccccttcggaatgtggccaactgatcgagtacgcagaggaatcagtaccgctggatagcccgaccgccgcctctggcgcaaacaacggaccctggagcccggcgctggtgaatatgggcccaggattcgaactttatgagccgagctacaggcggagcgacaggatcatttgggatacaaaagaagtcgcggacaggatttgggagcggtgtttgagtgtggaggggttgaggagggagattgaggttatacaggggcatgagaggatcaagaaggtgacggggcggggggagtggcacggggatggggggagggggaggtgggtgatgaggaggatgaatgagcggcttaggtttctgaggtatgagaagggggggtttttccagcgtgagtgacactgatgaaggtggaaggggaacacgaatgggtgctaatgaggatgactatagcgcattgtgacagtgcgtattatgcttcgatggataaggagcaggttgtcaagacgttgcttacggtgcatatttacttgaacgattgcaaggctacggccgaggacccggacagtactgagttggtgggcggggcgacgacgctgtttagctcggatgagaagaggaggtacgatgtcgagtgcaaggcggggagggtgttggtttttcagcacagcgccgtgctgcactcgggggatgaggtgaagcagggggtcaagtttagtgtgaggagtgatgttttgtatttctcctttcccgatgtagtctcttagggnnnnnnnnnnnnnnnnnnnnnnnnnnnnnnnnnnnnnnnnnnnnnnnnnnnnnnnnnnnnnnnnnnnnnnnnnnnnnnnnnnnnnnnnnnnnnnnnnnnnnnnnnnnnnnnnnnnnnnnnnnnnnnnnnnnnnnnnnnnnnnnnnnnnnngtttataacaagcatgttggtgttgacccctaaagccccctgaaaacgccaaggtttaggtggggtgagtttaacttcagttgctgaccgctccccgcatttcaaccatctcactcaccctcaccctcatcctcaccctcaccttacaccaccaagctctcgcatctaacttcacctatctctcatcatccttctctcctccccatctcaacaccaccccaactcacccacaatgccaccaccagatttcacctctcccctcaccttcaaaaccttcaacaccatcccctccaccgccgcatccccaccacccccctcagaaacatactacctcctcgccgagataaaagaaaacctctccctcacccgcccaaccctaatctgctcggacctctcctccacctccttcgccctgacttggtccgacctccacgcctctccccacgcctccgacgttgacttcaaggccctaggtctcaaaaaggggaattgtgtcctcttgccaaatgccaaaagaactgactcctcagatgaggtgaagcaaggcaagattgtgatccccgggggcaaggatgagtggcaaggaaagtccgggctgagggtgataccaggcaagctggaaaaggtggtggaggtggggcaggattgggagtttgtgattgaggagggggaggggaagtgtgggagttgcggcaaggaagggagggaggaggagctggccaagtgtacggggtgtaggggggtggggtattgttccaaggtatgcctctcactgttgaatataagaaatgatgatgctaatgggggagaacaggagtgtcaggttaaaggctgggcagaaggtggccacaagagtacatgcaagattatcaagaccttcaaggagatatggccttgatttagatacacaacaatctcaactatgacatcgcactctcaaacgaaatgacactgcaataaagttacaccaaaagcgagacggtcccacgctaaatacatacatacgaaccaaaaacccccgaatgaattcccccccggtccctattttgtcatttccccgtcacaaaaacaacagccttccaagatctaacccccctctcaaacaccagtgctcatccacccaaacgtccccaccacactaaccaatatcaacaccgtcaatatccccgcgcccgccttgtcccccgtcgtcggcggcaggtacttgtccttgaagttatcactctggctccccgcgttcggatcccccttgctcgtgcctcccgtcgagtttgtcacaggaggcctgctctgcccgatcaacaacgacgacacggcccccaagacattcatcgtctgccccgccccctggctcccgtcaaaggtgcccgtggaccacttaaacccacaggctctctgtccgttcttctcgcctacacagctggcaatagccgccttggccgagttctgcagaacgggcaacaccttcggggcgagaaaaggcgcgacctgggtggcggtggccatccagcgggcgacgtagcccttgaagctgagcatgtccgtcgtgcaagacatgtgctcctcgcaggcgacctcgtaagcaatgttgtcggggaagaaaacgcggatggtggcgtcggtgagaccgtcgaggcgttcgcgccaaacgtcactgccatttgtctagggcgtgttagccaacctttgacttcagcaaccacaatgaggggcaagagaaaaacatgcataattatacatgtacgccgccccaagcaaaaacaccccgttgttgtacgaaaactgcgcccggttgatgtcggtgcagttgtgctcgacgtgcccgccgtcgtagatgttgtacttttcgtccatgaacccgactcctctcatccagtcccatgtcttttccgcccagtcagcgtacgtggtgttgcccgtgtaccgggccagtctcgcgcccaggttgaagaagcatccgtttgcgatacctgtctcgtgttagcccctttttccctctggacgagccgccggctgtcatgagacgaactattcttgtaattatacccattattcgaccaaggaatctgccacctcaaccccccgttgcacgtctcgtcgtgcctgtccgggctcgcctgggtgttgaacacggcctgcgccaacgccaaccactgcggttcatcctctggtggatcaggaaagttgttttccgcggccagcatcgccgacatgccccagaacccttgatcgtcgttccccagggaggcggtgacgttggggggcatgtagtccttgtctgggcctacctgccacagcatggcttgggtgatgagatcgttgtagctgtcgtcgccggtgaatttccagtagtcgatcagggtcccccacatggcgccgccttcccaccagtagtaatcgcctgctgggggaggaccagggaggatgccgggggtttggccggtgaggttgcctttgtagtattggagaaggtcccaggcgaggagggaggaggtttgtttgatgtcggctggggaattgttagtatcgtcaaggtcagggcagctgaagaaaggggaagcgcaccagcggacgcgatgctataagtggcggcgttggcgacggcggcgccactgagcagaacggctgccgtgtgtcgtattggtgaaatcatctttggtatcaatgttgtggtggtttgtttcttggtgacgaaatagagaaagcgaccggaaagggggggtgaagaatgtgaaaaacgaatgtggtggtagtggtgtagctaagtcgaaaccatcagagccgcgatgatgatgttggtttttttttgttgtttttttttcttctattcttctcctgctgttgctgttttttcgtaatagagttgtttgcgaaaagcgagtgtatgccggagactgaacgagtgttgttgtgtcacgcgtattttcggctttgacggatggcgatcaaggaaaaaatacggggcaaggagagagaggagagagagagagggaaaacttggaatggggggcaagaggtgtcgctaatctgcgtcttgatgcgcgcgtgtgggagcggcacacagcactaatgaaatctgggtggtcttgcagatgcttgggaggacggtcgaatcgatactgccgggcatgggatgacacgaaacggctcacggaaagccgaggggttgtctaacagcgcagcaaggatgttattgtatcgcatacagccatcacttctggaaagaggcacacggtcgggatagtggcttgtggacagggagggatgggctgataagggaacacgaggggggctgcctcccgctgattcatatcactgggagagctacattccagctggggctctcttttggagctctccctgagcgaggcatgacgtctgttgtttctctcaactcaatcctctccttcaagacttggcatcttgaatgatggggaactcgtcgaattcgccgctcttggcgattcaaccaagcatttgccaagcgacgctcccgcaatcttggacagcagggggcagcacgggccaccacttcggcccaggcaccgtttctgtcatgtctggtgccagcactgccatctcctgtcagacaggctgatgacattgattattgattggcaaaccaaagccatcattaggttactcctggcgcttcttttcatctctttgaatttgagagatatgaatcgaatcaccgcttaacctggttcactgatgccaagtgataaccatccgctgcttggcaatgagctcactccgctaaccccagctattagcgttcattaagctcagccctattgaatttgacatgattcatcacgcacttcgtaatgatatcctctgcagaaactcatgtcaaattcgatttcttgttttgatagtgacacaaggagaaccctgagcaaggcgatcgtctcggcaccggcccaagctgcatggaactggaggacgggaaagaaccactcgtcttgatgatcgctcctggcatcatcgcttggcacttgggcactgacacatctttttcggagctgcttgcctctcggactctccatcagaacagcccgacatcattcttctgggccggccctccgtttcatgtacgaccttttcacttcctgatctgttgcgtgatgtggtagctgtcacagacctaattctatcgcagatacctctacaactcgataccactcgctcgagccagcttggccttggccacagacacaatggtacatatatctcagtccttccagtatcatgatacaattggtcagccatcaagtgctgataaattccccaagaacaccatcacccagacgcaactagacctgctcatccacaccatccgaacgacacccatcgtcgaccatcatgcccatcctcttctgaactgggacaaccagacaggaaaataccccctgctccacatcacctctgaagcatcaggcgacgccatcgaaagcgccaccacctctcttgcccacctgcgcgccgttagacagctatctacagaactcaaatgtgcacccaactgggagagcgtcgttgccaagcttgaggccgtccgcctggatcctgatgaacccgatatctggggtgactggataagccgctgtctggagggtgtgcacaccatcctcttggacgatgggctggacaacaaggaagctgtggaagacctcgattggcatacttcgtatgtccagagcccatgcaagagaatctttagaatcgaggccattgcctcggacctgatcaagcatcttagcgcgggcgagttccatgacgtgaagaaagcagaggcaatcatcaaggaccccgctgccctgaaggagttttgggagaactgggcagggtcgtttgacaatgctatcaaaaacgcaatcgacgaccctcttgtggttgggttcaagagtgtggttgcttacaggactgggctggacgttgccggcaaggaaccgagtggggatgctgtccagcccgcgttgaaggaagtcgtcaaaaagttcttgaaggtgcgcaccgcgaggctggaggactcgagcttgaacgactatgtcatccacaggacggcaaccctgattcgagactacatggggaagaatcacgaagaggatatcatcagaaagcccaggaaaccgattcagttccataccggcctgggagatagtgacttgactctggccaaggcctcgccgagtcacttgcaggagttcatcaggtcgtacccggacgtgcccatggtgctgctgcatgctggctatcccttcacgaaagagattgcgtacatggctacggtgtataagaatgtgtatgccgacattggggaagtctttccctgcatcagtaaggacggacaggagagggtgctcatggagattctggaactgtgtccctggtccaagatcttgtggagtacagatggacattggtttcccgagacgtatctgctggcgatcatgcagatgagggaggcttttgaaaacgtaagtgccaaagaactactagagtcagcaggttggctaacgtgcgcaggttctttgcagttacgtcttgaaggggcaaatcggctggagagccgctatcgtacttgtccaggatctgctcttcaagaatgccaacaagctgtatcatctggggctggactttccaaagccagaggaagttgcgagcaggtctctcgcgagatatcccaacccatcccgcaaccttacgctgctccgcgagctccttaacaacaccattgagccgacgtttgttcagatctgctggaacgattataccgccctgcagcgtatgcgtctggttccgttccgcaagtttatgaccctattggaggcaggcagatcgctggacattggtatcaccaaggctgtttttggtatgatccagaacgaccatctcattccgagctcctcagcaacaggagaatatcgtctacatcccgatttctcctctctcaagcatggccctgttgcaggacacatcagcatgcacggcgagtttcgcgagcaggacgggtttcccgtggcgctttgtccacgatcgctgctccttcggtcagtcgagattggctcccagaagggactcgggtttctgcttgggttcgagattgagtttctgttgttggagcgtgtcgaagacgattcggttctggaccgctacacagctctcaagaccgacggccacgcgtggtctgtctccaagtactacgccaaccccaagatcaacgctttgctcaaaaacatggtggagaccctcgaccagatggatatttacgtggagcagattcacgccgagtctgccactggccagttcgaactcatccttccgccctacccgcccgttcaggcagttgataccctgctgcacacccgagatgtcatggccaacctggccacagaagcgggcttcaagatgacactccaccccaagccatttgccaaagcatgtggcactgccgctcatatgcacatgagcatcctgcccgaagccgacgcttttgatgcggagaaggtgacgcggcacttttacgctggtgtactcaagcacctgcgcgccatcacggcttttagctattccaacgcggcaagctacgacagggcgcaagacggcgtttgggctggcgggcggtgggtagcttggggcacgcagaacagggagacggcgctcaggaagattgaggggtcgcactgggaggtgaagattattgatgggctggcaaacccatacttcgtcgcttcagcagtcttactagcggggatcaggggagtggaaacagaggagaagatggtttgggacgattgcgagatggacccggccaagttgagtgatatggatcggaaggagctgggaatttcgcagatgcttccggctagtgttgaggaggcgttgagggcgctgcaggaggatacggagatggtggagatgttggggcatgagttggtggagaggtatgtggctatcaaagagtttgaggacgagtttttggggaagatgggggctgaggtgaggaggttgtggttgatggagcggtattagtttgatgctgtaaagatgggttgaggagtatgcttagataggccgcagaagattggtgaataacgggaacatgatatacttgtgtgtctttttcttctttttcttcttttttcttcatgtcttcagccttgccttccaggttgatacttgccccacgcatgcacccgcccccgcaatcaggggtcgctgacaggggtcagccaaccgttagcgtggagctggaactggcggcgcatggcttggcgctggaatctgccgcagaaaggtcaagctgtcctcaagattcaattggcgatggttgcaacggtttgcggctgattgacttttgattttttttttcgtttacgtgatactcctttttcgacgagaggcagctgacgactgacaattgctttgtctttgtcaaagaaagcccgacggtgttaccggcacgccgatgcggtaaccccaactttttttcccccgacaactggaattcgaggctggtggaggggcccacggagggacatgatcagcggccatcctgaggcttgagctgagagtaacctacgacgacaccgacggcagacgaaaccgacgatacttggtattgatatcgaagacgggcaaagaacatacgacgcgcgtcttcaaagtacacagccagctgagagctaggccatatcgacgctcccgtcgcacacgagacgtacaaggtccacacacagcagaaaccacaaccaccaacaaccatgatgaacggctacgatgaaaaacggggccaccgcaccgacgatgacgaccccttcgccgccaaaggcaacatcgtcagcgcctttgatgcctttcgtatgtttcccaccctccaccctccaacccaccaccccatcaccgtctgctaacatgtgtcccccccccccccccaactcagcaaaagccaaaccccaatacgtaactcacgcctcctccagcggtctatgaacagtagccatgatgatcccctccccctgccccataaggtccagaaatcaccagaacacgacaaagcacccgacaacacccaatttgaatccaaaatgggagttaattgtcttcaagattaccacatcagcttgccataattatcaataacnnnnnnnnnnnnnnnnnnnnnnnnnnnnnnnnnnnnnnnnnnnnnnnnnnnnnnnnnnnnnnnnnnnnnnnnnnnnnnnnnnnnnnnnnnnnnnnnnnnnnnnnnnnnnnnnnnnnnnnnnnnnnnnnnnnnnnnnnnnnnnnnnnnnnnattacggggagggggtatgggtatgggtagtttggggaggatttgtcccatgacggtttgtttttccccccccccccccccatttttcccactttaaatatctgctaacactttggtctagcattcaacttctcccacatcatcaacgagctatccttcggcccttacctcccctctctgatcaacccgctcgatcagaccgtcaactcggccccagaacactcgcactttcaccgctttcagtatttcctctccatcgtcccgacagtctacagcctcggccacccagactcatattcgtcccgctccatctttacaaatcaatacgccgtcacggagcagtccgctcctattccagagaacatggagatgcagatgattcccgggatttttgtcaagtacgacatcgagccgatcctactgaatattgtcgaggacagggatagcttctttgtctttttgatcaaggtggtgaatatcctgagcggcgccatggtggcggggcattggggtttcaggctcagcgactgggtgaatgaggtgaggggacggaggaggaggaacgcgggacatagccaggggatgctggggaccaaggggggtggggagtatgaggagtgatttgtgttttcttttttttttttgttttttttgtttttttttgttagcactttgaaggtaggggggttttctgggttgtatacaaaatggattcttgttttttttttttgactgagctcctgatacaaacgggtgggttgatgaaaagtgttgtttatatataccatgcgagacggactattggcgttttgatgttattttcgagtaaatatgagagagaatatgttcgtcctttgccatcatgaacgactgtgtctaatattcagaatcaaactttttgctcctggtgtatcaaaacccgtcttctcactccaaccactacctgctgctgtctctgccccagcaacccaaataaacagtcttggcaccactcaccagcgccaagacaattacccctatttccttcgagtctgtccactttctcggccacactcttccagacaaaaaaatgactgggcaccagcaagtctgtaaaacgtgtaccacacctcatcacattgacagcaacccaattaagaaaccacaaatgccatcaattcgctactttcgctacagaagccccaccgttcaccgctgcatattcatcctagtaccattgcagttcatagttcctcttcaccctcagtccaatccgtcaatctcacttgctgtacttcaccgtcctctttctcacccgctttttatccttcctcccgacagaaacagtcgtccaggggggatacctcttcgcctcttcttccctcctctttttctcctctgcttgttctttccatctctcctggtacatcgcccgcttcctcgccctctccttcccctcctccctcgccttctcctccgccgcttctttttccaatctctccctccgcgctcttgcccccttcggcggttcctgtttctcctgccaccgcatctgatgctttctcttcctcgccagaaactttgcgcgctgcgtgtccctctcatcaatcacacgaggcggtgcaatgtcgcgcagccatttgagtccccacctcatgtagtgcctgtgccccgttctctcgtcatacctgacggcaaaagcccgctcagctgcgtaatctgtcccgttgaggagacagtggttgtttcgcacaacaaccgtggtctcgagaacgtcattgtcaatgtccgtccaagtttccacgttccgcagcatcgaagagcccctgggcatcagcccgtttgccaatttccaccgatcccagttcatggtcccgaatctggcagcggccgagtcgaaaaagcgagctctggtttccacaaaatgattgaccatctcggcttcttcttcatcggtccgtgggctacggcttttttctgccccctctgctcgcggcggcgtgccaatgacttcgtggtcgggccagctgcggtcgcctacaatcttgtcgtccgggcggctcggggtttgccacctcgctttcagcagccaaaaaccacacagtcttctgtattcttgctcaaatcggcgcttcctcttctcataacatgctttggtctcgggcccaaacaccgggcgctcaggctgaacccgaacttcgccctgtctttcccattcgtcattccacgcgctgcagatggcggccgccctcttacggccgcgcagagccctctgcctctgaagagacatgcgacgcacaccccaccaagaggcacaatttagcttgaactgagtattggggttagaggcttccccaagtatcagacgcttgctgagtattggcgggtccactgctgaaagtagatggtgcttttgaggtggtttggtctgcttgggcttttgaggccatttgaatttcctgtcttcgggtacagccgcggccaccgttggcacctcgtccagatgtgacgggtccagcagctgaaaaaccaaatgattgccatggcacggcggccccgtggagacggtaatcttcagctcttccaaatggtaggtaacaaggcatgccgtatggttgccttgaggtctcgaccatggcttatcaagctcgcccgaaacctccgagagttccttgaacatgtctgccttggtgtgctggcaaaccgacatttcgccaatgtgatcggaaaagatattcaggatgctctcttgattgatgggatggtccccaaattcgataagctgtcggagtcggttgaaacgagcaggagagtcccatgcacggaatacaaagttgacaaaccgctttgtcagcaactgcacgaggtaccgcctcactatctgcgccatgctctgcaagttctttttcgagtgcttcgcgacctccaatagaccagcaggcaacgacacacgttttacaagctcctcgagctgaaatggggcgagttgcggcgcgatcaggtgattcgtgtgcaccaagcaataggagaggttggcgtcagggaggaccctacgacccctcagggacccggcttccggcgtgtgcggcagcaactcaaggatactcgcagatgtggtgtcgtcgtttagtgatcgaaggccacggcaggcgtgcagaaggctgtgggttgagccagttcgatatctctgcaggacattcgtggtacaggccaaggatacgcaggacgtgagcattttccgtgcaagcagtgtcattggcaaatcagacggggccaggtcgcgatcccgcgtcgaaaagaccgagtccacgactaccgaatatccgtgctggttcatgccgctcttcatgagtacgccgggcttagtgacgatgaaatgaggcacggcggccgggccatcttgccgacacggggtgaccttgagcaagatgacagcatggtcttttggcacgaccacgtctctgtcccgcttctcgggctcctcgacagttcgggttgacggcatgttccaggactgtgcgacaacgggatggttgttggtcactgcgtccgaaaagtacgcgctggtactcgtatcagcatactctgacaagatattgcagtcttcggtcggctttggatcctcgctaaggatgaagaaatcctccataggtcgcaagcagcccggccttcccacctcgtcattccgcattacccgctcccaagcagccagctcgtggcgtgcgttcaacatgacaacctgctcaagtgtcacctctgcgccgtccgcaattccacgcagttcccacaagagcggaagccattcaacgttggaggacaactgccgaatgacatctttgcaccatgtctcccacatcgctcttggtgcattgtcagcaggtaactttggacagcgcttggaagacctattgaacaacgtacgtgggtggaagcccgccatgataagtatgatgctcaatattctcaacaatgtccttcttgaacgtcttcccatgcttcaagccccttttacttggtgattcgtcagaactgaagctcaagccccttatgaaaccgggaaatcgcgggtctgtcaggtcgggggcgacgtcgtcaaccgtaatcgggcagtcctagtcacctctcagcggcttcggttgagaggccatcttctcttgggatgaggcgccggaggacgggcttggaatcgatatggttgtatggatacgtggtgtaagtggtggtgatggtaattggttgcagcatcagtggaagagcccaggtgagagaagaggagctagaggaggcagggcatgatgacgaccaggcctcgggtgcccgttcgcaacttcccaagcccctgaaagcacaacacaaagtcgcttcccttcccactgcctacgtgaaagaaggaaggcatccatccgtgacactctcacagcttgcactggcactacgtcagatgccagaatcagcacgtgaaagaaggaacagaccacaatgtgggtatctacgatatgccatatgactccaaccgttctagagacaactgtttgctggagaatacaactagccgaggtactgcacaagaggttgtaccgtgcatgacatgacgtgcaggtcagttccggctatgacctgcctcgtacatgtgagtcaagggccatctttaccgaagaccatcgtgcccgccgcacctccgttttcgaggtcgtcgttgctgtgctcaagtgtgttggtttcggttatctcggaagggccggtagagatcttatctgccgaaaggatccgacatgctgcacagtcaaccccaaccctcaccttctcaaggctttgcaactcccggacgccgttcctttcttccttcttggctaaattccccagacatgacacaggcacgtggtggagaggagacaaggagcaatgcctgctgatgccgttgcttgtctccaacctccaggagtttccccagacacgttgtggagaggccatcctggccgaatgaaatctccctgacgggctcatgtgacgctcaaagaaaaaaaaaaaggagacgagatcgcaatcccacacaaaccccgaacggtgctcaggtgaatgaagggtacaatccagcttaacgccgtggagcgatggaccaggaacggaatcgggcaatgcagccccgacatttttatttttgttgacaaacagcagctaagccccaaggggaaaggaagcgtcaggttagagttgaccgcctccatgcaggcgggacagcgcacaggtctctgggcagcccaagctccctcaacaaaaggtggattggatggctgtgccgctgtcgcgttcgagccagcccgtcgacatttgggcatttgggacatttggaatgattgaacccctgcgaagtcgggtccgttgggattggggtggggacctcttcacaacttttttgttgctgaaacttgacgaggaagcgaaatcgggccctggggactcggggagggaaacagttacagagtttgaagacgctccgattcaatcgacgcatgctcggctcactcgtgcacccagaatgctcgaaaccgggaactaccgactgtatttcgtactcctgctccgtatcccccagcgtcgttcgatgcttgctttggttgcgcctgcgcgcatggccagctgcccgtgacggtgggccgaaactgttaacaccgtaaagtggaaagaagaaagaaagggcacgggaagcggggagaggggagctggggaggaggagaaaaggcggagggaggggggtgggttgcccgggacttgctggttgggcgatagctcccctccacacattccaatgcggaggtccgggatctggcaatactgacttatacccagcctgcccctggtctttgactcagcttcccctttatcaatccattgctcgccggtttttgtgctgctcttgttcatcctcatcctcatcatcatcctcatcatcatctatctgtcttgtttccttcgtccattgctctgcctgcctgcctgcctgcctgcctgcttgcctgcttgcattgccattgactactgctatctactccaagctccctcgaagcttcaccatcatcgtcatctacaagccattgccatctcaccagcttgaatttcagcaaccaaatcacacacaaccaccacaatgtcgtcaagaatcgctcccaccttttccaaattcacccgctccctcagcacatcctcccccgtcgcccgcccaagtcacctcctctccgccaccagtgctgccaccaagtcagtaaggaaaccgtccccttccgtcctggaggaagacgcagaggtatgttttctttcccatcgcatccccttatctactcaaccaattctaatatggttcccagtcaacccgcgcccactcaacctccacctccccgtcccggcccaccctcaccaccctccaaaccagccaacctcaccccttccgcttcatgcaaaccttccaccactcggccccccgccccgccacggcgcaccacactgtcgactcgctcgtcctcccagacctcttcgccatggaccccaactttgacccctacagcaacatccgcgtcccgctcctcccggataacatctctggccccccttccggtctgttcgcccctgaggtgtcggattttgtgcctgaacaagccgcaaaggaggtcaagattgtggctgccaaccccgacagtgtcgcgctgccagagggcgggtttgtggacggtgtggagctgaggtttgtgtatcaaatgcagcccgagcagagcgggcagcaggagtatgatgagatggggagtgggatgattaaggatttgtggagggggttggtggacgatgttatgggttctaaaaaatccactgcttaagggttgcggcaaagtatgaggtggtttggtttttttttgttttgttttgatgatgtgaagcgttatatgtttttttaatctgcttttgtatcttttcttttgttatcacggcatagctttgatatctcttttggagattttttatttttatggaacaagcctgtcagcgaattgacagcgggagagggggggtccgcatggaaaataagacaacgaggccgagatttggccatgaccgacaacagttacagtcacttctgtgttttttcttggagtagagaccttgatggggatatatacctgccagcgttgcctggttttggtttgaagggatatgaatgaagtcacacgttccattccttcacttattcactcatttacgttgtttcggttacaaaagtgacttgcttatcgtcaccacaccgatggcgacggcatccttttggatgccgagcggtccggccgaataatagttacacaacccggaggtccgctgacaccgagagaaatatctagaaccgggctaccacctgatcgtggacgggtatgaaatttccaatttgtggattgcatctcgaataaacgtgcttgaactcagccaccaaacgggaatgtgttaacatcccatcaaccaaaacggtcaccttgcccacacgaaaacagtcgctttgattttgatagttgattcgatgctatttacacactccacatcacaccgcccatctgcccacccaccgcccccataaattaataaatcccagacccaagaccgctactcccagttcagtttcttcgttgtcccaattagctgtatacgtacctagtttcagcagcatcttccaccctattaccacaaaaacccagaccaaatctcgccccgatccctttcctccccagtcctggcagccaaggacgactctacctcttcttaacgctgggtctgggcttgcattcgtccggctgcaccgggtgcagcatgaccttgttagggtacccagctgtgttgccctggtagcccttggcccaatcgtagctgatagcgtacgcaaatatgctgccggtcttgttgaacgtcgtggcagcaatgctaccaccgacattggggtaccctttcagcctatgcttggcgtccttatcccagaagtggaatgtgccatcgctgcccgcggtgctgaaagtgccgtggacgggatggaaagagatatcgttgacagcatacacgttggtgacgttgccctgtgggggatcacggtggcacttgaacgagaagttgaggctgggcggcacgtgttagcttcctggaccttcactttgcggcgagagtcgagatcccaaactcacctagcatccttgtcttcgacgtattgaatggcgcagcgaccttcaatactaccaatggcgaagcccatcgagtcggtaaagcagctcaccaccctcgtttgccacttaagcggacttgtgatcgtcttgtagaacttggttggatccttcaggttgatgacgttgatgtatctctcggctgtccctatcaccaggaggtcgtttcgtacgtccatggtgtacacacgttcctggcacgttacggtcccgactggtgtctgttgccggaagtcccagtacttgatggtcttgtcccaggagcctgttacggccatgggggtgccgctgttttcgaagtagcgaacggcgcgaacgggctggtcatgttgcgcaaactgcatggtttgactggttgcaaggtccaccaccttgccctgtttgtcggcgcctccagagattacttttgtgccatcctttgagtgaaatcagcaactgtgaaaatgtgccaagcagaccagaaccagaaccagaaccagaaccagagactcgccataccttgaaaaagtccaccgagaacaccggcccatcgtggtcgtacgcgactcttccctctccctgaccattgctcatgatctcgtagatccggaccttcttgtcccaactggctaccgccaacagatctttggtatcggccgggttggggttgaaagcgatgtcggagatgctatcttctgggccattggcgagcgcgacgtcgttcttcaagtctccgagggtgttactcgccgacgcagacgacgtgccagatgagaaaaggcctgccatttttggtcgtgggcgtggctacgccggaaaaaaaaacacttcgctgtttgtgtcgagactattgcgcggtcgatcaagggcttcgccgggtatcaaagatagaataggaagggaaattgttcaggtggttgtaaagttgttcgagagatgggaacaagtcgcaaaagttgacaaagattccgtcgtcaggttcgcgaaggcagctgcagcacaatccgaccagagagcaaagcaacgcgccagtgcctctcgccaagacaagtacccgaatgcgttcacttgcaccagcctcacgaaagagcttgggccaccaccagattcacttgctctttgtagctcgaatcccacatgcccagccacaacacacacaccccactgagagcacgaagccccactaaaaagttatctactttaaaaaaaaattccaccattcccactctttttcgctttcctcctttcgcaagcaccctctcgcccgacaaatcgctattcgaagctcacaaacggaaagatttcccttcggggcatctctttcacaatcaccacacagctttgggagaaagtccccggacattgccgagcgtgacttgtcacgatcggtgttgcggaaacgcgccgccacagaagcacagcggctgatctctattttttgcccgccttgttccttgtctttttttctgttttcattgcccggcctcatcacacccaagtcgactttgatttcgcttttccccatgagctgggttacttgtctgttttgcgaggctggagaccacatggacgaagatatgagtccgcgctctgtgctgttcgggatgggctcgtcttggttcctctgaggttggtggatcgggtcgatggtggggctgccgtggtggcagacgtcgtggctgggaacgtcatggcgcggctggagaattttcgtcacgataccacagatatgcgattgcccatctctctcgaaagaggggatggagttactcgacggggcttattctcggtgcgagggggtgcttcaacacaaaccttggttacgttttgcctctgtcgaccttgaaggctagccagcatggacgagccgaacactctgggcttcactggaggtcaccttttttttcgttccctgttggttggtctgcttggttgctggcatctgggggcttttgaggtctgggggctttgcagtctacatgatgagaaccactaaaagtcaagctctgaggtgccaaaaggtcccgttgatgacttaaaatgcgttatggtatctgactgactgtcaaagattttgttctatttgttcttgatattattagatagaagtgcgctgtgctctaaatatgcagtgtctatgccttgtgtgtacgagcattgtgaggcctgttgaagtctcgccgtcgccagttttcccaatgctgtcgtttccaattcccatgtacggttgaagtctcaggaaagcaagaaccacatcacttctgaagcttttcctccttcttgcgctgttcctcttcgagaagctctctctccttatgagcggcctcgatgtcggccttcatgcccttggccctttgacgagcttcgtagaggtctctgctcttcatgattctttggacaatggtaccggcgttgacttcctcgaattcgtggtggccaatctctctgtagatgcccatctccttgggagccgcgtacacatcctttgtggatggcataaatgatgttgggccgtggtaaacggcatcgggggtgctccatgggaacttggccaagtactccttggtaggctcgaagggggcgccgaagatgacggcattgacgtactagatgatcatgtcagtcagtcgatctggaggaggaatgagatgatgagatgttaccctgcattgcagaacgcagaggccgcgctcgtaaatgttcatgatggggtagttaacgcccttccacttgttgatgacatcgtcgtcgtggacgccagccgccacaaacaccgggccgtagtcctctcccttgcccttgcgctcgttgacgttctgctccgagtaccaaccgtcccctctggcgagctcctcctcagcttcaaccaccatcttgaggaactcgatgtggccgctggagaagaggtcgaaaccaccatcgacgtacacgacccgttggccaatctttggcccgatacccccaaacaacttgtcgaacccattctcccctgaccagaaccaaacctccacaccgggctgcttggccgtctcatccgcagcatacagcctaatcctctccttcatcgcctcgccttccttcttcctctcctccgctgttcccggaccctcctcaccctcgagcgtcttttgcagcgacttgatgaaatgccccctcgtgcaaagcagcatcctcccaaccaaatcggtagtggagatactcggcgtccgcttcacaaccttgaaccgatcggccgccttgacaaagcggtagcagtcctcaccgctgccgtcagaggtgatgtcgtcgccgtggacaacgtacttgcagccgtagtgggtgatccagtccagctgggtgacgtagggagcgtaggggatggacttggtgacccagcggcaggcgtcggtggccatgaggcgctccttgaggttcatgacggtggggcccttgttttcgaggatggcctcgtccgagtggacgccgacgtagagctcgtcgccgagttggcgggcctggactacggcgcctgcgtggcctattattgcatcatcagaggtgaacggtagaggatggtatgggtgtgggggagactgaccgtggtggaagaaatcaaaacagccatctacccagagacggccctcgaggagctcaggggctggctcaccaggggggttgacgggatcggtggcgctcatggctggtgacacaaaaggagtatgttgttggggagtgtttgcgttgctgggtggtggccaggagtggtgcttgtgacttcaaaaatataaccgacggagtcaaatagcagctacaatggaacccaaaaattcaactgtaactaacaagagaagatgttgtggaatgaaaagcacaacattggcaatcagaccctaaagatgtgtttaattgcccaggaagccaatttgggcattgagtgtctgcccctccacccctcctcctcggctggcccctcccccaccttcggtgcagcgatctaatgcagggactcaaactgcccgcgctcatctcagatcaggttggcctctccgagtcccatcttcgatcacgggaggacgggaaacaggaggcaacagagatatctataaggtatgggaagagtcgggaatcctggacatggaccaaccttgcatcaccatccatgtttcagaagggtcgaccgctggacaaccccaactggttccccggattttcaactgccctcaacccagggaaaagacgcggccgcttgagctagcggctgatgtgctgcgacgattcaacgtcaatgccctggcggcggcgagttcgcggttctggatttgacagacgacggtcgagatggtgttcaggcgggtgcccgttcgtcgtcacctgcatcagacggcatggggaaccccctggacacatgcggccgccttactctcccggccatgtgctttttttgctacgatggagagagctttggtaatggtttaagaagcacggctgtcccttcttcgtctcttttcttttgtctctgtgtatcgtcaacaccatggacatcaccatatcttgatatccaacccctgtcacacaacgcctacgaaccctgtcagcggaacataggggactgctaaagcatccaacagctcctgccggatccagggcgctaaggtatccccagcaaatggcggcgcgttgttgcccttgtgccttgcccaaagaggtcattttcgcacacatcccaggaaagaggaagcagtgagactgtgagacatgcagcgctcgggagccacaccgacgcagacggccgcgccctttttcgcgtccctgtttggcggcggtcatcactcgtccaactccaactccaactccaactccaattcgcactcgcactcgcactcgcacgacgacccctcgtcgctgtctcccaccaccaggaaatctccgggaaaatccatcaggtcgctctcccgtcccaccagctcgggcgtcgacgccgccggtgacacaggggctagtccagcccggcaacacaacgttctccacaagagccgcgatcgcaggccctcatttggtcgcaagccctccttctcctttgcctcgtccagctccccgaagcgccgcgcaaactcgtcgtcgtcggccaatggcgccgcaagacctccggccatccagctcttccccgacaccgacaatcccgtgcctccgctccccaactacgccctcgcccaggccgtgaacaagttgtcgagagagaccgacgccgtgctgtcatcccccacctcgacccctgagggtttctccaagatgctcagtcgcacgacacccgcgaacggccagctggctccccctcctgttctccagggcggaagcagcagtggccaaccgagcgagctgagcgtggtgcaccagcatattcaagagacggcgaataagaggatatcgacgttggactatctgcgcaaggcgtaagcccccgctccactatctgccatctccaaaccacatcactgacacttgtcccgtttgttttccagccacgaaggccgcatctactggttcaacaccctcctctttgacaaacccgacctccaacgcatgccttatttcgatccacgcaaactcgcccgccgagccacaaactacctgctgcttggaatctccctaccagcagtgatagacctcaacagcagcaacgctgttgaattcctcaaatccttcaacaccctcctcacagaattcgactcgtttcagcaactccactccgaatcaggcgcttcgtcctcttcgttgtcacgagcgagaataccacagatgttccgccgcgctgccggccctgccaagacaagacgatcctccagcgcgaccacggcggcggcagcggcggcgacggcatcgctggccggcacagcaggggagtcctccctcggagagcagcaactcgctcagctggagagtctggcgctcacaccatcaatcaccaacacctccaccacttacccgggtgtaggatcaggaacggtcaacgtcacgcatccagcgtcgattatgaactttgcggggtccgagattgatttacttcccggggaggagtacacccacctgctcacgccaagtctgccgtttgacccggactttttcgagacgtttgccactttgtgtgatgtcttgattgatacgtacacgagattgctggggctgctgccgagtccgaatcattgtggggggagcgtggccgagttgtttagcaaggcggatgggaaggtgaggaagttgttggttcagggggttgtgagggagtttgaggaggggacgagagccggggtgaagagtgaggttgcgaatgtggggaaggtggtgttgagcgggttgatgtgagggataggaataggctggttggaaagttggggagcatctatctacaatatgggtgggaggaagggtgcatggcgttcatggaagcaatgtttgtggttttttttggggggggtttttgaagggactggaattttagcagagatatcctgttggcattttacaaaggtataccaagcaatattagcgttgaactcgatgcacgctgataaagttttgatctatatactcctgtccggtacctgtggaatattgacatctcatgtgtcatgaagtcgtttgatgctgtcatgtgagatgggatatgccatgtgatgctgcttatacaaaggaaatgacaaaaggagggatgaaaacacacgctcgctcgctgtccgtaaatgccacatcacaaaaatcacaaccccaacaccgaccccagcccccttttacccctgaaccacctctccacttgccacttatcacctcataatccccttttatacaacaacaccctccttcttaacctggaaataccccctctcccgattccgactcctctccctcctccccctcgacagttgcaagctattattcgggctcgtcgacctctgaatctcgctcccgaccgccgtggcaacactagccatggcgctctgtcccaccacatttccactcccggtggttgccggctcggggagcttgaaagtcaggagatcagcagtcgacctcgtctggctcagccgtcttctgttgtcgggcttttcgctacccggactcggggtccggagctgggcggggaagttgggggacttgagagtctggtgactggcgaggtggaccgagatgatcgcgttggtggcgggcttctcgttgaggagggactgctggaggcgctcggcggtgcggcgggcgcggagggcggcggcttctttttctgaggagaggagttgggagtggaggtgggagaaggaggcggtgttaggcttgaactgagcggggctggttgagctgatgggaggaggggaagggggttgtgggaggggggacgcatcgacctcggtgacgtccgggttcgggtcaggcgttgggtggtggttctcggttggtgattccgcgggcacctcctcgacagatactttcgctgcttttggcaactccacaacagtcttgtcgccatcttcctcctcttcggtgggttccgtcaagtcgatcacctccgtgatcaccacctcctccacacacctcgccccggcctcagatccatcatnnnnnnnnnnnnnnnnnnnnnnnnnnnnnnnnnnnnnnnnnnnnnnnnnnnnnnnnnnnnnnnnnnnnnnnnnnnnnnnnnnnnnnnnnnnnnnnnnnnnnnnnnnnnnnnnnnnnnnnnnnnnnnnnnnnnnnnnnnnnnnnnnnnnnnggtagaaaagaacaaacaaacaataaaataaaagtaaacaaaaaaaaaagaaaaaaaaataacgaaaaaaggcagaaagaaaccaaaagatggtataaaaaagaacaaagggaaaaatagtagaagaaagtaccgaaaaaaaataagcaggcgacagagggggaaagaaaaacgagcagaagaagaagagaaagaaagagagaaaaaagaggaacgtaaaccagtaaaacccaagcagagaggaaccaagacaaaccagcgcccagaagaacaagcgaaaaaacaaacaaaggagaggggttaacggggtgagagggggggagagggagggaggtttctcagaaagaggcggggtttgctgttgttctgaagaactagagggggaggggagaggggagagaagggctgcgttgagggttgggctgtggggttgctcccccggccccggggggtcgaggaaacggggggtgcggcgggcgttgccgtctgggctggagacgcggaggatggatttggggaccatggtggaggttggtggtggaggggatctgatggacacgtgttagtcttggaacctgtccgcggctgagagatggcaacactcactttgacctcaccacacttcccaccagagtggaagcctgactgagccgtttggcagcctcgggagctgtcttgttgaccttctccaaagacccattcttgcttccagactttgtcgactcttccgaccgcttcggatcaagattcgaaaagtttggctttgcgtgccttgccttagcactaactggatcctccaaccccatgaagccagaaaatgaaagcttccgtgacattgatgccggacgtgccttcttcttggtggtgttgtccctgttgctgttatcccagcctgtgccaaaactatggctatgtctccgttgtggctttgaaaggccttggctaggggtagctgtgtgttgtgtggcagtcgacgatgtgctgtttgacgatgacgaagacaacggcgacgagtttgatatgatcgatttggggccaatcttggtctgtaacccagtccatgaaagaacagccgagtggactgatgaaaatgaatccttcctctgaggccggcgcgcaccctccaacctatgctttgtctctttggtatcgttcgacatgttgatggcgatgtagcacggggataaggggcaataaacacagaaaaagtgggttgacgaagcacaccaccataaagaattgtttgcaaacggggtcaaatataattgtattgtctacggaagacaattgatcccctaaacaaaaacaaccaagccggacatgtgccgatttggagtcgaggtagttcaggcatggagttgggccacaagggcaccacatcgcgagctgcgcgggacccaatcacgacggcaggacgcacatcatgcagtaatctgcttccgtgctgccatctggcagcactagacgggacagggtcatttacccgtggctggggaaacaggtaagagctgtctgaaactggtcttgatggggcttcctagcgtacacatcgtattcctgtagaccagagatcgagattctgaccactggggacgacatacagacagcccaagatttcgccccaagaggtcatcgccaacagcacagaaaactcactgccactgtttcggtactcggccccaaggtgtgtggactaccgggcctgaggcatggcagatgccaatcggcgctaaacaagggagaaggtgagttggcaacagctggcgtcgacagcgtgtcaatgtcgtgcgggcggttgttcctgctggatggagtctgtctcaggatgaacccagagcgctgacattggtagacaggagatgagatgacgcacggcgccgggtcagatccgagaggctactggttcaggacgaggtgaggaagccaatgctcaagtacgcagagacgcatggtgttgttcaagttgggacttttgaacgtcatggcgatagatgtcaatctccgacggagacagctcgtgatcatccagctgatatgacatccgagtatcccggaaattgatgccaaaagagatccgatccgatcatgatcgggtcacacggacggaaccgagagatatgccggcctaccaaatcaacggaagggcgcctggtcagggccaacaggagaaggctgacggcagaagcgtgggagactgtgaaggtcagcacttttaccccgcggtgtaacagatcaccccgcatccccaccacaagggaagttggggccatgggacctttgcgacagggctttgattggttggataagggaatcttatcgataccccaggtacggatagcaacggctgccctcggtccaattggttctgaagctcaggttccgccaaaaatgtcaaaaaaattccatggcttccgttgcgacaccatcataaccaccgcttgccaacgcgttgtatcggtcttctctcccctgccattgacgcaatctatgcatcaattcattccaagggcgtgacgtccttcaaatgggtccgatgtagcaatccgagattcgtgcggctttgctctgcgaagtcggccaaccaccgcgagtcccaccgctttgcgactcattcgttcgtccctttcggtgctccgtggtccacctcctccaatgagtcaggaagccgtttcttacccagcgccgacttttgcccctgcgccgctgcccggtgagctccggtgctcggaagggacggggtgtttacccagattatcggtgtgacgtgcgtctgcaggctgtcgtttaaggggtccagtgcgccggaagctggatccgaccctgaaaatgtcgagagagagtcaaagtatttatcatggatgagacgaagtctcacggccagtcccggctgccgacggcgaagggcttccgcactagatccccgacttgatagccaagccggcgctcggagcccacgctcaacttttcctgtttgctgttccacgccttccgcttgaccatgtggatatcctcccgccagggtgaggctccattggacaattggtgacacgggaccatgataagaagaataccctggacgacccgccactagctcaaacaaatccaaccttgaaggatttaaagatacctctgtccaccctcctctgtcccctggctaccgttaactggcttctttcacctttcattgtcactgtattcctcctggctcacatattgaagcaaagacagcaacgctctttgttctccgagaccgagtcaccccgccaacttccttctcttccgaatagacacacataaacaaatcctccaacatgaccgtccctcagaagcgccccgcggaggacctcaccgtcaccgccctcgacaacaggatagccgaggagcccgctctcaacggccacagcaacggcgccaacggccatgctgtttcctctctccctaccctcgacgcctccaagatcaccatcacccgcgccgaccctaatgcccgcaccgttcccaccgaggccgaggccaactctggcaacgagaccatctgcaccgaccacatgatcaccgtctcctggaccgccgccaagggctgggccaaccccgagctcaagccctacggccctctctccctcatgcccaccgcctccgtcctccactacgccactgagtgcttcgagggcctcaaggccttccgcggctacgacggcaagctccgcctcttccgccccgactgcaacgccgagcgcatgctcatgtccaccctccgtatctccctgccaggtttcgaccccaaggagcttgagaagctcatcgagattctcatgtccgtcgacgggccaaagtggcttcccaaggagagagccggctccttcttgtatatccgccccgccgtgattggcacacagccccagctcggtgtccaggctcccaaggaagcgcttcttttcatcaccgccagcttcatgccgcgcatggatctgcctgagggtggtatgaagctgcacaccaaccccgaggacatgatccgcgcgtgggttggcggcttcggttatgccaaggttggtgccaactacggacccagtctgttggccactgccgaggcgaggagtagaggtttcggccagatcttgtggctgtacggacctgagggatactgcaccgaggctggcgcgagcaactttttcatgctctggaggacaaaggagggccagctccagcttgtcacggcgccgctggatgataagctgattttggacggtgtgacgagacgcagtgtggttcagcttgcgcgggagaggctggcgggtgagctggaggttgtggagaggaagtacactatcgatgaggtgcttgaggcggataaggaaggaaggattgtggaggcttttgcggctggtactgcggtatgttcttttccttatcctcaaaaacaagttctagaagttacgggttactgacgtgattttttttttgacaacagttcttcatctgccccgtctccgagatccaccaccgcggcatcgacgttaagatccccatgggcaaggagggcaaaattggccactacactgccaagctcaagggcttcgtcggggacatcatgtacggcaacgagcagcatccttggggtgttgtcattcaggagcaggagtagagcggtttgtgtttgaggagcattttgcatctgcatcagcattttggaatttcaaaaagagagagcagggataccatagaggtgtcgatatgggatgttgaaagtgaacagagcaaaagcgggcgtttgggacaagggaaaaagagcagggttcttgtttggcattagcatcgtagctgttggactggttgggacaggaggttaaacttcctgtctattttgaaatggataaaaacattgaaaattctcagtgccttttttaaatgcagctgtggtgtggatgttgttgctgagtgagggaggtggtatttgttgtcgccttggcttggacactcagatcctacgtaaatgcacacctagcagtggcaaagcagtggtcatgataaataaaaagacgattgttgattcaactcatcaaattcaccactatcaatgctggctttcatttctcaactccaggtcatccagacctaacaaccaaacaaagagggtatcatatctcagggggtatccggtttctatccccattcgtatcccgtcatcccgatcaacccaggtcaagtcattcattcgttctgatgccactgaaaacaaccgcgatgtccctcaactcaaaaacttcaaaaaaaatcaacgccttttttttctgccaaaatatgccatgtcattaccatcgtgagattaacccgtatacctctcccaacatccgcttcaacaccccatgccattccaaaaaggaaggaaaaaaaaaaacgaacgcaatgcctacttgcaaaaatcaaacgcaatgcaattatccccttcccactcaagaatatcaatccttcaatatcgtcaaatccaacccaggaatattcctctcccaaggcggtattgaccttgccgaactccccgttctcgaccttacaggaggtggtttctccagccctccccctcctccagcagacatcaccgtcccctcactagaactcatcccctccgtctcctccccctgttccttctctttatctctgtctccctcatcatcactcccccttcgcccactctcctcacaatactccacctccgccccccccctcctcaaccccttgaacctccccagtatccccgcccccttctcccctccctcatcaccccccttggctttatccccaccatcctcccaccgaacaacaaaatccaccatctccctcccatccctcacagccccgagcagtaccggatacgccaaacacccccccaacaaacacagcaccggtatccccacagccaactccacactcaacccgcccctctccctgatagcataactcacaaacggccaaaacatcgggcccgacgcccccatggtcaaccacgcagccgccctcttcgtcctctccccctgccccctcagcccaagactaaaaatcaaaggccagatgggaccctcgcaaaagaaaaacaacatgagcggtatagccaccaagttagggttgccagtgtgcggaaacaccaagatgaccaacgcaaagaccgcagagagaaacacgcacaatgtcaaaaccgtgcggggtttggggacgagtcggatgtgaggtttcgaaacgttgaggtagaccacccccgccgcaagaaagcgggaaagggcaaaggctgtgtgggcgatgaggaggtagttgaggatggagaacttcagcccctgggggcggtagtccgccgctcttttggctgttgcggggagggagtaagacgcaaaggagctgaagagctggtggaagtagaccgacatgttttcttgggtggcgacgtagcaccattgggcgaggacggcgaagaagatggtccagtttcggagcttgaaaccgcccaaggagcgcttttttggttcgagggggagcttggaggctagctcggcgagttcgctgtctgatacctcggggaggggcatgtaatagaaataaagtgcgaggaggaccgagagtaaagtgacgccgaggtatgtccattggacgtcgatgagggtttgggacatctcgccgtcttctagttcgccgtggctttctttttcgaggttgcggaagaagaccttgttggcgagaaggccggagaggacgctgccgactgcctggacgccctgcgcgaggaggagcctcagatctccatacgccgggggaccgcacaagatcaaaaaggggttggcggctgtctcgaggactgctaacccgaacccgacggcaaaggagctgaccatgaatcccccataagcagtcaggactgccccgggccaaaacatgatagtgcccgtgccataaatgagtaatcccacaataaacgtcgtcttgaacccccctatcgcctcaacacccgggcgttcctttcttccagagcggcggtgctcgtcatgccgtagcaaccactccccaacaagaagcggcccagcaaagtaaccagccccaaagtacatcgacgtcaagcccaaagtctgagcaaacgacatccccgccacatcggcgatgacattgttaagcgtgttgagcaggccgtacgagaacccccaaatgaagaagagaatgcagacgatggtgcaatacttgaacgattcggtggcgttggtccggatcatgctctttggcttcttcatattaacaaagccaaagtagacggctgtcgcggtagcagccgagtctcggtggggaggcgggacgtagttcatgctatgggccatcgacactctcctagacgaaggtccaccagaacccgcggcaccggccaagaaatctctgatggaaatctcttccgacgaccgctcatctggcggggtgatgacaaaagctgggggatcagcttgcgtaaatggcgaagggtccgcgatgtcgactggagctccctcggcgtttgccagcccatcagcaccagccctattgttatcgttgttgttcttgaaaggcgacggctcatcccccgtgagcgtggtgctccgcctcgtagcgttgggatcatacagcatagccggcagaatcctaacaatcagcggcttgagcgtaggaatacacgcacacgtaatccccacgttgacctcgacggccgaccacatcaacgagagcgacgcattccatgaaaacgagggactctgtccgtagagcgcctccctgttcgaggaaggattcatagacgtgatgtcaatcgctttctgtaagtaatagatacgcaccacatccacaatcgtcacaaagatgccgagagagaacgtcaggatcaaaatgatcttttgcctcggcggcagtctcatgctggtcaacaccgggattggcagcgccaggatcgccaggtcggtcgtgacgttgataggagccgagcagatgaattcggtgagcaggggaatgcacctgatcattcgggtgttgatgtcccacgctgccgcgatggggtggcactgaaagatgttcataaatgtcagaatcacccccgccaggttcaccacgcccaacacgccccaggaagccatcctaagaatcttttgcgtgttcttcgccagccgcagatagaaaattaggaccgaggatttcgtcgccatgagagccgggttctgccataacgtcagccaccatcttgttcgcccttgggccagtgttgctcacatagagaatgctgaaaacatattcacacatcttcagcccaggcatcttccaagcgtctacatggtccccatgccttcctaaacccctcatggttccaaaaatgatactcagactcaaaaagacggtgatcagccacgccagcacgatgatgtagtcatcagccccgaacctcctgactatcccgatccgcgacaccatcctcgccgcaacaaacaccgacgccagcgtcagcgtcgctgccgtcaccgccaagaccgcaggtccccggtcggcgtgctcatcttccccttctgcctgtggtacgctgatattgttgtggtcggcctgtctgtaatggtggtaatgatagagtgttgacatgttgggcgacgggtggcgaccctaagtcaggggtccaaggggtgccaactgaataatgtcaaaaaagccacgccgtgtcgttgagtacaaggctggctggcgtcgctggcgtctctctgcgcgcgtgcagatccacgcacgtcgataaataaataaaaagccgtttactgtatcgtcgatatcgtcgttgctgttaatgatattgtcgacagtaatatcctctccatctctctcaacaacctatacaaaagttggagcttgggaaaggtctgtcaccccaaaaaagaacaaccccagcggccgtaacaatagcagcactagactaccgtttccgtctcggcagcgtcgacagcagcactatgttctcgttgaaggatgatggttgtggtcgtcgttggtgtagtagctgtacaaccctaaccgccatctcgaatctctggcagcggttcctgtcaagtctgtgcgttctttgacacaaagctgacaccatgccacacaatcaccggtagaacggaaagaaactcgtgtgcgtccttctcaatcaagcggaattcggatggcaatcaagttcctgtgcctgtcctgtgtctgagtgtgtggtgttgcgactcggcaaacgtgtgaacccaggggtaaccgttgtttcgtgcaaagtgccgaggcgaaagaaatcgttgccaaaacagtataaaatatgcttgatgtgcttgatgtgtgaaacaggcgtactttctctcccacttctcgccgttctgtccgtctgatctaatgatatttggctctcggtattcggatttggatttcccttcctttttctcaccccctccaggaactaattcgggtagtggtaaggtatctttcaaaacaggtgtccccctggcagggtgaaaccagttcaccgtgtagtgttttgcagggccatgagtcgtgatagcaaatatatcgcggggtgtggcgggatagacaagacccctgctgcaagtgtatgagggtagggttcaatattaaggtttttacaaccaccagtaccgatgtgcctccttggccaatgacatcaaagcctgggacaaattgtcagaatcgagcttcggtgaaaagaggaacgaatcgatatcgtcaaaaaagaaaaaggcctcgacgccacaaaattctgtgatttgtgacctgtgcgtgtgtatgtgtgccaaaagactcgagcagaagcagtaagaaaaagccaaggtgtgtggagtggcgatggtatggggaggtcgggaagtaataacttacagcaaaaaagatgggacgaaagcgagaaaaaaacctgcttatatcttacaacaattgctatgattatcgatatccctttttcaaagattttccccttgtgcatggatgggtctccctcctcataaagtgtaataagtatccagcagcgagtgtgtgcccggatttgcaacttttccattaccactccactactcaccgcttgctctctctctctcggctcctccccctcactctccatctctacaactcatacgagaaatgccgttatgcgaagcactgcccactttgccccagcttttttctcatcttcaatggcccccagcctttttgctaaaccttaaatccttcgcttaacccaccactcttgcgtgaatgatgtgataaactctttgcctgcccttttcccgagcgagacaaaattccacccctccttcggaggcaactccccttcccccccaagccaccaaacttgataaaacccgcatgatgcaaactctcatcctattaactaccccttcaattcctcacaaggaggtcagtggctttctcaccaccccccatccgcctaccttttcactaatcatcctcccgccgctccttgttggtcatctgccttcgttgtcgtcaggttgtcaaaagtctgggcaatgacatagcccaccccaaaccgccccaaccccagcaagcacgtggaccaatcaccgcccccttcggctggcaaagtccccgaccgcccggctccaaagcagtgtcttggcagagccctgtgacacattgaccattcaaccgcacatcgcgcgccgccgcgttgccgagacattctcaacctcacagaacaacaaccgcatcgttaattgctgtatgtagcggcggcgatcccccccctctcctcctcaaatggaggggcaaccaaagcagcagcccaggtacgcccatgataagggttttttccagtaaaacaagaactacttgaaaaatcccgccatgccacaagctttggcgagcggaatacaaaacctagatctcgcttccctcctcacgttaattggctctgctatcggtgcctgaaagctcctcgccccagcgagtcggaatctgcctgccggcctaataacaagaagtgcatgtttgccttatgtatgaagaaagcctggatattttacctcgtttgagagatgtgcaattcttggctgaggaataacgataagcaaaacaaaccaaaaaaaaaaaaaaaaaaaaaaaaaaaaaaactcctcacagcccatcatcatcatcgtcggtgagaaaccaaaagaaacaaagtgaaggtttcaaaagtagctcctctctggtcccgccagcgatgacggctcctgcggaacccatcgttgtgtcatccagggaccagggcaagttgctccgctggtggctgctgtcgtgcttgtgaaatgctatcgatgttgtttcactttctttgctgaccagactcccgtgcctggccactgaaaaaatagattctgtacggacaggatgacagacatatgacttcctgtccgcccccttttccagaaaagtccacccttccaaacaccacaacaaagaattccaaccgtggctatgacctcacggataaacatcaagtggacgcaccatcaccagccttgccgtctctgtttgctcaattccagaaaaccacctattcaccacccagactttctttgtacagatatgggtatctttcccgataattacagcaacgcccggcatgaccagacaagcaagcatctcatccaaatggcgtcaactccgatagttctacccagtattcggcgccccagctaggaaaaagtccagctcattacccgtacccatcacagactcattttcggccaattgttcgagaaggctgagaaaagggtctttttcatcacctgcggtgcccgcagttcctacactttcgctgggcgtaatcccggttgggcttgtcaccatcgccccttttccgttgcctgcttcttcgccgtggtgccacggtgtgggtgtcgaaaaagtgttggtagggagctcaccaaacatcgggtcgaagccttggtgtgggccgcctgtgcccggtgttgtggggtttcgatatcctgaaaagttgaatgacggactgaataggccgctcgacatgctgctcaacccagccgggagttcgccaggatgccctcctcccattgaaaacccacccattgcgtgcggtgcgctttgttcatgcatgccgtggaatccgcccgtcaatgaatgtggtgtgtgtagcatatttggcgactgctgcgacgacatggacgctgctgagaatgagtggcgatgggcactggatggtgttgacaacactggtgctgttgccacttttaaactgctgttcaaagacaaaagattgcgtaggtctggcctcttcctgcccgagggcgctgtattctttctcttgaggttcggtcgagatggccctgcatcgcccgctgtgagacgcggcgcgtagagatcttgaccagtgtacgcatcagcagtaaagtcgacaaccacatccgaaaggttcaagttggcggcatcaaaactaaatgcttggcctcccgggctggtggtacccgagtaacgatcaaaaaagtcttccagatggaataccggggactggcgcatggcgttgctgttgtggctcttgacaagtcccgagtgagcattgtacatgccttgtagtgtctcccgttgatgttgaacactcgcccaggcataccgcagttcactcagctgctgcatctctcgcgaaagaaactctgccgaggaactaaacacattcatctcgcctgtatttcccaccctgctgtagtgagcgccgtgtatgtggactgtccctgctgtggatatacaaaatccaacaaatgccggccattcgatcgatgctgtccgctttccgacctccacaagttctgcgatagcgttcgcatggaggaaacacatgttggtggcttctatctgccatgactggtgctgccctgtcccagtaagttccgatagatcgatcggtagaaatggtcggtatataaggcagtgaataagatggtaaacaagcttgctcaatacaagcacggtggagtcaggctggccaaaaagtgaatccaggcttgaaaacacatcctgcgtcccagatgcccacacatctaggtcttggcggatctttgagagattggatagagagtgccatggaaaatgcgaatctcctttaacgcccccagctgccaggtactggtttgttgttcccaagatgcgacaaatgtcgatgagcatgccgctgcttccttgcgctttctttcctgtgccctgtaaatattgcagattggtgtagctctgaaaataatccccatcggccggtagcgacccgggaacgggcaaccacgacgggagcctcaagatgatggctctgtctgcgatcaaggaagggcgttttgacccgcaggccatgaaccggtcgagcagatagcagctccaaaacaattttcgtcgtgtctctcgctcggttggcgtaactcgtgcgttgacgtccatctctctgtgtagttcgagtgccatggccatcccaaccgcacttgctagttctagtcagcttcagtacacaggcactatcacggcatcaaatgcgtactcagcaacatgtatgcccttttgcctttgccagccgcagtgaatgcggtgaccagcagcacgagcgcctgtagggcatcgactgacggctcatctgtgtcgatttccaacctcgaccgagtggcatagtcttcactgagctttacagctgattgatagccactgggatgaggggtatatctatgatcggggtcagccgagattgccgcgggacagatcggtggcagtaaaggcgctcacctcgctgctaccgcaaaaatggcatgtatgagataatcaggagcttgactgagttgtcgtcgttgcctcagcgtagattcgtccaagatatgaaatggcttgtcatggaggcgactgaagtaagtatcgagaagatcatccggctgaacctcaggggatggcgggctagttcaacagcgaactgtcagatttctccgaccaacaacgcaacagggatagccagggcaagagtagcatacctcgagtctattgatgagaaaatggctaggtcctcactttcgtggctagcctcacttggtcccgcttgttgctctggtttatcatctgtttttgtgcctgttgttgctgttggagacaccgactcatcagagatattggtaggcgggttttccgaggtggaagcctcggggtcagtctttttttctttcagtcgagcctctagcccgtcgactcttttcagtaaagcttccaaaacatctgttttgggcccccttttctttggaacagcatctgtagtgatgatgagcaatgggccaaggcaacgaatgattgaattaacctaccgtatacacatgggcactggaagacctggcaggcttcacaggcaggtcgtagacggttgcatttgatctggtttcattcgccctttatcaatctccgaccttgaagttaccagaatgtgttgtggtgccttgcataccttgcgttttcgacacgatttgcagttcatagactctcgtggctcgttactcatgcgtcgtgtaggcagtcgttcaatgctgacctgtggccgtgacattcctgggggatgcattcggggcagtgcagcaaccgcccccgggtcgtaggcttgtgccatcattcctgtcagtctgtggagctggagatcgactggtttcctatatgccgactccaggtgccccttctcggcatgttctctccttcaccgatgtatatatatgggggctgagccgacaagaaatatcatgtaagtggtggcgagagtattcgctaggtgggggttgtcgttagcacagtgagttttcctggttgatggcgagcctcgggcgtcgtcttgggaagtttgacaggacgcgaagaagggaagcttgacaagtaggtggtcgccttatggctggaatggttggcgagatagtaagtcgattttctggggtgcatcaaagtgagccgcccccgcagacagcgtagcacagcacaataaactggggatcggggagtttggtagagagggagggtcaagtatgggacgagtaattggtcaggggccggcttgtcagacaggatgatggggcgactaccccggatggaaggtttgattctggggagtcccccgggtggaagacaggggaggctacagtgtaagtacctaggcaggtaggcttagagccgatgacgggaggtgtgtggctatgagatggattgttggatcgccagtgagtgaacggataactcacattcaccctccccatctagagcttgatcctcggccctttttgctgaaggaaaacacaatgtccatatgatgattgggcggctgtctccgagcatctgaaactaagagctagagccggcagtggccgtttaaagacgagatgtcataaagataaatgtgaccgaggatgatgtcgaggcctgagaggcaaggaaaccatgatgttcaattcccacaagagaaggtagcagcccaacccagcggggaggggtcagtggaaagatgttggccaacactggaacttgagaaggcacgatgtgtgtggtgcggggaggggacgatgccggtgagttgaaggatgagtggggttggagaagtgggaaagagctccggggagttggtggagacgatacaccttacggaaagctgtgtttttcgggaattccagtttgtccctaggcgctgccaaaagcagaatgggttcccagttacagcttgtccttgcccccttcatcccatattccctcccgtcctgtccagcagtttggtggttcaatggagtttaacagattgaaaagggatgaaatttcatccttgatccctgtatgtaacggcggccccacagtaccacctccgcaaccgacggcttcagggcccgccatccacaagccgttgctctccaccccagggtcactgtgaccacttcaggacgtcgacgaccttcttactcttgatttgtattctttaaacgcgcaccttttaccacttcaaacatcgccagaaaatcaatgttcttctctcaacttatttaccgcctccaaaacagcggtgcccaagagctgtcaagggtccttccttgtctttctttggtaccgcgaagtcaagatccaactgtgattcaggaacgatgtccattgacgggaacccgatatatgaggggagtattcaatgcttcctcgcctctatcccgtctcgacttaagctctcttccacggcaattgcttctggggggcaggtcacaagcacaatgtgacgcagcgtgaccgctcgctgggcctctggagccgccttctgtttatatactgacgctttatttcatattctggtcgagctctttgggctgaagctgtgcgtcacagtgagggtgcagcgacaacttaggggtcgcaatatcttgatgtttgccgcgccaattacagctcactgttctacagtaactgttgatcttgcccggctgggctttctataccaaccatatcagccaggtatatcctagctgtcgtcaatatcgagactgtgtcccgggtcgctgcaccatgggagcgagacacccgaggtcgaatactttcaagtcctctttccgcattacatacaaggacggggaccatgatacggccgagcctgctgttctcaggaactgaagagcgttgaaggtgccgttcgcttaagcagcaaaacccggaaccccctgcaacccgcgaccttcaccaaatctagccccttgcaagatcgggctctggtccctaacggtcggcgatccttggcagtctacggacgatcgtctcccgaaattcaacccagcttcctcgcctcttccctcacctcgaccatgaaatcacctcttcaccgcatcaccacttgctttcagaacaccgcgagcttcatactctggcgtagcactctttatggagctctcaagcatctttgctccagtgaccgcttcaggttgtcgtcagacagttacacttggtcacattacacctccccattgctgttgcatggctggggatagcatcaagaatcatcatcatattgtcaactaccggaagttcggaaccgagactattaagcaaagaccggcataccaaccatgacatgcctcgattcggggccgttttaagctctgtatcagtgcagatgtccccagcaattacggtaaggtaacccgtcgagcatgatgaagatcaagcctcttcttgttcttgttcttgttgtcgatcttttgcttatacccaggaaccaagctcttgtgccttgctgttgcttgccagcctagaccaagcagctccggtagttcactgaccgcagcctgccttccatataccgggtgtatcctgcaggcggagatgctggtgccgagcgctaaggtcaagtaagtgggcacacttcctgcttgatcttccaggtttgtgctgtacatattctcgttcctcgtcccgcgacacctatcggtccgaaaatctctccgtcgtctgcttgtgctcaggtcaggagccctacaagcccggattgtcgggaggctctccggcttcgacttctcgataacgcacgatatccaggctggtctttactttctgacttcactatacagtgtttcaaagcttatttgctcatatcaacctttagcagcacttaatctacctgaacatgtagatacaagcccctcgagtattgcaagaaagatcaggttgctgtttcgaacggggtttgaaacacggttcggttcaatgggctaagatccattgacttcggtgagcttcggacgaaagcatatcactacctagcctctacatattgttcccaaagtcggattcctgtctcgtctccaaagtattcattgtctatcaaggactcgttgaatctgtagcatcactagtccacaccccaaccccgatctccgccttgggtttgcatgtgagctactgcacctccccgcaagacgatacgactgtttggttcatgcggtggacccggacagcggaagaggcaacgccatcaggttaggagaattgggatcaggggtccgctgccgatacgccaaggtaggagatttgagaatccgattcggtgtggttgggctacccgaaacttgtttgtcgtcttgccctccagacttgtacaaagtaattgttgcgcccctctctatatcttactcggaattcaagatggaagaaaatagtcgtgacgagtattctgtcaaacaagtgtgcggtacacgcctggaggcaaagtagagacctcgcactgaagacgatagcacgcggtgtacctaccgtggtacgttctctatgatctgctgagttttagacggccgagggagttgaatccatcagtctcggtgtcagatcatgatcgtttcgacgactctgccctacctacctatttgatatattgctcggctaccactcggagtgcctaccgaaaccttagacgactgacaacaacattcctagaagcatctgacggaatagtcacggtaggcccaacagcaagcctttcaaaagcactctaggcactatgctgaacggtctctttctcggcccaacccgagcctgcctagattgaaaactcagagtagggaccgttgttttgttgttcaagtcgttgctgacagcatcttgaaccgtgtccaactgttacgtctatattacttgcaatatcagaatcctgctcgagaagctctcaacctgggcaccaacgccttaaaaatttatcactagtcacatctctggtagcttccaactgtcttgttttgtgaagaagtcctggctgagattgcctccggtggggtgctgttgtcgacagtacgtcctagcggtctatgctcacaaggaccagcaactcggttctgggcagtttgtaacccggatagatagacggtagatgtaaatgtatcttcgaatttcgtttcctaattaattctcataatccccttcccccagaacctgcctgccgcaaagtaggatcatccgggactcgcatccgatagaccgctcgctcattgaccaccacatgcacctcacgttccactcgccacaatgaaccatctgtgcatcaactctgtcatgagtccccgattccaaccgctacaccataagccacacatgcagacactgatcatgggagaacctccccagaccatatgcccgatatccacctctccgcacgcaaatgcaacacctttacaccatactctagatgcccatccatccagtccttgttgagcaaggcttggctcatgtctcctcttttcttaacgaggtcgatggaccgagccggttggcgatgatcgtgacaatcttgtgttacgctgccctggctcctcatcctatctcttggtgtacagcatgtcccaagaggtcagctcgattcatgtatcgatgctcgtaatcgggtagccaggtagcatcgctcgagaacctagaccgtacctgtgaaagtacttctcttgtcagtgaaactcctgtatagcggggtatgttaccagatatcctaccatttctcaaataatacccgagccaatatgccatttcatctcctttgatgttcaactggtccgagtcccctttcaaaagaactgcctcccgctcgccaacctcacaaagctgtacggtacgttctgcccaaccagcaacctcagcgtctcaactgtcgtaaaagccgttacatccgccgccccataagccgcgaacccacattgctcagcaatcaaacccgggtcccccttccgtgggccatgccccgagccgtctgccaggtccaaaaacacccttctcgagttttcccttcccgcacctgccgcccctcgaggcggcgacccgaacagacgaacgagcatcccgactagattactcttttccggacccagagcactcaccaccacaaacggcgagccggcccccgctcgtatagactcggtgccgttggcatttaccgtacgggctctctgtatgctctcgaggctgttgaatggctcgataagaaggtctttggcaaaggcgggaggtgttttgaagccgacggtgtagaccttaccgaccttcagggctttgagagcgaataaagcactggctgcgtcgtcggccgatgaggcaagtaccacagccgcgcagccaaagtaggcagatggagcaagatcacgggtaagggtactaaggatacctttccacgaggcgttgtcaaacacgagagaagtgttcggtggcaagcccgactgcgtcgagccgacagcacccacggaatctccgttttgctgccgaggcgggcttgatggtgtggatgctgaactagatgatgtggccggccggacgacgatggtatcaaccatcccgatgagtcgagcggcttcgctgagaaccggcccgttgccattgttgagtgatgcaaagaagcctttgctcgtcgccagattggtgagtgacatggctggatttaggtaagcaccgccaaagtttctttgattacaccacgtctcgatggaggcaagccctttgggttgtcgctccacgacggcaaagtgatgtggtaacccaagttcgttgaagcatttctcatagaagggtgcctgtggaatggcactccgcatgctcgggctagtaatgccatagatgttcttctttggcagctgtccaaccaacgccagggcctggttgatctcagctgcgctcatctgccccggagctgcgatgatgggcagcagagggtgggtgataggagtgaagaccttgtttagcgtccgagagaactgacccgtttcccccatgttgacagcagacagcggtggtgaatcgggatattcagccttgatttttgaccggaagtattccaactcaaagttttcattgtggtcattgatgatggcaatcattttcacaatgtcggcgtaccgtcgagactggaggaatattgactcggctctctgtgagggccacttgaaagtgcctgagaaatcatggaaggcagacatgatgcgactgctcccgcgctgctcgtacagtcttcgtcgaatggtttctgggagccagagctcgacgtcgatgtactcaacgccccactgaatcgcccggtaaagatattcataaaacaagtctggattgtccatcggaaatcggccattctctttcgtacaccttgtcgtgaatatgattggcagttcggtcctctggcgaagaagcatgagctgttcgccaacatagctcaagcttgggatttccgagaaccgtccattgcccagaggctctttcaagagatcaactcgaatctcgacagcgtctgagccgacagtgaggatgtcgatgtttgggagcgcagcatggacatccggaaacgttgtcgaaatgaagtacgtcctcggttttgccattagtgtttcgtggtggctaagctgtcccagggtatgtgatacaaatcgtgttagatctcttcggaagaaggaagcttcggtataaagccactcgtaatctgtctgcgctgacaggtagacgtcgggaggcatgcccagtgttgtacaatgagcgttgatggtcacgaccagtcccctgttccgtgaggctatctcagcctttgcactttccgccgagaccccaataacccaatcctgatcatccctggtaacgtcccgaatccctcctttcagtcggtaaggcttcccgagaacctcagcaaagacggccactatctgctcttggccaggaccatacattatcaccactattcttgcatctccttgttgcaaaccacctcgaatcgtcatctcatgtgatgcacgtggtgctcgagtttcaatgtcgatatccatagctatgtgatttcgtccaaaactttgtcgtcgtcctggcgcgggcagcgactccagtggttgaacagccgccatcatggctgtgtctgtttttcgactcgtcgtgtagccgtaattataagggatccgatgatcaggggctcgtgtcggtgccctcgcctctcgtcccagattccaactgactgctctatgccggcgattccagttcgagccccaactacgaaacggcaggatccttctgaagaggcctattgcgcatggcctagactcccgggttgaggaagctggcttctgatctgggtaagtcccgtttgattcggtgagctgtgggcgctgaataagtaatctattgggaattgggcgaattcttttgcttttcagtcgacgtatgaaggtggcctcagaaatgcctcggaaagacaacagacgtcgtgttggcctgtcgggagtgttccagcaagtttggagaagacgtaatgttccagttcgagccaagtcgtaggtggttcggtgccagagcctcacaatacagccggtgatgacggcgggtaaagatgagacacgagacggagcgggccagagcactcaatggaaagatccggcgacatgtacgggtatatcagcacctgggtatctgccgcgtcatttgcctgggagatgggacctgggaatcaacaagagaccgagggggtttgcaagacatctgacattggggtttctggaaggtagatagcgtatattgggtcttgggaccgccaagccagtcgaaatatttcgccgacgtttgttttaccgtcatcagacggatggagcactgacggcagacctgaaccagacgagcgagcaagctgggtcaactcccacgctggcctgtctacaatcgcatgtattggtgctgctagctgccggccagggggacgggaacagcgtgtgactggattaaaatagtggagtctaggtaactgtcatcataactggctattaacattggtagttcttgtctacgacacccgattgtgttggaagacatacacacccaatccagacgtgcctggatctatcgtggcgtcagacttgccgtgacaaatgccgtctgcgatcgatacaaattatccatggccaggtccaataccgcctggaacgaacgtgccacggggcagcagctggactatcgatgattcccactgaaggaccgggagggacgatggtaggcggggaatcaaccgaacaggttcctaggaaattacgcgaagacggtccgtcaaggccaattcatccggcgttacgttgtggtcggcacaagccgaacggttgaatactgtaacgaccttgtccattcacctgggagctggaaaatgagtgagtggtgatttgcgagaggcgttcaagacagggagcgagtgcgaagaaccccacagtttctccagcacctggagaatctctctttaaaagtccgccaatgagagtgctcggatttgagcccatgctctgttcgtgcagatctgatggggggccgatgcgctaaaagctggggcaaggaccgctaaaagggccctttcccagggattcctgcacccactgaagatcttcgtccactcctccaactttgattcaatcagcacccttctccgacacccaacaacccaacaacctgggttcatgcgggcaacaccatgaaccatatctgatacattgggtgggcagtgtctaattttccgtaaatcatctgcctctatctcgctatctcgttccggaatgcttacttccatccactccctcagccctaagcgcagctgactgtcgaccataagttgaggtcgtcaccgttatggaagattgattccccttcctgaaacgggcaactcacaacatggccctgctcccgtttcacccaaggatcgcctttcccgacttcaggctgaatagacccaaacttccgtcaaaggcaaattccgtgtgggatggtactatagtgattgcttcaaccttaccagctgtggggagccaagctgggtagaagttcgcatcgtttcaatgggaagacaggccgtcgagatctacccggtttctttcccacagattaccttgcatcgagacggtccgcgaattgtacatgacgaataatactccgaggcatcaaacgcccagcatgctagcgtgacatgatgatagcttcacctgtgttatcttgtggataagtaatccatcttcctggtctgcagggcatgaatttagattcctcgtggcaaatgttgctttgttggcttccaagcattccgactgctggaaaatctcggcgttgttcgctaccagtttgtcaattttcatgggggtcaacgtctcggcccgagatatcgcgacgttatgcgacgcaggtctggactgggccatgcagaaagaggccgaacagcttattcgacaatttgtcatgccacgtctagttgtcatcatatcacgttcacttgaggacatgtgatgataaggcccgaggtattcagctcaaaatagagtgacaatgaaagacattgtatcagagtcttgttacgtcgtgaagctgtcctcaaaatgagagcctcatgtagcaggtcttacgatgaagaaggtagagctcagctttacataccttattagactgggtcacacattaaggttttacagtgtgaccttgataaaattgtatttctgtttcatagaaacacaacaagttggcccaccggtcaaaagaatttcagatacatcactcctctcaaaaccattcctcttcgcgctatccgaaagccttccagttccctcccacctccattcttcctaaacaaaatcaccacccccccttcaatcccttctcaatctcctcaaaaacctcaactcctttcacccctaaagcagtacccaccccaacaacccccgccccagcagccctcatcctcttgtaccccttctcatcctccacacctccaatcccaattacagtgatatgcttcaaactcggtctctcatccaacatcctccgaatagtagccacattccccagggccagcgggtgcagcgccgccccggccatccccccaatcccgttacctggcagaacagggtcgccctcgggtgagagaacgagacatgaccctagggtgttggtgcatgttatgaaggagacttgatcaccttcctcttcgagggcagagatgagttcgttgtattcggaggcgtgggtgtagggtggtgttttgatgccgaagggcaggcgtggtaagtctggtctgagtttatcacgcatcgcgaaccgcaggcggcgaaagtactcgaccagtgcgtctttagagtacgcgggaggaggtttgttgggtatgttggggcaggagagattgatttccatgtagatgtgaccggcggttatatactcggacaggtaatcggcgatgcatgtatagcattcactgacctcggtcggggtgcccgtgactgagatgatgaagggtttgatgggctgagtaccagagcaagtagtatagatcttgcatatccattgcatatattgaagtagagcgtaagggctgtagcctagtgtgttcaagcttgctttttgagcaggagctttgctggcttcttggggggttgggttggtggattttgaggtttcgggattagagggatcgaagaaggtgtatcgatgaatagcgtcatcgtgcttgaagccgtccaaagtagcggttcgagttgtaactgcgcctgtggaagggcaaagatacagccgctctaagtccacatcgccggatgcccatgggttagccgagttgatcaatggcgggttgattttgatgggcggtggtagttccgacatggttgatcgctgaatatatgttggagttctgtctgctgggtgtagttgaaagttgttgtcttgaattcggcggggttagatggataacttgaagataagagctgcaccccgcatcaagtgtgtggggtcatcacagcagtatgaagacatcaaacgagcttcaagtcaaccacggcgagaagttggtggtcaaaagtaattttatatattttttttctcattcatatcatcgactagagcatatcatcaatgcccttgtcagcatctttcttgatcaactcgaccatgccctgtcaacagtcagcatgttatccaatgaaccttcagaagtccactcacctcaggcataatgggttttccatcctcagtcttaacgtaacggaatggcatctctgtgctctcatactcgttgaacttgagttcgggaaagtcgacgtagggaatgtctttcaacggtgctgtggaaacgttagtaaaggtcattgtgtagaagagagggtttcatactcttgccctcaaccaccagacgagttacacggactgcagtgtctgtggtcatctggacgggcccgagacgacggccctcaaagcccttggcccgcaactcggatgttctgtctgtaaccgagttagacaaggcattatcgatcctttagcaactgtggcaaatacctctaggggggtcatcacctattattttattagcaagtattttgatgtcaagcttggctcataacataccaagaattcctccaaacaggaaaacatcaaagttgtccgcatcttcaggggcaagatcactcttcccctgagggtcaagaaggcatactctagacttcttgtccgcatacaactcctccacaccccgcctctcagctgtgaacgaggggatggcagccaaggcgtctgggaccttgaactgtgggtggagagacgaaaggaagaacttggacccagtctcttgcgactcgcgcgcgatggtgatatactcgagttctgaccagggtccaagctcctcgtccaggtgctcaacgatgtacgtttttccggccatagcgctgaaacttgaatcaaaccctcacaagatgctcagttaggagataaaatggtggaaagtacacaagtgaaggtcggaaatgtgcaattaaacggcatcgataatttttagctcgtgggcgcccgatgccaagaacggagccggcagatcggcgcgccccacagaaggtcttccgaagccaccggcgctcccctgcagccccgcgccgctatgtcctcccctcccctcaagacactgttccagactgcgcaacaacgacgcttcttcagtgccctagccaccggatagagccacatacctacaccggataccgttgcgcaaagcctcgacgaagagtagcacaggcgcccggggatattagagttgcgggcacattattcagacccgaatccgggaacgtggcacagggagagctttgttggtcttgcgcctggggccctgcctgttggacccggcgcggtgaaacacgtaccttgactgggctgcctgcctactatctcgggcaacttttttaccttatccacgcattggttctgtctactcttgcgaaatagctacaacctgtcttctattaccaattatttcaatcccgtggtattcgtgtgggactattacctccacgtttcttcttacattcccttgtttggcctaggtaccagtgataatcagcaacgccaagctcagcttgcagtcgtcagcccgccccagcccactgcaacccgcccctgtcttaggacagatctgtccatccattggaaaagtatcccgacaaacctccatcgtcggtttcgcagagaacctcacgttatttgactgccttttttggtccccgatgaccgccgctgccgtcaccaggtagccagatatacaggctctcttcaacattcgttgcgccggtctgaggaccctcgcgactggggaatcatggctgttggacggtccttggcgggctggaggcgtctaccatccatcgttaccgccgccgccgtcgccctctcatggacggcgacactagctgtcgccgatgtcaaggcggccggtgactactttgtccattcacttccaggggcgccgccaggtcccctggtgaagatgcatgctgggtaaggagtcttgtctccagtccaaaccagggatgtcctcaactaacatatgtgtctgcttgcgcgcgttaggcatatcgagataacacccgatgtcaatggcaacatgttcttctggcacttccaaaataaacacattgcgaacaagcaacgaacagtgatatggttgaacggcggccccggctgcagctccgaggacggtgccctgatggagattggcccgtataggttaaaagataaggacacgctggtgtacaacgaaggagcatggaacgagttcgccaatgtcctcttcgtcgataaccctgtcggcacggggttcagctatgtcgacaccaacgcttatgtacgcgaactcgacgttatggctgaccagtttgttactttcctggagaagtggttcaagctgttccccgagtatgaacacgacgatgtaagttgagctcctgttttgagccagaaaatatggctctaatgtgttattcagatatttattgctggagaatcctacgccggccagtacatcccctacatcgccaaggctatccttgagcgcaacaagaaaggcggcgagtcctcctacaaatggaacctcgccggtctcctcattggcaacggctggatttcccctcccgaacaatacgaagcctacctccagttcgcctacgagaagggcatcgtcaaaaagggctccgacgccgcctccaagctcgaagtccaacagcgcatctgctccaagcagctggccgtcggccccgccctcgtcgacaacaccgactgcgagaagatccttcaggacctcctccagctaaccgccactagcaaaggcggcgagcagcgttgcgtgaacatgtacgacgtccggctgaccgacacctatccgtcatgcggcatgaactggcctcccgatctcgacgccgtaaccccttacctccgccgcaacgacgtaatccaggccctgcatgtgaacccgaacaaagtcaccggctgggtggaatgcaacggccaggtcggcgcaaacttcaagccctcttccaaaccctcggttgaactcctccccgacctgctaaaagaagtccccatcatcttgttctccggctcggaagatctaatctgcaaccatttgggcaccgaagcgctgatctccaacctgcaatggaacggcggaaagggcttcgaaatcacccccggcacttgggcccccagacgtgactggacctttgagggcgaagcagctggcttctggcaggaggcccgcaacttgacctatgtagtcttttacaacagcagccacatggtcccgtttgactacccccgccgcacaagagacatgctagaccggttcatgggggtggacatctcctccatcggcggcaagcccaccgactcccgcctcgacggggagaaagtccccgaaaccaccgtcggcggggtggccggtaacggcaccgacgcgcagcaagcagagaaggaaaagctcgacacggccaggtgggaagcctatcgcaaatcaggggagatcgtcctggtgattgtggcgttttcggcagcgggatgggggtggtgggtgtggagggagaggaagaagaggaggggttacatgggggtgtctgggggggagaatatctcgccttctggggaagcgagggggagggaagggtttagagacaagcgttcggcggcggatttggaagcgggggattttgacgagaatgagctggatgatttgcacatgaggacgccgacgacggtgatgggtggggaggggaatgatcccaggtatagtgtgggcgcggcgagcgaggatagtgaggatgaggaggacgtgaaggggaaggggaaggagaagatgtcgggttgagtctaggtcatatggggttggatgggcagaatcaaagcctttttgatactacacaacaactggaacaacaggagtgaatcggaaagaaggattacagagaaaggaaaggctggttggtcggttggtttcctggtgtttcaggcggggggtttaacaaatgtcaatttgagctcgtctttgcgcacggcctttacagttcacgttggcataaacagcacatatatatacactatcacactcgaaggcattgcttgcaagcgactgaaacgtgagaacaacgtgggcatatattggtggctgtcgccaacctggatagaaactatcaatcaagcatatttgtgtttctatctggagcttattctcccgctaaagtgcttcagttcagacatgtgccttcagaggtcttgccatattccagctgttgctgtcccacaatttacaatgcccgtccgctgcatccttttaagacgcccagtcaagcctgggattaaacccgcctaataaatgtcccagagtagtttgatggccttgtggccgaagcgatgtcttcgctcgccaacccttggtcttactgacgggatattgaactgcgctgttgggtaggctttgtttatcgttgttggttggggtatcattcttgtcattatcgccttcttcaactcgttcaaatctgagcagtgttgttgagaatcttgacttgttcgccgggcttgaaggcagggaggccaatataggggcagtctgcgcatctgaaagcgtcaccgaggtaacagctattgcaggagccagtcttgccctggacggtaaagtcaagttcgctgagatcctcagacttgagcttcaaggtggcaagacccttctcggccttctcacgacgggccttgtcttcggcggctattctctcggcgagaccacacgtgctagcagatgttagtttattgtgcttcgtattgatgttgaagaaatgagaaacataccagtctttgcaggctctcctctttttgcccggctgaggcgcacactcaggaggctgctgaatgggacgcttcagatccgcctcagtcaaaagagtgtcctcatcaatgacatcgtcgtcgtcctcggcatcaagatccaagtcatcactgaaatcgatgaaaccaaccccagcaggacccttggatactggtgctggtgccggtgccggcgctggggcagcagcagccttcttgccaaagctgagagggacacttccatcagcgttcaccttcttcgccccaaaccgcagaggtacaacctcctgctcggcataatcaggcttagtatacccatcatcccccaacaccaaccccgccagaatcgcctccttctcctctatcgagttgccctgtcccaagctgccgtcctcgctcctcaaggtaccaccagccttgagtgccggtacaaccttgccccagatctccctgttggacaagagaggggacacctcgctgcggcggcttccgtcggggtcggtcaggacgaggataaggtcgtaggtcttggcggggaggctgactaatccagcagcgagacggtcgagcatctgcaaatcggtggacgaccgatcatagacggagaacaaggaggtgaggcggtcctcgcgggatgcgatcgacgggggcgcaagcaggagggttcgatcgccagaatcgccctttgcgctggcagccgccgcagcgtgcgcggggctgaaatcaaagtcgggagttgtgtcgatcatgacggcggctggaggcatctcgccggtgttttcttggtttctggaatgaaaagaggctgctccgagaaatgaaacaaagtagaacccaggaataaggaagcaaaaaatgattgcggatcgtgcctgatttgtattgttaatcctgtcgtgggggcggcaggaggtcgaggcagtggatggaggggcagtttaaggatgcacaattctcttgaccaataatattgaagcttataaagcgttgccactaatacattgtgtggacagtgcaaaagattagatcttgcacgccatgtggcatgatattcggcggttaccacacagtgtgactcacggctgattacagtgggttttctgattctcccgttcccgcggagggggacttggagatatcgtcatcaatgtgggagccgatttcggccatttggggtatctagtatcgataagaattacgaatgtgcacactagtataggtaaactttacttcatcagaggctgtctgtgacggtcctggcaggaaggaagttaaagtcgatgtgagatgtcagccggcactggtcaggcccgccccgcaatcaaccttggaagcgccgtcagatccggtgaattcagggaccgatgtttggaagtgaggtggaaacagttccccgttactttgtggatatccggtctgtcacagcctgacctgctggtgacgggactttcggagaaatgcggtcgtctggttcgctttccatggatttcgagagtctggaccgttgcagctggcctcagctggggcgtgtctaatcgagtcatggagtgacacctcacagccgtttgactggcagacctggggggacgaattggatgacgagattggctgagtccagctggcctgatcatgtcgttgcagctctccaaagatgacagctttcaacaatttccaattccggtctatcgaccaaacagaattgcatgtttgtttcacgtatcaagggttctggaggaggagagaagcttccagccggcattgggacctgtcattgaattccggcgggcacccgtcaatcagatggactagccgtttatggtatggctttccccgcattttgtaccagcacaggagagcacaggggatcgctgagaccttcaaatgtggggacctgacatcacaaacgtaccctcattgagcacttcacacctcgacacctcacaaagaaaaggtgagcaagaatagcaggaatagcctgtgtcaattgggaatgcaaatcccactatggctaaatggaacgaacaccagccactagacagccggggcccaagactttgcagaatggcgagcaaatcacgtaatggctgctgtccaaagtcagcccagactcatggcctcttacatgctaatcacgcgactcccatacagcgcctcgtagactccccaccacgcaccgtaccgcgttgccccctgttctttccctttgaggatgctcgcctgatcaatgcgagccgtgactggctgctccttttccttccacagcttcccaaccactgacctctccggacctctgtcgggcctttaaagtcaagagctcccatccctctcctcgacaccccgtttctttcatccagcattcagacattaattcatccattgatcatccaccatctcggataccatcatccaacccatctcaacatcaactgataaccttgctcgactcactcgagactcgcccctgaactggtacaccagctttagtgacatcacagctcctcacagagtatgtatcgccagcccgtctcctgcagcacagctccccttacccgagcttatcactctcaaccccgcatctctttgtgtgacgctgaccctctgatcgtcagagaacaacctctccacccaacaagtccaattatcttcgaacaacttcactctagtactctctacctttacacatccatcacacatcatcaagagtaagcttcatcactggcattgactctaggatcaatagcatcaaccattgacaacccttcctgcagtgactcgctcccacaagttcaatgacaaggaccacagcatggtggcccccgtcacgggtcacacccagcaacaagtacccaagttctttggcaagcatggctttgccgatgccgaccccaagaagaccaagaagaacggcggtggtaagggcaattggtatgtcttatttcaccctacctcctcttacagcttagaatatcactaacaccaattctttcaggggccctgttggcttagaagccgaggatgaagagttcaactttgtccacacccgccgccgctccaacagcagcagcgtctccagtcaccccgagcacttcaagtccaagttcgagatcaacgagcctgagcctgtgtttgaggaggacatccatggagccatggaggaggaggaggagaaggacagcagccagtccagcacctcgagcagcaagcccgaggacatgtaagatcacacaggggaagatcattcatgacgcgtgaggacagtcacccgcgaattcttgcgtgcgggaatccatgctttttgttcagcatggcggaaggttcgttgataccctttagaggtctgatatttagatctggcggggaggatgcttgccttctatctggctaccacacctttctcatctccaacgaaggcggctgggatagctgcgctgtactagtatttatttattcaattgatttctaagagtcttgagatttgtattctgactcctggtgcctgatatgatgacgtagtcgtttcgagaaaagataaacccagattgtttgcacgtagctcattgtcgttcattggttcaaatgataaatacagggaacagaatcagtaactgtatatcctcctcaccatcgctctgttcctccttctcttggtctcttcatccacctcagcatcctcttccggtcgtcttgtagcaggctgcaacgccttgccaatcggctcctcatcaaagtgcatgcctctgtagtccgtcaccgttcgtcccaactgtgcggcaacattcgcggctggtctcgttggcttcccatccactgtcattttccctattctcaacaaccccttcccgccacgaataggatcacgaagatagatcgatcctgtctccgaatcgggaaaatacgccgtctggatagacagacgccactcctttttccttttgggttgttgttgacccccatctactcccgcagcagcatcaacggatgaaatttctcccctctccagcgcaacaacccgctcaaacatctccaacgactctggctgcggggggtaccactccggcacttgctgctcgtcgtccccgatctgaagccactccagaacagggacttgctcctccgcccaggggtcttctttgcacctttccagcgcggaggccacctcgtttgcgacggcgggtgggaggtcgggggaggtgaggtcgaggatgtaggagatgtcgtcgcagcggctggtttattctgttctttttttggggtgcggacgacgagtttggaccataaggggccgaggatgtggtgttggtgggcgatgtcttctagatggggggcggaggaggggaggttggtagagagggttgagatggagggggtgagccagggaatttgtctggctactgtgcggattttgggggcgtgtcggatgggataggggggttgccaggagacgtctttgtggggtgggaggtggaaaccggatgagagggaggagacgagcatggaggcgccgaggggggcgaggagtgaggtgagggaggtaagggttgagttgggcgggatggggatacccgggaggggggtttgggataggacggtgccggtgtcgaaggagtggggggagagggtctggatggagacgccggtgtgggtgtagcggtttaggagggcgtagtggaggggagcaggaccgcggaggctggggaggggggttagtaaggggtggttaaagcgtaagggtgagggtgacatactcgggtaagagggaagggtggacgttgagaccgccgtattctgcttggtttaggagccgtggtgggacaaaacggccgaatgagacagcgatgatgaggttgatgcatttcttcatctattcaagcggaatgatggttagctttgagatgtagcaagctcaaacaggggcacttacaaaccaatttgtgaaagtgtcgtgtggtaacgttgatagaggaagaccaagttccctggctactgatgctattgggactgcatattttttaattatatgacaggtcttcaaaagtcatcaggtcaggacataccttcagtcacttgcttcaatcctctcccggtgggcttcgatggccgaaccagcacatcaatagactcgataagacttggatcatctttgtgcttcttgtgaagagcttttagcgagtgacaactgaactcatctgagccacaaaacaagattcgtaatggattgccgcgttgtgtactgtatgttgcaatgctcagtggtcttgcaacagaccgtcgaagtggtcgtgaagatgccaaccacagcattgtggtggatttcgctgtttcaacagtaaacttattcaaaattcagagcctcgaatatgcagatctcttattgattggcggaaatatgtgtaagcgataacaggtcttgaacgacaagtggaagctgtacctgttgtgagtgagtgagtgagtgagaatgctttaagtgagagatcaaaatgagtgggccacgaactttgagagctctgccccctgcaagcccggaccctgctgatccacccttggcattccatccccctggagcttccttgtgccagctcaaaagatacggtcaacatcaccaaagtgaaacacccgccatgtttgtttcttatctgcttgtacatttttatagctatgaccatggcctcaaggagctttctaaccgaccggcaggctgaagagctgtgtgtttccccccaccaataaaccctctattatctctatcccagaaaaaacatgacatagatagctaaccaaaatccagacacaaatccatcatcgcctacctcacctccctcaacctcgccaccacagccaacaccctccgcgccgagctcaacctccccgaagaaacctttgacctcgccaaagcaaaacaatacgaaggcctcctcgaaaagaaatggacctcggtcatccgcctccagaaaaaagtcctagacctccaagcagagaacgcccacctcaagaacgagatcgaaaatgccggtcctttagccctgtcgagaaagaaccaggacccagccaattggctccccaagggaccgccacgatacaccctcgaaggccaccgcctgcccatcacctcggtagccttccatcctgtctttagctctttggcctcggcatcagaagacaacacgatcaaaatctgggattgggagctcggagagttggaaaggacactcaaagggcacaccaaggcagtcttagatgtggattttggcgggccgagggggaataccctccttgcaagctgcagttccgacatgagtattaagctgtgggatccggcggatcagtacaagaacatcaggacactacacggccatgatcatattgtgagctcggtgaggtttgttcctgcgaatggcactgctggggcgggagggaatttgctcgtgagtgcgagtaaggataatacgctgaagctgtgggatgtgacgacggggtattgcgtcaagacgattgaggggcataatgactggccgagggcggtggcgccgtcggcggatgggaggtggctgttgagcaccgggagtgataaggcggctaggttgtgggatattggggggacggagccggagtgtagggttgttatgtttgggcatgagaatttcaacgtatgtgtccccatttttgtaacctttcgtctctgatttgatatactgacgtgggtctgatagttgtgctgcgaattcgcaccctcaacttcatacccccatctcgcccgcctcgcgggacatgaaaaggtgcccccggcaaacagtgctgccgagttcatggcgacgggctcgcgtgacaagcaaatacggctgtgggacaggaggggacaatgtatcaaagtgctagagggccatgacaactgggtccgaggtctggcctttcatccagcaggcaagtttttgatctcggtagcagatgacaggacgatgcgctgctgggatttgagccaggatgggaaatgtgttcagaccctctctggcatgtttgacgggttcgtgagctgtgtgaggtgggcgccgggaatcactaaggatgggcttgctggtggggatgctggtgatggcacgccgaagaagaagacaggtgccgaggcgaatggcggggtgcagatgcggtgtgtggttgcgactgggagcgtggatgggacggaaggcaaggtgaggatatttgccaattgagtctttgggaccaatgcagtgtcgaagcgggcaaatggccaacatagagtatgaatagggtttcaggcaacatcatcagcatcattcgcattcagcatattaggggtatgctatagtaaggtcgttgccgtgggtggctacaagaaagcgttaatgttaatgtttacacatttatcgttgttactcttccactttgatgtgttgttcctccacatgttgttctggtagtggctctggtactggttgtgctggtggttctggctgtttctcgggcacttgcggttctggtgcgtccttgacaacctgccaccgatatgcaaccgcccacctccccagcccaccctctagttcaacgtcccaagcaggcggcacaacggccaccaccgtcccaacagctagacgctcctgtccgtttcttttatccgtactgcgccgatctagaccatgatcaactctttccaaggagcctatcctcccatcaccagccaaaacagcttgcataccaggtgttcctactcgcgcgttaggtaaagccgcactgatgagacttaacccctcccctcctctctttacatcctccacagttagttggactgcccctggtggtaatggttgtggcgcgtcggcctcttgtttgacaggggtgtctgtatattctgatgtttttttcacctcaataagccaattttggagttcagccgccaatccattggtgagatactggccctgcccccgacgattgcggccccggcgaggtttgggtggagaaaagagatcaggatttatgttctggatggaaaacttcttcgagtcggaaataggcgaggtggatgttggtggtgataggggttgcaaaaagcgaggtggtgggtaaaagatttctttccttgcaggtctggtgtctttgtctggcggtggtttagcttctgagtcggactcgctgtcggattttatgttcagaggggaagagtgaggtattgggggttcgtcatcatcgtcatcagagtagatggtgatgatgtggtcgatttctgggtcatcgtttgggggtagctcattgtctgagtccgagtcgatcggaaaggcagagcttggaatccattcttcctttggttcgaggtcgggctctgatgtggcaatggatattcttctcctttttggtaaggggccggggtcaacctcctcgtcattgtcccctggctctgggagagaagactgtgggacaagagacgagtctatgtcgattgtttctggtaagttgtctcggacagcagttgttcttgatggtgacggctcctcttcatcatgtcgactacgctcctgatcttgaacgggagaactatcttctataagaagttcttgtgtagcgcgagctctcgatgccttggccttgagagccaacgcaggagttgagtagggcgcggcatggctgagatgcgagagcggttttgtggtagatgaaaattttggagtgccgtagaatctataaggtgcagccgagcttgactggtttggtgttcggccgtgaggttgatgtgtgcctggtcgttttgagagcaggaaccgagagggtgctggtgtctgattgatgttagtggtcatctcatacgcgattgaaagagaacttactgctggcgatggacccatctgatgaatcaatacaggatgaacaaatcagtcacgggtgtacttagtatacggttcctgaacagatcaaaatcattcatcattaaggttgtatatctggaaaactgtaacaggcagcacccagtgctcgagttgatgagtgagcggccaacagcggtgatccagccttcccctaaccctgcgcgtcgtcagcattgggaactggctacggtgggcacaacgccaaccagtttggtaacttttgtttccactcttggcccaagctcccaacccaatttgtaaaagcactttaacaacaagcccgaccccactccgcgtcatgttagcgcgccgcgtccagggcgtcgcgtaaactcttgaaggcttgccttcagctgcctggtctcccccaccaactcattctttgtccacagcatccgccaacagaccaccgccaaaatcgaccaaatttgccacttcaccgtatacccaaggaagaccccttcagctggatgcaagatagaacacttctaccaaaaaaaaagacaacaccaggcgccatgttcgctatggttgacccagccgtgaacagcggtttccaaagttttggcggtaacaatcagcacagcagtttcgtcttttcaagtccacacaagccagccaaatcatcacctctctcttatgcccccatgaggataccttcaccgacattgccatcagacgatgcccctgacatgatgctttcgtcccctcttggtccctcgtcagattcatcccatcttcgcatgagccagtcctcgccaatacggtcctcatttgacaataatgagagctccggaccacaaccaaagttcagatttgccaatcggaacccagcaaagaacagcaatcctctagtcaaaaagcggaacgatgtacaagactcgagacgaagactctttctcaataatgtacggcagaggcaggaggacaaaaagtttcagcgacggggtggacaggatgaggttcgttatttgccttccacctgtacttttctcttctcccaactaacagcccctggacagattgccagattagagttcaaccgtctccagaacgaacgcctcgcctatcttgaccgagaacgagccaaaaacccttatgcactctgggaacaagagcttgaggacgagcatcgcagcttgcagtcacagcaacggcaaatgcaacaacaaaatccagacgaaatgatgctggatgcattggaagaggcagagatggccgagattgcccaagcagaggcgttgcttcaccaggacaacaactcctcgagacatatcaatcaggatgactctttcgatgatgacgaggattgggatgagttgttcatggaagcgatccagacttcacagcaacaccatattcaagggcaacaatcgggcgggcaagatgtggagatgtcttgattatgatacttcacgttgtcttgagttgacgaattacatatggcactgtacattggaaggcatatatgccccgttgtaagagatggatatacccagcagagaaacgggttactgagagtggaacaacatatcgatggtttacatgtttgggcgcatggcatactggacatcaaggagttattggagtctggagatactttcatgcattgagaagcggcgtcggcttccaggtaggctgacttaattgtattataatagaataatgctgtatcaaaaagaagtatgaaagaatggctttacacgacgactgtactccgtacaagtgttcaaaatatggtccgtgcactgtgattgcgttcgaacccggcgaatagcgtggttcaaaatttggggaaccgggaaccgggacccggccgaacagctgaggggcactgggccgctccggagttgtcacatgccaatgagccgagagtgccttacgtcttgagataacttacttcacctcgactacataggggaagtacctatcacaaggcgcggcgcaggtaccttgcgtataaaagcaggccaactgtttgggaaatatgtcggaacagcaaaccaacagcgctgcggcacctgccgccgctgctgctgctgctgctgtcaagccagatgcgactctccccaccacaaccactactccggccgctactatcaccgccccagttgttcaagatgggaagaaagcggtaacagttgaagatgtcgccgacgacgacgacgacgtccccgacccggatgaagacgacctggatgatctggacggtaagcttcatttacccctcacttcttctcactccaaccccgttcactaataccctcgtcagacatgctcgaggaattcaacgccgtcaaacttggacccccctccaagcccccagcagccgccccatccctaggcccagaacgccccccatccagtggtgatggtggtgacctccccctggacgaagatgaattcgcccgccagctccaagcaggcatggccgaccttctaggtgaaatcgagtcctcccccgagatgcaagcccagttcgagtccatcttcaaggagctcggcgccgctgcctccgccgctgcctccccagatcccaaatccccctcagcaggagctgctgctgctgctgccccaactccccccgttgtccccccccctaatattcgccccccatctagcagcggcagcggtgccggcggtgctgaagcctcctttcaagaaaccatccgtcgcaccatggagcggatgcaaacttcgggggagcaagctactgctgctgccgccgcggagggatcggacgacttccttgcggagctcctcaagcaaatgcaggctggcggtggcgggctgggtgatctcggtggggaggggagtgaagaggagttttccaagatgcttctaggtatgatggagcagctcaccaacaaggagatcctctacgagccgatgaaggagctgcatgacaagttccccgaatggctggagaagaatcgcgacaagacgtcggccgaagatctcaaacgatatgaggagcagcaggggcttgtggcggagattgtgggcaagtttgaggaggcggggtacagtgatgagaagccggcggatagggagtatattgttgatcggatgcaaaaggtatgtcttcatctaatcgcatcctggacgaggtatgatgctgaccaaaggggaatagatgcaagcaagtggtcagccgccagcggatttggtgggggatatgccctctacgcaagacgcgctcgccatgccagatgaggggtgtgctcctcagtagaggttgggaaacggtactatcatagatggttgattttcagtttgtcatgttcgaccatttgaaagagagcgagatttgttgtctttagaactgttgagcttgttagatatctagcgctgggcacacatgtttgttttagttcatcaccgaaacccacgggttgtacacaagtatataacagaacagcattatgattcgcaaagctcccccatcctgaacgctgaagtgcattagtcctccagacccattccactgaggcattccatggcaagcacaaacaagaggtcttgctctaaactcaggaatataggtaggctgacaggcaatattatgacaaaacactcaaaaacattttctttattggagtatcacttcattacctattattcgacatcaccacaccacacattctacaatcaaagcgcagtaacaaatattttgatccggtatatttcccagtagctaggcttatcacagctgtgttgtttggtatcaaaagactcttgaaaaaggaaaatcctgtccctgtcccatatccacccctgacacccacactccctttccttcccttactcataacattacccagagatatccttcatacctccaatgggggggtatatcatcaaatgcttccccatcgaaattatacacacaaggtggtatcccatcacaatcaataaaatcattaaccagtatatatacccatactaacggacatatactgcggccccgtggtagaacgcaggccaaaaagtaaagaacaagcacattaagacttgtctttattcaagcaacagagtccttcttctcataagcctggggctcggaagaattgccgccaacatctcccttaggaagcatgttgagctcatcttcttgggcatcgaggccacggaattggagccagaagcagagaccaccgatggcggcggcaatggcaacgactccatagttccagacgagaagcgggtcgccagcaaggggcaccagcgcgaagccgatggcagacgagatggcattcatgaacagacagacagactgaaccatggagcgcatgtttgcgggagccttggaatgggcatactccaagctggtaatggaggccagaatctcggagaaggcgatgagaacgtaagagccggtctgggcccagacgctgatctcgacattggggcacttgattgtcttgccgtcagagccaagcaactcggcaccgtcaggaccaagcatattgccgctggcatggttgccgcactcgctcttctggtagagatagtactgaagaacgcaggcccagatcatggcgctggcagcaacgaagtaaccggcagcgatacgcttgatgggggtgaagttgatgcggagcttgcgaagggcggggaacacaagggtatccatgagggggatcatgatgatcagagcgaaggggttcaagttggtcaagacgtcgttggggacaccgccgagcttcatggtggcagcttgcgaaatcaagttattgttaatctgattgtagcagagccagaagagtgggtaccacatgaacacagcgcaggcattgaagccacggcgaacctcatcaacccctgatttatgttagctatagttcgaagcaaaaggttgagatggcgacaaaacttacaggcgtcgttgaagtccatccacttgggcttgttctgaatcttggagggcttgacgttctcccagaaggtaccgtcgtggaggttcttgtaggtcttgacggggttgagggaccagcggcccttgttggcgagggcgaagatcttgaaggcgcggccgagaactgagccagcgggcgggacacgcttgtagcgtctgcgaccccagagcataaccagggggcagaagcacaacatgatggttgggagagtgtaagagagccagaagccgacatagtgctcgcagtagaccatgctgagctgaccagcgagagcaccgaggttgatgaagaggtagaagtagtggtagacacgggaagcggtggccgcagggtcgacgatgacgcgctcaccagtcggcagggtgcgaatcaccattctctcgagatcaagctgctcaacaatcaaggggttgacgttgggcttgaaaccaccggtaccgacacccatagtgatgatgccgagagtgaaggcagccagcgcaccattggggttcttgatgacagggggaagaccggagatgatgagaaggatgtgaccgatgatatcgataccgagggcggcaccgatggttctgtaacgaccgagccagctgtcggcaacgtaggcaccgaacagaggcatggtgtactgccagaaagcattgaaggtcgtcaacgagaacgaggttctctgacccaagccgagggcaccggcttggccattctcgatgtcgtagctagcacctgtggtggagttgtctggcagcttctgctgaatgaagttggtgaagacggcagtggtaccgtagtaggagaaacgctcgcacaactcgacgaaggcgatggtgtagatgctccagggaatcttgtcggggatgcggcggagggtgtgaagctcctcgtcggtgggagatctgccatcggcgctgacaccgaggtcgtcgtcctcgactgtgctgctgaggacgggggccaagccggccgcctccttgtccttcacgatggccttgacatcgtcgctcacggcgatgctcgtggggtcggacgccatggtgggctgtgtgggaagctctctctgaatggaacactcaggtgttgccttgtctcgtctttggagagcggccgtaaggtcgccgggtgccaggtggatggagagagagagacttgagcctgccgtgtctgagaagcgaagcagcaggacggcaggtattatatacgaccccgcgagatatatttttcaccttaagcaaccagtagtgtggcaagcgagcaccgcatggggtacaactgcacctgccctccctgctgccctaccttccatgggtacaatctggggcaggagcgacccgagggctcgagtgatggtcgagtctcggctctttctctgcatcgtatagtattcccgctcccggaggtaccaacggaaggaacaacggaccatggacagggaaggaatgcccacctctggaaagtgctctgtcttgggatggcttgccaccttccaagattgaccaagagcgccaagagatagatgaacaacgggttgcctgccgttttcccctccagtcaaccacaacccgccccctctttcgacgaaacggcaacatgctactggcgatccctggcctgatatagaggggtggcatgtacacgagggtaattgccccaattgatcgaatctagatgctgtttccgtcgagctctggtttccccccacgcattaggtacacattgtgccagtctggtatgtacttatttgttttactttgtcgacgtctcagcacaagtgccgacatgccgagaaacgccatgccgttcatgtttgggcgaagctttctcccgcgcgcctctgccgcttggctgcgcgccgctgagcgacacggcgcaaagacaagtcggcacaagctcccgcaggcgccttggaccgtcttgggggactgggggatgttgaccaggggtcgggcttttggtgtgagaggaacttcctagatcgtctatgcccagcctcttggcaccaatgcccgcgccggatcgtgtggggacccacccggtgcctgtcagcgaaaaatcaacgacatgagcaccgaggtgtggcaaccctggaggggaaccggccgacgacgacctgattgccctacggagagcccgcgggccggaccagacaccgttattcgacaagtttgaatactggaggatttagagctcatcctcaccatcacaagcgccggagcatcatcacgggggcctgctattgggtccgggaatagcgatggcgagaggggtccccatacagctatatgggctgatggaaagatcgtcgatggggtagcagtatacagccaagtactccagtgtctgaagtcccttgggcggacgggacaacggtttgccatgtgatgtctgtcctctctcatgggacgaacgtttcgacacgagcttcgagaacttttgcctctcattgttgattggagcatcaaaagacccgaatgttagggtgacggttctgccaatgcggctctggaagcttatttgtgcattcgcagttatctctcggattgcgccatctgctcccttcccacgacgataaccagtcagttcgagcgagatactacggccatggtgtcccgtggaggctcgacgccgggtatgtttgcttttcggtgtgcgccgtcgcatccaggattcctaggccattagttttcctccttcctaaagcgtgcttcaacaacgacacacagaaacaacctcggtccaccattgagaaatcacgaagaaaagagcattccaaccgttgtccaatgaaatgctcacatttctccaacagcgaggtatttctcggtatttttgtatggtttagtccaatagcttcacctgctcaccgttcaccgatgagagcaggagccacggagcatacctagtggttgggtggaacgagtactgcggaacctgaaaagtatgagacagggacctcatgatcagggctgcttggcacagatggtctaggtatgtaacggatgtcagatgcgggtgctgttgttatcaaaaagcgagaatgccacgctgatgcacctctgcctctatcttgtgctcatggtgctgccatgcagtcgttatcttttggggtagttgttgctcgtcgcgagggtgtggtagcgagagggatcggctgatacattggcaattacctcgtcttgtatggctgccttcttctttcagcggccgtataatcgaagcgtcggtcacgcaaacagcatgcgagtggtggtgagaatgcaacggctgaagtggtaggggggagcggaaaaaaggcgggtcgttacagtccaagtcaccttccgcaataggaagtgccttttagtcacggtcgatgctccttcgcgacagcacagctgccaacggaataatggcctgaggatgacaatcctcccgatactaaaacgtaaagctcgcaaaactatgatttttgcgagtctcacctgggcttcgatgtctgcgccgtgggacctactttatctactctcggacatgataccgagaaggatttatttttcggattgtgggggttctggcagtgacgtcagacctccaacacagctccgaatgcttcgagggttagggtctatatcgacccaacatctgaattgcatgatcaacaagtcggccctttgcaacagtcacatgcggtggatcgagccaacgacattcttcatcggtctgccacttcctaccttctcttcctagatatcgctgcgttgttgatggcaatgctgtggcgttaagattctcggttttttgcaacagcttgccctttcaggtccttgcgcatcaagccgtcagcaggacctccaacatgcaagttcggtggcccgtccactttgggcttgcatcagacttatatgccaagatgcttggaaatagaacacaaagtagcgtcggcgctcggcagttgtgctttcttgagccgaagttcagggttttcatggtggataaggtaggtcttcttacctcggtgagcagagaggtgtggtcagatgtcacgagctcgcgttattgggctaacagtaaaaagcttttgctaatcagcaaaatctgatagcatggcatcacttattccttcttttcacccagaacggcaacagaccacataggtactcacgaacattgctaccagtctccatgtccacatcaccccagatcttcgcatatgcattatgcactgcggcattgtgcagtactttcctgggactcggggatcttccgttactcaatcacatcccacaacctactagcgaaagcgaaaaaccccagaccaaacagcaaaaattcaccgtggcattccctcagaaactcaggttcctgcccatgaagccaagacagctcgggaatattcttgacaaacgccaagtattcgagataatgaagcttgtcctgtcgaacccaggcccatcctcgccggcgttggagtcacaaccctgatccatgagctcgcagtagaacaggggtgccggtacctgcacgaggaacatgagatggccagagagaactccgccaaggctacatacgctttctctagagctcgggataacctctgttctttgcttgcttgtttcgatcctagcctgcgctttgcttttctttgccaagatgacatgactctttctttgcagctgctttataggaacttgccgagaaagctccatcatgtgaaaattcatggggagaactgaggtgactggtgacgatcaaggatgggtaaagctttagctgacacgtgagccatggagaaattactgatcggacatatgcctatcgcgagggttccagatcatgacacaacgaccccatattcaaacaaggtgcctctagtatataaatcgtcacctctcatccagaaggcagaagcctgtgttcgagtactgacatgaaggccgggtattcacggcttattatcaggcaataacaggtagcatggcattcactttgagatatgtccttgctgatctttcatacccatctgatgatctgatgggtagtttatccagcgtcagttcatcgaaactgcttttcgtgctcggcttcaactacagccaggatttttacctgtgaggatagcatcgatccttgtcatgcctttgctcggtctcacgctcattccattcccatcgaagccatcaggccgtgcgagagtgtcgagtagctgcggagacataaaggggggggctatcagtcaacatcctgttcaacatccttagccattccagcttagaggtttgatcagccgttgactttcagagtggctggttgttgggatgacactgtccaaaccttcccttcccccgtctgtgctctggtttaagtcatctttatttgagagagcgtctgtcacctggttgaccgtggaatgcagggcattctttctcatgtacctgttctcatgctatagctccaatgttcgttctctgatcgttgccacgttgtcatcaggacagtgaagcagtgaagatggacgggctgtcagtaaaacgcagggcaccttgaagtcaagaaatatgtacctgttcccatgcaatcactggcgagtctgtgggttgggggttggggaaaagacaaatggcagtcaaggcgtttacatagtgcctcgttgtcaggttgttaccgaagagatgctatgcatcttgggcgtggccaagacgagcagactgtcagtgcgggtgcgttgatctgacagttctgacaactcggacaagcacggccgaatgggcttcattcaaggtaggaattgtgggcgtctttgttggtcatgtttgtagaaatcacagaggaggtcgggagaatggcagatctaggtagcctcgtatgagagagaagcacagggatattttcagcagagcatggggagttttgattttgatattctccaagtgtcctcagtctaggccctcccatctcttcaatatgccaaaggagccatgtgctcctctctcggatacaaaatgacattacacggagtgcgtcgaggtaacggaccggtacttcacatctttccgacctgtacaatatcctgccacgcgtctttcggagcatccggcgttcgtactgttggggtaggcccgcgtttccagtgctcgagcttttcgatgcggtcctctagctgaaaacgcacccaaccgttagctatcaaagcacgtcttgcctaaggtaagtgcatgaatatgcatcacccagtcacttgcaaggcaagtggtgggtttcggagcagactggggcggtcgttgtcataaaaaaaagaattattcacccaccttcgggagtgaatgttggaaccaatgttcgactacggataacctgttcgctgtgtttttgtccctcttcagcctgtccgtctcttttttcgctctcccaattctatccttcgccaaagcctcccagaattttttgttgaaatcgtccctctccctctcccttctgtcctggtttctcttcctcttgtaaacatcaaccccgatgccgagcagcatagaaaagagaccaaaactggcaggtagggtctgacggattcaaacatcttggaaatgtatttttgaaaggagtgtgtatggacgcctggtgtgccgggatagcaatgacaacgactgagcgaattggttggccagtttgtgggcatgcgggaaataagtttgacggtggcaggataaatatagataaggcttgaagggaaagagagtagattttgggggtgaaaattgaatggtgacctgcattggttgaagttaaatcgcgttggtggcttggaaaaactccccatcccgcgaggtatcacaatctgaacgaaagaaacaagactgacatggaatcaccgcctggaaaataatcaacacggtactcgactgttgttcgaggctccctgaccatcttgagggccttattttcgagtagcaacctcctcttcaaatacatggcatgggcatgcattggaaactatcactgcaaacagtggcgcaatgtcaacaacgacgtgtatgccaggcgggcagacatgctggatctcacaatcagttttgaaacaataatggggaagagttcatgtccagtcagaattccatatgttccacaaatcaagctaggccggtgtttcgcttcagggcttacaaaatttgtgtttgccctaccagcgtcatgaaacactgaattgacgtgcgagttattcattgtcggtctcacctaataagcactcacttttcacaagtcaccaagccatgttttgtaaggctgaagccatattcgttgcggatgatttccatcgcagcaactcattccgagtttgagcagcccaaggaggtgacacgaagccataaaatcagggctcattatggctgggaagactggatgatatccccactcggcaacccaggtgcaagaagacatctgtaacacagacagcggacatcaactaggcgtgacctgtactgtcagccgggcaagcgcagaaaaacttcggccaaggacagaggcttcggactgagaaagcgaaagttgtatttctggaagatgatctgcatcctgaatatctgatatctgggaagagagcagcaatgaataaggcgtgttggtgagttctattcttaacaagccagtgcgtaggcggcagtgttgtaggtagagcgaactagaaggctcttcgaaaccgaccagctgagacgcgtacacagtagagtccacaatgaaactattgacagacgaagctttgctgactggtcgggagaggccgtgaaggggcgaggaagcttgggtccggcactgtgtgtacgtacctgatctaaagattctctagtgacggggtggatcttcaagctggagttgctggaggccggtttgagatggcctgagacagttactaccctcagagaggcttgtctttgttggtctgacccgagacgttggaaacggcccaggttcttgtggcccagcgggttgttgggctgctactttccccgcccccataagcaacagctttcccggtctgaggtgagcgagtcccggattccacttgagtccagaactctgctgcgttgcaacggtctgaagcttattaagtggggcgtttctatgttacgtcagcgcccaggcacacccgttggcggggtgtgaccaacaaccttcacccactgacaggtttatcacgattatagacaaatatttcgaagtcgttttcgaccaatgcctttctcattcaggaacgcagcattgcaaaccacagggctcatcatgttgatccgtgcttacaagtgtttggtaacggatctccgttcagtgtttctggccacactcgccatgctccaaacccgtcggctaggaaactgtcacgggccgttgggatgagcttttcgcagggctcagacttggactcatccgatgaactcacccctggccttagctcaccggcctccttcgaagaatgtcccctcgcagcctctaggctagcgttggtggtcggtctgcaagaccaccgacctgccgcctagatggggacctgcttcttctacgccgatctcacaaggcgcgttcctcatagcacacacagtaccgtcaacaagcttccagctggctgggtgatgttgccgctcgatcttttttcttctcaatttccttctgacgtatgatctcgtcttctttaatcagagatatatttctccgacacttctggccactttcgtttgtgacacgcaggttgcatctctcgtttgcacaccttacctatttgacccttcacaccacactcacttcaatctttgtttcattgcaccttgacttcaaagtataacagacacctaccatcgaaccatggggccgccctccttccttatgaggagcaaatctgacgattccttcttgagcatactttccaccaaagaggagaagtcgcttcttccagcgccagtacaccgaaaaccaaaaattagagtacgaacgcttctaggccattgcttatatcgtagggtgatattatggactgccggcattctatttctcttatgcttagcgctttcatcaccagggggtcgccaacgccgccaaaggctgatggagttggtggacttgagccatcaggatgtgagaagcagcggtggtgagggtgaagcaccaacagttgccaaggacacagagggtgtggtttttgtggtctccgcgggagatgcgccacaggttcaagttcagggggagcacatgccgacctggttgcgatttagacagtgagtactccctggaagaggaaacatgttgatcgcgacttggcgctaacgttccaccagccttgacggtttcttcaatggtctcaaagccctagtgccagcaaacgaatacataccggagtatcccaggaagccgggtgaggcgtcaccgttcccactcacgctatcttacaccggcttgccgaccccgacgccctacgtacctcaacctgactatgaatcgccggaatacatctcccagtaccacgccgtcgaaaaatgttacctcgacaaggaacggaggattccggttcccgatctgtatgcttacaatggcgttgtccaaggccagccagaacccgccatgggctcacgcaacttactgggacttcgtgacgatgtttgctttgacagattcggtcgatacgggccttatggccttggatatagctttgacgagggaggtgcatttgttggcactgacacagagcaggaaggcagcagtacggtttgggaaaagacgggcaaaattaactatgaaaacatggactggggcgatgcccagacgcgctgctacgaatcgaacaagaagcgcttcgccgacccagcagcaccaacaaaaactgcagcagtttcaggccaacttcatccacggtcatttttgcgcaacgagcggcagaagatcccccggacggccgtggtcatcagggcctatgttgggtttcagtggacgcaacacaacatcttgaacttccgggccctgatatctgaactggcgctcaaatccggcggcgaatacgccgtacacttcctcctccacgtgcgcaacaataacgaggccatctgggccgaccccatgacggcccagcgcatcctggacgagaacattccccaagagttccacggtctctgcacgctatggtcggaagcccaaatgcgcctctactacccaggaaagtttgggggcagcttccagaaccccagcggtggtgatattcatggtgtttaccgcagcgcccatttccctctgcagcacttcgcgatgcagcaccccgagtatgaatacttttggaactgggaactcgacatgcgctggttagggaattactatgagctctttgatcgcctcagtgcctgggccaaggaacagccccgtaacgaactgtgggagcgctctgccaaatactacatcccttcctaccacggctcttgggagaactttacctccttggtgcataatgagaccttgaacagcggacgcgaggccacctacggcccagctcagttccccggccgccaacccctccgatcagaactccgaggcgagagcttcatgccctccaattgcgatccaaacgacaaatccgacaccgagtgcggcaaaggcgaagaagccgatctcatcactctgaacccgctattcgacacggaacactcgggctgggtcttttcaacggatgtcacaggatataagcgctccttgcctctgcctccgagaagatgtagcatcatcaccgctagccggctctcccgtagattgctgaacacaatgcacgaggagacctggagactgaagcacaccatgtttgccgagatgtaccccgccactatggcacttcaccacgggttgaaggccgtctatgcccctcaccctgtttacttggaccgagagtgggagattgaagcgattgacaaggctttcaacggcgggagggatcacactgctggcgggcacggttctccgtttgacttgaacaacgagcataatcacaaggggagcagctggtactacaatagtgagtttgccggcttgctttggaggaggtggttggggtatgcgcagtttgatggccggggaaggaatggtggacggtcaggggaagggcaattgaggggtgggaaagaggaagaggagagggcggctgggacgggcaggttgtgcttgaggagcatgttggttcatcctatcaagtgggagcatcctagtgagctggattgagttcccagagcagcatgtttggagtcttttttttgataaggcggggaagggagtggcaaagggctggttgaacctttgctgttgggatatccggtaataagggctgcataattgggcggacaggtggcataaaagtagcattttttgcggtcgtgtttgataatgtatatgcttctttctttcttttgttaacaagctagccttagttttgataggcattgaagcaatgttttcttccaatcgtgaagttgtctaagcagcagtgctagtgttacagtctgatatctgggtcgggttgcggccggccgccgccataaatggtccgggccgccttgtgtctcgggagatgtaaaattggccttgttgctgttggcaggcaggcaaaggcacagaagggttgacatgtttcaggcctcacaatgcacgatgcttttcaaattaaatttagtgatagatgagggcggcaaaatggaaggcaaactttccaaagaaaagaaatttcttgatgttgcacaaaacctggatcgccaagtacttatacgatatgcagagtccctatgacagagatcaagagatatgcacctccggctgggtcccgtcagcggcggccccggaggtcggtggttcttccacccctgtcagaatccaaacccaaaccccttccggagctcccccacgcttttctggttcgctgacggcagtgggtgacagccgagttgtcagtgcgaacggacgggggagagaaaggctggatgggatggatggcacggatgcaatgggagtggtcatgtgctcaattaacgcccgtatgatgtgcatattcggttagctgtgggatcaccaggagagaagaggttttttttgctcccgttgaaggtttgctgaatggatggatggatcatggtgaggcttttgaaagtttaagtctttggtcggatgatgaccaccccgctttcttccagggcgattggaaccgtggggtaagcctctggggagcggcgaatggggttgggtaacggtgttagtagtgattgctctaaaaagatgaacagatggtgaacagacagatgaaagcgtctccggactgtgaatagagattgtccggccgaagccgagtccgttgggtttgtcattgcttgtctcgaagatattggcacatgtcagataccgaaacccaatgatggatatggctgcagtgcttcgtcattgtggaccctgctaccactttaacactttcgacttgccctcctccactgttttcaatccacagtgacatcgacatcgatttcaagggaacacagcatcaggggcatccatcgaggtgcaaggtgacgcacaacaaagaagaccaccccaccgggtgttcgcccaaagggcacacgggacgaggttggcgcaaggctgaagacgccctcatgtccagctgaggaaaactagatacagatagataatgcattctatgactgaggcttatctgctgcaccttggtggtttagtggctgcttttttttcgatgaccccgtgatcgcagtgttgggactcccaatttcggaccctccttgctcccctggtcggcggacagggcagctgtggcacacccacctgcatccgcgcctgcagcataaccacctccacctcctgcccgcacactcctcaacacccaacgtaaaggccgccttgtctgagacgcaaccctctctcagcaacgccgcagctcttcttcacatcatcttccaaccttatctccttttcctcttttttcttgttcccttagcctctctgggatagaacagacagacgacgacaatcgagcgagttcctgcagcagacggcagcactcaatctgttgttttagcgttcagccactcgcatcagagcccgaagcacaagccagcccgtccttgtttgccagagctccccctacctcaccttacctcacacctttcagcagaagcttgacttcgtcttttgctcccgtcctctgtaatccctcgagtcctcgatactcaaacaacgactgccatcatgcccatcatcccgaccacagagattacaccacctgccccgccaccgggccctccccgaagccggggctcgaccgacgagggcgttttcgacgatgccaggacctactacaccgccgatgagcgccatctgaacacccgggcgggtgccagaacccgcacctactcccaggtattttctgcttgtgctcatggagatgaccaatgtggctgaccagcattgggctgcaacagaacagcttgttcaagcaaatggagcggatgggcctgaaggagccttaccggagaggcagtcatggtgagtattctgatattccccaattttcgaaacacattacgagctggtgctgacaatgcttttccagacgaatccaccattccacattctcgtcgattccttattcaagtcgaacctactctacagagcttgcagtcacaggaggataccgatgggaacatgcaaatcaccattgaggacaatggtcccaaggttcttacactccgcactgcggcgtctaatgggcacaacagattcgatattcgaggtacatacatgttgtccaacctgctccaggagctctctctcgccaaggagtacggccgcaagcagattatcctcgatgaggcccgcctgaacgagaaccctgtcaaccgtctttcgcgaatgattcgtgatcacttttgggagggactcactcgccgcattgatgcctccagcattgagattgcggcgcgggatcccaaggactggacagacgacccgaggccacgcatctacgttccccggggcgctcctgagcaatacgaatactacaccaaggtggcagaggagaggcctgagctccggctcgatgtgcagctcctgccagagaagattacccctgagctggttcgggatatgaattccaagcccggtctgctcgcggtcgacatggaggaggaagtcgatcccaaaactggaaagaagacgctcaagggccgaccattcgtcgtgccaggaggtcgcttcaacgagctttacggctgggacagctacatggagtctctgggtctgctggtgcacgacaaggtcgacttggccaagtctatggtacagaacttttgcttttgcatcaagcactacggcaaaattctcaatgccacccgatcctactacctctgccggtcacaacctcctttcctgaccgacatggcgctccgggtgtacgacaagatcaagcacgagccaggtgctctggagttcctccggacgtctatcttggccgccatcaaggagtatcacagcgtatgggtggctgagccgcgtttagaccccgtcacaggtctttcacggtacaggcccgagggtcttggtgttcctcctgagacggaggctggccatttcgttcatattttggagccctacgtcgagaaacatggctgcacctttgaggagtttgttgaggggtacaacaatggcaagatcaaggaacccgagctcgacaactactttatgcacgatcgtgctgtccgtgagtcgggccacgatacgacttaccgttttgagggttgctgtgccgacctcgccacgatcgacttgaactctctcctcttcaaatacgaaacggacattgcgcgcaccatccgaaatgtgttccacgacaagcttgtcattcctgctgagtattgcgtgggcaatatggagcccaaccacgtcgaggcgtctgctatctgggaccgccgcgccaagcggagaaagttggccattgacaagtacctttggaacgagcaggagggtatgtactttgactacgacactgcgaaccgcaagcagtgctcgtacgaaagcgcaacgaccttttgggcactgtgggctggtgttgccagccccaagcaggccgcagccatggtcaccaaagcccttcccaagttcgaggctgtgggtgggttgctgtccggtactgaggagagtcgtggtgagattggcctggagcgacctaacagacaatgggattatccgtatggctgggcgccacagcagattttggcgtggacggggttgtatcggtacagcttcacagaagaggccgagagactggcgtacaagtggctgttcatgattacaaaggcgtttgttgacttcaatggggtggtggtggagaagtacgatgtgacaaggcctattgatccgcacagagtggacgccgagtatggaaatcaggggctggactttaagggtgttgccaaggaggggtgagttctgattcttccatgttggggtgctgagtataatgactaacaaaatgattagatttggctgggtcaacgcgagttatgtgtacggcctacagattgtcaatgctcacatgcggagagccctgggaacgctcacgccgtatgagacttttatcagggccgtggaggagaatagggcaaaagcattggcggagttggtgtaaattctttaactgtcaacaataagaatggaaagagaggagggagcaatggatgggttttggggaagagaaaagacgactagaaattgtagaaagttgcatacctatcctaaaatgaagatatccctgaagagaccaccggaattggcagagtggcgatgatccagcaagggttttggttgtggtcggtgaaatgatgagaatggaggcatgatggcaagtgtgagagggcatgagacagcctggtggacagtgaagtggatgttagctgagggtccaaggtgctttgcacgatgccaacacctaaagttatttcaaagtgtattgcttcctaaagagagcttgatggtatagtagggttgttaagtgaaaaggacattggagatgtattcaagcctctcgaagaggtcttcttgtcaggatgtattgtgagcttgatagtttctatctttcaaaagcttcctctaagtcatttcacatctctctcttgtttgctcggtgctttacctttatagctcctatctagctatatctagacaccttgcggcctccactctgtccagatgcaccatggcctcttcatcttccatcccatcattatatagatatcatttgcagccgctcaatctgttaacatcatcatcggcagctgccgacgaaatttacatgatcgatgacagccagagatgatttcgactccagccgctcaacacttcatctgagcttttattaacttatccgttatagcgattgcagccgttcgttgcctcggcgactgtggacgaaaatgtaaatatgccccctgttcgcttttcaattgcaggcgataagctgcgattgcggacgataagcttacgatacaatgatgccctcccggttattctcacgcttttggctgcggataattaatagattcggttgcagccgcttcagcagcaagagcattatggcatcaagacaacacacccagtgaaatggaacaaagagtttgaagaaactcttgacggatgctagtattaaccttactaggtagctttcctaaagacaattctactgctcctgcctcttcgatgttgccagatgaatttcgtctgcagctgcttagctgtcaggttgacggcgaagggaagaggaaagaaagagacattaagaaaacacagccggagacttcccttttcttctccgattgatggtagttagtatttcgattgcggccgctggtgtttcggttgcagccgctgatatacctagataataaataaagctgggatgaaggactatctactgtggtactggggaccgcacgctctcgatcgagtgagattgctgctaccgcagtcgagggcagacgaaaaagatgtgatgctgctgacgaacaatgctagcgcatagggagaagcaaacctagggcagttaccttctcatggagcaggatagtcggccaagaagaaaagaaggatgtggtattgttcgggtcggtgaactggaaagcaagagtgggagaggtctctgatagagtactctggtccacaaagtcgctcgagtggaattgctgctgttgcgctcgagagcaaacgatgatgaataatgctagagcgaggaaggggagcgggtgagagtagggggagggggggggttgtattcaagtgcccaacgccacattccagagcataaagtgagtgatctttaatggacttatctttgcaaaataaaaaacttaagttggtctgctgttaaacattggtattttaatatggtgaaccactatactttatgaagttatccaagcccttatcgttttaacccgtttagatgtttttgcatatttacttaactatttctagacgttatgcatatttcgttaaccgtttgcagacgttttacatatttatttagccattcgcaaatgcctgtcatatttacttaacccgtttgctggcgtttgcatatttggtcagctgtttggagacgattcatattattaagctaactgtttggagctgcttaacattcatttgggaattatctaaataaaaatttcaatgcgtctgcaaatgctttttttttcgtctcgagccgcttagttattcatctaagcttatattatgctttcttctttaagcatctaagcagacacactttgaccatggcatcaacttttctatctaagctcaatattgaacatgttagtttggaaaatctcttatttttaaaatgatatagaattgatgtctatcaacagctcactgctatttgcaaaatagcgtggtaaatacacaagtaaatacaacgacaaaaggcgttaggtctcaagtattcaagtcatgatgcagagaattatccataggctcatagatctaagattgaagctttggaatggtttttgcaaaatcccaaggataagcagcattttcaagagcttcaaactgcagatataaaggacacaggatatgtgacgatatgtagaagatatgctagcaagcttttctggaggagataagctatggagcatagtaaagttggacttgtaaaaaagactctgttgttttgttattgcttctagtaaaaaaagttcaaatctagaagatatcacccacatgtgaaaaaaaagaaaaaggaaaaaggtcttcaacagacctctggaaaaagctattgctgtcacggtcagaaaatcgattactgctgtgaagaaaaatagctattactacggacgttttcgcgataggtagaagcgcggatgcattcgttgatatggttgctcactattaagtcaaaattaacttgcgatatgtttgtgaataagatgcttctggtatttccaaataaagtaaaaataagataagcgattgaggtgcggtgttgcttttgcctcgttcgtggcccaaacactcattgccgtctcgggcacctccattgggtgcgcaggcgaagaatgtatctcccgcagtgactgcattgggccctgaaaccaaaagcagtctcgctaggagaagggcggtaaccagattgtctcacgtaaagttcaccattacataagacaactactccattgtcacgaactgtgatgctcacagttaaaagccggtgaaggtctgacccatacaggtaagcagctccaggttaaaaagaacaacctcatctgaaggggttcatctccccaaggttgaaccttgtacctcgacacaacagaaggcggtagagcagatacctaggcgttcattttctcccccttctacccgcgaagaaagctaaatgcctatgagctcatagcttattggaggtgagacagatagattttgaacaatccttgagccacataacctgaagcttcctacccagcttttgatgccttgaagcagagttccctggcgtagcagtcagtttggcacaacatgaagaccttgggcattatcgggatctgaggtttctctcctgatttgcgttacgaccaacgaccagttctggtctaccatacacagcttgaccagaaccagcaattcactgcaccactcactacctcactcacaaccatggcaatattggcgtccaccaccacaactagcaccaagggatctgccctcgccgcgagagtaaccctccgcggcgtggaattgggacttcagttgagactcttcagctttacaagcacaaagaccgcaagagataccacaagtcgaggcctagaagattcaacagatccatcagctcgaaccaggccgtcaagtcaacgaggtactgcagcagtcccgtgagtacccacccacgtcacagacagcacatataacgaggaggaccaggtcatcaaagagaccaaagccaggataggggcgaagcagcaaaagctggcaggcctggaggaaaaggaccagcgcatggcggatgaaatcacccgacagaacattgaaataggaagaaggctagccggactggagtgtcctgtttatgatcgctattgcggacaacctcgagctcgtatctaagtatcggcagagtacatgggtaggttgcctaaccacgcacacagctcttcattccttaagctcttagctgaccatctttgaagtttcattagcccctctcgcggtcataactcaccctcggcggttcacatccacttcggggaagagaaggcgccatgatatcaacaacccaggcggcgaattgctcaacaaaacccataataaatggacgaaacggggaacttcacacatcaaagggatctcgatagcaaataaaacagagtacaagtctgcctgctttctatttacaccccctttgactcgataatatttcgtatcaataaaaggacaaaaagatatcaataataataaaataagaaaagatcctgctcataacccgtcacaaataaacatactcccttctgtagggcatctttctcgatcctccatatcaacccaatcttgtttaacccttctccagaaagaaccgaagcaagaaaaaagagaaacgaagcaaagggggacagaaagtggtattcaacttggttacacacacacaccaaacaccaaaccccatcagcataccaaacgtccaaaggggtagtagtaatcgaatagaaaacgacacaaaccacaagtccttcttgatcaaaattctcatcaaacaccctttctttcaagaaaccaaaacaaaaacgacatggatatcaaaaactgcaaagcatgaaaaaaaaagagaaataaagagagattaaaccggactttgcggcaaactagcccccaccatcaacccccccctcaaatccccactccctgtcctcctcaacgcctggctcatcgtctcaatactcaactccccgctcacggtcggcccccccgccgcactcaaccccaaaggcgggatgccatgtcccatcaaactcgtcgggctaccgagcggcttcctcgccgggctgagctccaaccctttcacacttccactcttactgcccggatcacccgctgatgacgacaccggcgacctgattggggaaggcgaccggttggcgttgttgttgagcgaggttaacgaggtcagtccggggatgagcatgctctccctgctgccggctactccgccaaaagactgctgctcggcttgtactacatccgcaaacgagatgaatgacagcctgcggacatcagtcgtgtcaagactgccgtagttgcttgcgctgtcggggttggtggggctgttgcctcggtcaagggagaaggccgcgagctcgtcgacccatgttggctcgttgtagccgccgccgccgccggtgacggttacggcggcgggctgatgggaggcgtgtgtgatgatctcgacactatctgggttaaggtgggtgtctgtgatggcttcggaggaggcgtcaaggacgggcgggatgtagttctcggtctgaatatgggaggggatcgcaggggaggtcgggagcgcgacggcggactcttggacgttgcgctcaaagatctggctgcccgctggggacgcaagacgtggagaagaggcgaagggtcggctgggagaggacggggtgtaatgggtgtgttctgtgcggataggagaggcagcggttcgtcttgttggcgaggaggttttttcattagtagacggtgatgcgactgttttggaggtcgatttgatgacgtcttctacttttttcttgccgaacccaaagagaccgcgcttcttggtcttcttctcatctccatccgcgcgcggggtcgcatcgtttgagcttgggatgggttgagtgggaaaagggacgggttccccagtagagatggttgctgaagctccggccatggttgcgattttgcgagtttcgtcttgcagttcgtagagagtttggagaatgaagcgcaggtcgaagttggtcgcgattcggggctgttggcaggttaaacgggggagcaccgggtggatcaatcccagtgggatggctgcttggtggagtcagggaccttggtggattcgttcgataaagcttccaagtcttctctgagaatctggatgcgacgccaaaccaggacgttagcaaaacacagcctcagcaagtcgtctgaatacgtggttattgaaattttgtcaatctcggcagaacgttgcggtgggggtaaaaagcaagtgtcgcgataaaaaaagagacggcctgtgagcaatgcgaatttcccgattcgccgcgagtatatcgattgtgaagtggtctccgccgacgagaccaatggagcaggagacaggagatggggatgcggtcatacctgatcacggctggcggtgcgacgcagaaagaaacagctgagcaagacgagggagtctaaagcgtctggaattatctggcgcggcgcattcgggcccaactctgctcccgtcgacccgctgctatgctgctatgctaccgtgcgggttgcgagagcagcaacgagagctggaggtttgggcagcttctatttgaaatgtcggttgggcgcaaaagctgtttttagcggacgggacgggaaacaagttcaagggctgacgggttgtcctcgtcgtcgggtctgggcctttttgcctttgttcttgtgagtcttggggattgtgatgtcgggcggttgccgaggtgcgctcaaatcgtgatcagcagggaatgacgatgcttgagctcgacgagtctacacaaaaaggaggggagagccggaccggggttttaagacgtaatgccgtcccacgccggcgctgccaagatctgattggaacctggaggaatgtgtcttccttcttgttttgggtccgagagggatgtgatgggcatatctatttggactttttgtatcatacaaatgcgccgaccgtccgacccttttaagctatcccctccctttccttctagtaacctacccttcgtgcagtcagtcagcgagcgagcattgaggccacccctgaccagactgctgtgcatggccgtggcggcggctcggcaccagccaaagcaggaactggaagactcggtacatgatgttcaacaggtttttggcgtgacaaagtcaagtgatgttgagtgggcaaaagcccgctaggccaagtttcccggctgatggacgagcagagacccctccttctttgatccctcgacccttgacccctaactgtccgtgagaaggaaaaaggagttcaagctggaaccgggcatgcccgatttgtctgtctctgcgacatgtgcgaggttcaaagacacagggacggcaagcgattggtgcgatccagccattgtgttgcataagtcactgtctctgtccaagcttcccaatggtggggttgtgaccgataaggggcagtcacagtcaggcagcttacaagctggttgcttttatttgggtctttttgttgagattttgaaatgctggatcactagtattatctttgttgtaatgtgtgcggacttacatcagccgatagagggtaaacaatggtggctggatataaggtgatggtgatagcctgatgtgcccctcaccagtcacattgagatacggcactctcagacgagctggccggactatttttgaagggatgaaaccaatacccctgagatgagccgttcgtatcaactacagcccgaagaattcccgtgtacagtgaggcaggtgatccttcccgtcaggagtaaggcgcacataaattgagggaccagatgttttctggaagtctgcaaactgtgtaccaaatgtcacgttcaacaggtgctatctgagcatcttcgtaagggtactgacattccccccctgtcagccgccgcgccagcttcgcggacggtcatttccttttgctttaattctctatgcgaccaggcatcacacaaatcagggcctcggtatgctcggcgccgcaaccacgcgagtggcttacgtagctgttgtctttaaccaccggggcgcgtatagcgttttacttcatgggttctgcctggcaggtaacatcataaaattccggtctcttcagacttgcgacagcgctgttctgggagatgaagctgaccgatgttgagcatggtgtaagtgggatacgttaccaagtgaaattgctaggatgcctagctaaagactaatgccgagccgagactctattcttgggcttgtttgctttgtcgaattctgggcctcagttacatatcccaagcaaaccgctcccgtgactgacagtccggcggtctcggagcaggtcgaccggagccggcttactccaccccgggcccgggtctgggggaatggtggagatcgacccgggctcagtggtgattggtttgaccgtcccaagccgtcgagccaagcccgaagcactgacctccggcgacccaaaagctcaattgaaccacgtgaccgagcttccaacaactgccgggctcaaaaaaagttatcgcgactccaaatcgcccagctacccggccgatgagaaggaggagaggggaccgccgccgcacgacataaccaccacacctccgatcccattcccgacgaggtccacccactttctcttgtcggtcatttcagtctaaccctccgtcaaaatggaagcaaccctctcccgcccagcagctcgctgctgctgtctcctcaagaccaccaccccttccacatcacgactcccccccctcctaagtaaccagcaacaaacccgccaaaagtccacccgcgcccgccacaaagcctccctcaacatccccccccacccctccttcctctccaacccaccagcatcatcccagacaggatcaacaaccctaatcttcaaccccccctcctccgccccctccgtcttccagacccccttcaagttcctccccaaatccgatccccgccgccgcgccaccctcgccaagaacctcttctcctcctccgtcaccacaaactttgcctcccagccggtagacgtctcctccctccccaccattttcgacgaccggtcccccgccacgacccccaagaaccactccctcacaaaagaggacgtcgaggagatgcgccggctgcgtctggccgacccgataaagaactcagtcttgaacctggcgaggcagtttggctgcagcgtcatgttcgtcatgatgtgcgtccaggccggcaaggagcacagagacaaggttcacgtcgagcctcacgcggcggcgagggagaggtggggtcccaagaagaggcaggccaaggaggagaggaagaggaggatggagatgttgatgaggggagagatttgaaagcctggatcaaggcaaaatcaaggcaaaatcaaggggtgtatatacaaagaaagcgaggagccggtttcgaaaaagggtatcttaacggaatgtttgtctcattgggaggaggggaatggaaggaaggggaaatagcatttctgtacgatagggacacatcacatgattctctctctctctctctctctctctctctctctctcttggttggggatatacaaaaaaggaggcttcactttttctgggaatcatagaaacgcggagacgacgaacctttgataccacaatacgggttgagtgggttgatgggtggatggacgagcaagcaaaacataccccagggcgcaggcagttgtaaaaacaagcacaaaaatgttcaaatgagcagctcggccacggctgtcatcgtgctgaatcaaatttgtataattcagtaaatatactttgtaccaatgtgcctcccctgggtgctgaatcacttgccccgctggatactaccacctgtagagagaggtactgtcaatctcaccctgtgcaccaccgccgcccttcccccaatgacagcgctgatatataaatatcccagactctaaattaacaacgcagtaacgccccctttttatgctgcctccttccccttgcccttgtttttacccctccaagaactaatactgtcctcatccttccaatcgctggtcccatgcctgtccagctcgtaatcaccctgcgcaggaatgactcgcgagcaccatccacaccaactcctcctcttaccttgaacctcccttcccaatacctcacccttcagcctctcctcgtcccattctggcacgcaagccccaaccttgacccttttgaccgaaatcttcttcataacgcccccgataccctcgacttcgtgtctcacgtacccaaccttcatagctggggatggcgtcctgcgcatgtggtctgaccctgagctcaaaagtccccccaaagtattagaacccgagccgcctgtcgcattgctagccaagctactgagactagcattgctggcagcagatagacccgacgccatcgtcgaagtagaagcactgctaccacttctagaaccgagccctgcgcgaagccggtcctgttgaagctgctggtctgccgcctcccgagcggcctcggcatcatagtccgtttcctgctcaacctcacgggcgccgcaacactgcgagttacgaccgcactggaccccgcggtcaccatcaccgatacccgttcctaaaccactgaggacatcggtgtattggttgcgccacttccagacgctgccacggaaaacatgtgttagcatgtggaatttgtaacgggagcgtgtgccaactatacctttggtaagtgttatcttcgtttctgatagaccttccgcacgggaaacacagccagaccccagaggagccgcattggcagatggcgcgctgcatatcatccgaatcgatgcggacctcggggcgcattgggggcttgacaagctgacctaggggtgccttgacgcatttggtgcagagacgccgatgtcgatctcggagcacgatctgagcaggtggtttgatagcgcaattctggtattgatacagtcagggggttgttgcagcggttaagatcaagctttgcgaactcaccctgcaaacgattgtcccacatcgtcgacaaggtcccaccatgtctcgtgcacattgccctgatttgccctggaaatccgtccttgcggaggaatcttgcccgtagtaccagttggcagagcgcgctcgaaagcgtagtgtgtcttgcgggtcaacagtgacgtcttcgagagagcatcgaagcgacgagttgatcagtcctctgcgatcctgcagcagagcgctatgtaatatgtggcatgtgcgggagaggctgtcgagggagttcaagtccaggttcctggccactgattgcgcgatcctggaaccagtcagtacttcctcacccccctcgatacgccgccgaggggaagggttggtgatggtcttgaaaggacgacgtgtttgaaaggattgaaaagaaagggtgattgccggcctacggataacatcccaaagccttggtcataaggtggtcctgattcagaacctccttgacggcatactcatgagcctcctggttgtccttcttatctgtgctaacacctttcgcctggtgagcttgagcttcagtggcattccacacctgcccatctctttgggactcgatgtcctcgtcgtccaattcaacaaagacagccattgtgatagatcgcgctcaggggaaggaaaaggggtggtgtcgggttcaatgatgatatcggcgcgatagcgatgatgcggtgaccaggagggttctcaaagacccggaatcggaacgggagatgaaggagttgcaggcaaggcacagggagggaacgcacaaagacaataacaggggaaaaggagaaacgtatcactgaagaggaaaggatagatgtgccattatcaagccgtgaatgtaaactctggcaacatgatataagttgatgccagtttgacgtgtacaccaagcaacgcttgtagcttccaggtagaacgaaccgttgtttgggggaggagcccggtagggaccccactctgggtaaacgaccccgtcaccgggatgcaggagcagctaaaacaaccccaccttggccaactgctaaggattggcggggtatttgcccacgtcactatcacgaccgttgctgcacctgggcatgtgacgtttgcgactttgctggatctgaacgccattgagagatatcttcaagactatgatggattagacgcaaaaaactctgccggggcacgtggctcatgccccggaggaacattgctgttgcgtacagctgttacgtaccttgggaaatctacccctcatagctcttgcctagttgttggcacgggaactttactatctatattgagtttttcgagacccggcagtctggaacatcctttccccagtgaggcgtcctctagaactacgatcgtcctggcgccatgaacaatccacgttgttctgcgcgtcgaagcttcgaacttggcccccatgtcttgattgtggcacatgaccgagtctcttgaattcttcaccgcaccactctgattcaccgcatcatggtacagttcttccttaccttgtgttatgttgccaatgataagtcatggctagagcaggtacagtaatatgctgggctggatacccccctccgtcaggtatgtccaaaacagatggatatctcctcttacttgatcgcgcggaagggccaacatgtgatttgtagaccatgcctacagagatcattcttgaacgaaaggttctaaagggacatctgggccagcgttgtcaattcgggatacactacccgccattctcgcctggcgttgaaagcctctgtgcctctcgcatcaaatcgactaaatcttctcatcagcaaccactcccaaaatctgaatcaactgggagttaagcaacgccacagtcgatatccatcaccgttcatcttgctcatgtggttacacagcagagatttggtacctatcagcttactggacacaatcctttacccgcaaacagcttaccgtgcaggtcgaatgccatgttggaggacccagagccgtcgatgaatcctgccgatacgagaatattgttgccggcatgagaatgctgtccctccgtgattggtcaacctgacaaccaggtcctgtcagctcttcctcacctgcagaatttggcagcatggtaacacgcaccgcatcactcgatggaccgaaactcactcactcgaaagtcagcaaatcaaagccgagaccttcagcaacttgaattggaaaagccttgctttatcgctaattttcccgatatttgtctgccgtttatctgcgggagtagtccgttttggcgaggagcaaacgctctccctgtcggcgatccgtttaacaagccagcacgtatccttgccatccaggttactatctttatccctagtcggtttgccgtcgatcatattgattaatcggtagttacctacctggtgcgtgggactccaggctacaaagcccctaacagttgacgataattgtacaccgatacactcattgtttactggcctcaagccttcccatcaccatacactacggcagctcttatccaggcactgtgcttgtagagacggatctcacctcagtcccaacctgaacaacactcacaaatccgagcttatcgcaaggcgccatggacccatgcacaccccattccaaagctgcagtagacggtatctgagcacactggcctggaaatgcggctatcgcgaagtggtaccagtgctgccgtggcttttcaaaccacaagaggcgttgtgaagcaggggtgaagacagctgaaccgctcgagcgcaggcatggaaagcttgagcatgcaagattggtggctgtcaatgccccttttcaaaagacagaatcaatattcacaacctggcaaaacggcgcttgacgggacacgcctcagtgcctggttcatctttgcgtttatcaatctaccgcagtaccaacaactgtcaccatcgttgccaacaacagcgattattccgccttgaatgccaagtgctgagccgaaggacatgcattgcagtgatgcgacaacggactctcggtcttcgtatcggccatcttcacaaaagctcgctcctgtccggagcaaaacaaaaaacgatggcttcattctgagcctcaacaggacattcctgttttcttgtagagtggaattatcaaagcacccagtttgggcccattatcatcaccgcaatctcggcggcttctaacatcgagttcagctccccactggaacacagaaaagcgcgctcgagaattcaccattgctcccacgctaatctcagtgtccagcgcctggccagggcccccctttttcctagtccaaatttggcagccagcctagcaactatcagaaaactgttaagccttacgagttttgcgagcgccaatcagtcagccaccggctgtggcttgctgcgcgcggccaatacatatctcttaattttaccagcaaacaaacatggccgtatggttattcatcgctgatctggacccgacaggcaggataccttcgccatctgtctcatgagtctcatgaatgagccctgttaaagatgatcgaccgtaaaccacagctgacagcgatcatcggtggactctctgttcggatctttccagagcttaattttttcgtcttgatgggatccacaggcaccaaatggacccctgctgcatcactgcccagtcgatccgctggaacgagctggtttccgagctgatgtttggtggatgggggtcgtgctatccgtgccgattgctaccccgtacccaatttgagaatccctcgcgagggtccctctttcttgtacccaccggctttatacgtctagattctgccttcttgttcataattgcctctggacttttatcaggcgatcgagatgaattgtagaaccgatacctaggttacaattctgccagcactgcagccgggcacagccgacccgggaagccatgcgtaaatatagttggtctgcatggtatttccatttacaccacgcttaacgataaacaggggtggtgacagaataggctagcaggcctttcagcgcgggcgccaacccagtcttggggaacgcctggtaccttggcaatggcatcagtgcacgaaggggagggttgatgggcggcacgctgagctgtcacagcttgaccccctgctctgttttctcttttgattgctacccgcacctatacagggctcaacccccccccctccattccttccagtgtcactggacttgtttttcctttccttcgtttcgctctttgaggtccggattgactcaagatccaacccaaccttgttgctcacataccacgagttcgaacttcgagggttgccttccccaccctaagggtctcctggcgcacctcgatccgtgtttacgacgaaacctaatcggactgtcagacctctttactccggtgctcgagaccaaacagagggaaagccttgccctgacatcttgggaggtagggccattggttcctgccaccacgagataggccggcaagatgaagaaattccagtcgtactttacgcctgctacgggtccagatgatcagccagggagtacggacggggagaaggtaaaggggggccgtgggaaaaagcaggggaccaagccgactacacaccaacttcagccaatacagccgcgaggaagacaaccaccaccgccctccgaagcaacatctggacatgccactcctcaggttgcgtccggcggggcgagtatgctgtctgttccagacgcggcgacggttcggtcaggctccaaacgaagtccaagcagatcccgagcctcgtttcgacactcggtattcccagcaggtgaccagcggaaccatgacacgggcaccattatggaaatccgaaacgacatgatggtcaattggctgtacgagcagcaactccggaaacagtacgccagcggaatggatccctacgaaggtgttgttttgaagaagacccggggcaacttcacctgctgccccccccagatggctggcattcccgaatcgctgtacgccatggtctcccaaatgaacgtacgctgcgccatgacggtcaacacgcccgttgtgagggcgttgatggactcgatcgtcaccaaaaccgatatcgactatgtgccgcttcccgacgggctccgagtccagattttgccttccatggtggatcttccgaggggtcagttgcatcactttgcggcctttattgaggacgtcaggatgctggttgtgtgggacgatgagcccgagaagctgttggacagggctcatactctggaacagaggtttattgagatcatttgggggaagggggaggagggcgaggacgacgagaaagacgaaaagaacatggcaaatgtcaatgtggacgaattggacccgaaccagctggagggtgctcctgagaaacggcccatcaggttggaaagcgccatcattgtgacactcaccatgattctctggatcgtatgctcgggattgggatggagagcattggcataccagtctgcagtggatggtacctatctcagatttgcgctgctggccgtctgcccactgcagatgtttgtcagtctgttcttcttccagtcaattgtcagcaaccttttccagatctttggccccatttcagcagtcgcaaacaacagcaagtactacagcggaaagccaccccgccggctcaatcgcgatgccaacgctcttcctcatgtcacaatccagatgcccgtgtacaaggagggcttgaatgctgtcattcagcccacggttgtgtccctcaaggcggccattagcacatacgaaatgcagggtggatcggccaacatctttgtcaacgacgacggtatgcagctcatctccgtggaggacgcccaggcccgccgcgacttttatgacgagcacaacatcggctgggtggcgcgcccacctcacaatcccaaccccaaggaggaaggcgagctcaagtttatccgtcgcggcaagttcaagaaggccagcaacatgaactacgctctgcgcaccagcaatctcgtggaagccaagctcgatgctatccagcggggtcctaagtggaccaacgagcaggagacagctgcgtaccgccagtgccttgctgaggttttggatggtgatgaaggccggacttgggctgatggcaacattcgcgttggcgactacattttgatcatcgactccgatactcgtgttcccaaggactgcttgttggatgctgttagtgagatggagcagagccccgaggtcgccatcatccagttccagtctggtgtcatgaacgttaccaattcattcttcgagagagggtaagtcgtttttcggggcgggaggatgaagacaaagggctaactgtgcttctagcgtcacatttttcacctatctgatttacacgtgcatcacttacgccgttgcctctggcgatgcgtgccccttcgtcggacacaacgctgtgctcagatggtcagctatccaggacgccactgcatacaccgatgaagacggctatgagaagtattggtctgaagcccacgtgtcggaagatttcgaaatggccctccgcctccaggtcgccggctacacgcttcgctacgcctcttacaccggcgatggattcaaggagggtgtcagtttgaccgtctatgacgaactggcccgctgggaaaagtatgcctttggctgcaacgagcttttgtttcatcctctccgattctggattgtcaggggcccattcactagtctcttccgggagtttatctgctcgagcattccgctgcccaagaagatgaccattatggcttacgtcggcacctactacgccatttctgcagcctggtgcatcaccctggccaactactttatcaccggctggttttatggcttgtatgacaagtattatctggattcgttcgccatctatgtttccatcgtggttgtcttcaacggtcttggtaacgttgggttggccgtgctgcggtaccggttgagtgagaagggtcttctcagtgcctgtaagttttcatctgcttggctttatcatgcggcttgcagcccactaacttctttccagtctgggagtgtatcaagtggattccaatgttcaccatcttcctgggcggtctttctctccacacggcccaggctatcttgtgccactttttcgaaatcgaaatgatctggggcgccacggcaaaggaactcgaaaacttgagcttcggcagcgaaatcctgcgcatcatccgcaagttcaagttcacgttcgtgtactgcttcctctgcacggcgctcatgatctgcggcaccaccgtttttccccaccagtggcgcatcggcgagttttacgccatctaccctctctcgaccaccgtggttgctcatttctccctgcctgtgtttttgaacccggccttgatgaagttcacgtggtagttttggggagaggcttttgggtatctttttttcttctcatgactcagaaaaatgggtaatcgttaatgatgttattgttacttttcgagcggacgatatatacttgatagattttttcttgtgatctttcggacttctttacagcaatgattgggttatctcagggaatgggagttttggagtaacacagcttacggtgagctgaagatggggtggaatattaaagatggaaaccgactgtatacaagacaactcatattctcttaccacttgtattcttttttgataaatttcaattgagaaccatgacatagaaacttgcttctttacatatgcgagatacaagtgggggttggcaggctgagcccaagtgtcaaaatcaaagtttttcaagcattcaacttcctatctcggctgcggcaagctgcggcaaactgcgggaagcgtatcgagatacctgcgtgctcttggggtgacattggcggcgacaagagtggtgatggagcggaaggtgtgagccccgataagaaaagataagcaccgccaagctcacaattcttcgttggagaggggcgccacccgcgcggcgcgcacacaatcaagacgatcaaaacggccccgcatgggtgcccctccaaaaattttcccctccatcatctgccaccagccagcccctgcgggctattatccggctctcttgtagcaaaaaaaaaatgactccagaatatggatctcgtcttgacctcgtcctccgcttgccactgcttttcccagcctctggttggtcgctttctgtctggggataacctctggggttgacatctcagtgttctggacttgccttgtcagtgatcccttgttgacttgtgatattttcctgccgaacccgatctcggtgtggtgtccgtacccatcatctcaactcacgactcctcctcgacctcctctcctcctcggccaaagtcaagcctttccacttccgactgccgattctattacctataggcttttttcccgcgacgaattcttcgctggaaacttcgtcgtcacccattgccgatcgtcgaccgcagtgtatgtgttgcgcgcgcataccgatacatataggaaacagcagccacaatgtgcggtatccttgctctgatcctcgccgactggcaggccactgacgccgccttcgacttacacgaggctctgtactatcttcaacatcgcggccaagatgcttgcggtatctccaccagcgccgtcggcggcaggatataccagtgcaagggcaatggcatggccgccaaggtctttgaggatggcaagcgcattgctgatcttcctggctacatgggcattgcccatctccggtatcccaccgccggaaccagctccgtagtccatcatcttgttccaatggtgttgtctaacctaactgacaccctggttgcgcatagagcgccgagagccaacctttttatgtcaactctccctacggtatctgctttgcgcataatggtaacctgatcaacgcccccgagttgcgcaagttcctcgatcaggaagcacaccgtcatgtcaacaccgactccgacagcgagctcatgctcaacgttttggccaacgctttgaacgagactggcaaagcccgtgtgaacaccgacgatatcttcaacgccctggccgagacctacaacagatgtcagggcgcctgggctggcgttgccatgattgccggtttcggtgtgctcgccttccgtgacagctggggcatccgcccccttgtcatgggctccaggccctctgccacccaggagggtggcatcgactacatgtttgcgtcagagagcattgcgcttcgccaattgggcttcaagaacttccaggatattctccccggccaggccgtttttatccagaagggcggccaaccccaattccaccaggtcaccccgatcaaggcctactcccccgacatcttcgagtacgtctactttgcccgtccagatgcggtcatggatggcatctcggtcaacgagagcagacggatcatgggtgccaagctggcggacaagctcaaggagattctcggagaggagggcatcaaggagatcgacgccatcattcccatcccagaaactgcttccaccagcgcgcaggtggtatcggacaaactcgggattcccttctccaacggcttcatcaagaaccgttacgtctaccgtaccttcattctccccgggcaaaaggcccggcaaaagagcgtccgccgcaagctcagcgccatggagtccgagttcaaggaccgcgtggtttgcttggtggacgactccattgtccgcggtaccacatctagggagattgtcagtatggcccgcgaggccggcgcccgcaaggtcatctttgccagttgcgccccgcctatcaagtaccctcacatctacggcatcgatcttgcctctcctcaggagcttattgcgcacgagaagacgaggcaggatattgcccgccacatcaacgctgatgaggttgtgtaccaagatttggacgatctcaaggcggcgtgcactgaggcgagcggaggcaagatcactgagtttgaggttggcgtgttctgcggcgagtatcagaccgatgtgccagatgggtatttcgatcatctgaatgagctccgaggaaagaagagggaggccgcgcctactgctgggggagagaccgtcgttgcgagcggcgggccagtaaacgtggccaacggcgagaaaagtgtacagttcaagattgacttgtcgggggtgacacctgggggattgactcctttgactgaggaggctgtcaaggggactgcggcagttagcccggataacaggcaagatattaggtgagctttcttgttggcaattcggctgtttgagagtttgactaacgtggtagtagcatccacaacttggcaactgatcccaataaccggtaaatgatgtgctggtaatgatttgtgatatggcatggcgtgtttgacggccggggggtattttgcacgttttgctcggttcgattcgttgtacattcgctcactttgggggtttcacctggcatgatacaaaaaaagatacgatacactatcaagagggatagaaaaagacagacgggacggttggggaagacgatccatggggatgtatggtatgcatccgaacagggcgaacagggcggttgggtcaagttttgatgttgggaatgtatcaaaccgcagagcaagcaggtgtgggtttttgatagagcaaaaaagagaagatgcgcaagatcaaaagagacaatcctattgtttggcattggcgtgacactaggaagcgtgatttcggtgagtagccttattttgtgtccggtgaactcattcgagatggggccagcagcgtcacgcagcagatggactgacctcgtgactgggagagcaggtatctagccggccttgtggggttttaggattctggggtaagctcttgggcggcaggtggtcaacttttttgctttgtctctgaagttaaatacctgacccaggcagcaaggcaagactttgggttgaaagtgaacttttggcaagcaaggcttttcttgattgtcaaggcagaggatactttttcgtttgacgcgttcacacggcagaaaggcaaacattgcttttgactttggcatcgcgactacaggaatcacaacagttggcgtttttccaactcaaagtcgcaagtctaccggaaatactactttatccacaaccaacccaatattagcagcctatcttgttttcttcaagctgaagaaagcacccaacatgacgaccgactctacgactcctcctgccgcccaggcagagggtgagaagaccacaacaacacccaagaaagtaaacacaaccgcccccctcaggtcaaagtagtacactgacagaacgaccagacccggtcctccaaggatagtagcagcgttgctaccagtaccaccgctagcaaaagtgctgctgtcagcgctgttgatgcctcggacaagtcaaaggagaatgtgaaggcctcccttccgtattcgatccccaagaagccgaccagctcggagatgtattcggcttgtcattatgactagacttcttggtcaatatggggacggacatgattaagtcatatgggagcagagaattgcgaaattttggggagtgctatggtgtctaggttggggagaaatctcgggtttttgtgatcacgacaacagaggtgagggtagtagtaactcactgccatgatagtatcatcattcttatctttttttatcaaattgccacatttttttgtgcaagggtgttagtcgagcatgaccgctatgaaaagatatccctttataacagcaagacggctctttcgacagaagtgactggattataagtttcctcttacaactcgttccatttatggagctgctactttgcttggagcaccccttctcatcatcgttctcagaagatcccccagattgcacgcaggtctgtttactggatgtcagtgacttctggttgtcatgttgctgtctgggaagtggcgagggtggcaacacttcgtcacttgtgcatggccataggcatagcatagcaaagcataaaataaaataaaaatcaatcagagtgagagggaaggagcagactcaccaggtatttactttgattttctggctgcgtcttccatccgttgatgagcccttcatgatttgctgagtacctctctgaggcatgtgttaacaacacaggcattcacaaattaaaatccgaggtccagacttggccttgggcaagccaggttgactttttatatctttttgccgacccggttttttttttggatttgaaacaccgcagaatagcaggccaccatggcgcaagctaccacaatcgaacctcgctggtacctctgccactagtagccactaacagccacgttgctccaatttgagggaacccaatctttgcttgtggtgcagtgggatgtaaaactgatgtggctgtctgtcttggcaaactctaggtcaagagacgttgttgttcggattccctctggctacttgttcttctgaggttttccaccctgcaccttaggcatactttcattcatgaatgaaatgaacggaatcatcttcttcctactagagccagataaaaagaatcaacgaataaatgggcgcaaggcatcgtctgatgtaccgaggtattgttgagctggtggttgctctggattccacaatggctctttcctttcctccttctcagacttttcctccgtctccacagttcagctttgctctcaggaactctctgaccgtccattcacatgccgttatccagatacacttgaatactctgcattgatgcgcaggcctagaccactttctgtccggttctggtgccagccacccacacctagctttcacatccagatgatagaggcttcaagattcacccagccgatcaataaacatccacttgagtgtgccaatcggtttgataggtggtctgacctcagtcatcaagcttgcgacagccctgagggtcacaggcagctgacccacatttatgaaaacggtgtaagaccattggctgggctgagagcaacatactgacatcgggcccaggcacaagccatcccacacctgggattcactccagcaattgggaggtgtgatctttccgcctatttgttggttaggtatcgtcaccgtgtgccaggcgtgtgccacctgtgattttccagttgatattttccgccactttaagtggtcgaatcgcatcagcaacaagcaacaggcatcaacagccaacaacggcagacggcggcgccagataatcaagacagtttcgaccatcgctaacgccaattgagaaaaatgtcgctcgtgtcgggcacgctactgctcttcgtggcttggctaacgtggcgtgtgtggaagttcacactgtcacctctgaccaggccgaatgagccgagagagctgccatacacaattccttgtaagtcttgtctgcttcaaacattctcctgagtctgattactgactccagaaaagtcattggccatgcaatttcattgttcatgaactcgactgctgtcttgacaaaaggatggtatgcttcccaggacacttgagtctagaagaaaatcacactgacgctctggaaaggaacaaactgtcgggcgataaccgtcagccatacgctctccaggcagctggaacatccttctacgtcatatcccaccctaaacacatagccgagctatccaggaacacgcaaaacttctcctttgtcgagttttcagtcgacattgtcaaagccaccggcatgagccccgagggcattgcgaagacctataacctcgacccagatgctctcgatgccaaagtcgaccatttcaagcaccctatgaaggacaagcatttcgagcatctcaaccgccagctgcataccacgcaactatctccgagttcacagaacaacaacttaccctccctcgatcagaccattctcacatggctacagaaccacttgactatcccgaatctccaagagtattccctggttcagaatgatcttgaggtcaatttctatgagttcgtcaatacggtcttcatccgcgcaggcgagaatgcgttttttggtcccgcccttgccagaaaccaccccgacgtggcccacgactttcagatctacgacgagctccactggagagacctgtatctgtttcctccgttcttggctccagaattgaccgcaatcaaggggaaattgacagcgcagttcaaaaaatatctggccctgcccaaacaggagagagacaagcaaaacccaagctggttcacccccaattttgaactcgctctagacaagctagaagtaggcgagcaagacaaggcggttttcttcctgatgctctatcttgcgtacgtacaccatgccttgcccccaatttctaccacacaccgctaacaatttccggtctcgcagaacaaacaccaacacccccaagctcctcttctggtgcctcgcccatctcctctcctctccggcaacctgcctcgacaaaatccgcgctgaaatcagcccggcattcacaggcgatgagctgaccgacccttcctacctcctcaccccggggaactgtcccacctttgagttcttctatctcgaagtcctccgcttcagaagccactccgtttccgcccgcgtcgtaacagctgacaccgtccttcctgcccctggctcgtttctcttgcgcaagggggcaaaagtgttgatcccgtacagggtgtttcactttgatgagaccatctttgggaaggatgccaagtttttcaagccggagaggtgggaaagcttgccggcgtcggcgaggggggtggtgagggcttttggtgggggaaagagtatctgcccggggaggtacttggccgagagggaggtgaagaaggcggtggcgttgatgatgaggaggtttgactttgaggttttggcggaggggggccctggtaagtggatgccaaagggggatgatagtaggcctggcgtggggatgatggggattgagaaggggggtgatttcaaggttagggttcggaaaagggaggtagtctgatggcggtgatttgagcagatggtcttgcgttagccgagagctttagtaatgggttgagacatggcctatgggccagtttgaccatggagttaggcttgccattagggcatcgtaaaagagcaatgctttctacaggggtccttttgttttaccaatagcttgacaaccatctttgcttttctcagtcatacactcgcagattccctataaagtattccacaaacttccgcaatgtatccataatgtatcccccaagactcacactcgtctcatacctgtgccgcccttgaggataacccagacatcttaaccactcttttggacagaatgtagagtccggcgtgctgcctactcaggaagtgccgctcactgatggcgctcctcagtttaccctctgctttttttgaggacgaccttcactaggagaatcctgaccatcttcagcgctggtttctccgccatcgatgttgtcctcaggatcaccgtcgtaatcctcataatcctcgtcatcatccacaatcaccagagcagctctgattcctctgttccctcgactctcggcggcctcgtaccacctaccggccatcaatcgtcagtcaatctgatatatctcggatcccttggccatataaaatgttacacccgtcatcagatggtctgttcttcaacacagaagggaggcgagaagaaacaggggtggaacgtaccaaacaaaacctcagaaggagcttcgtcagcatcatgatgtgggagtgtcagttggaaatcgtccgaaaagaccaggaatgaactcggggacgaagcgtttcgtacgatgagaaagtacgagtctggtcctggctgtaaaccaaaaatagttgaatcttgatccggcagcctttgtgacatgcaccacctcccacagttctggagtcgtctcacgtctctagagactagggcagtttgcttgagattcgcgcaggtggctgtatcgtgcagttgggcttccacatacgcgctctctggcaaccatgttgatacgcccccttttccaaacccaccttgcagatcggcacacctctcttgagcagagacactttgggaatacgtgacaggcatcacacgtggccacgtagtcagccgctgctctgtaagacgcagctccttcttcctgtgccaagatggatggcagtggggtctcggttacatccccagaactttttgcgaacataccttcgtccagctgcccaaatacatccatgaatagtgccttaaccgtatggaagagtaggtcttcgaagttcagttcaacctcttctaggccaagctctgccgcagcaaactctgacctcaaccactcgtcttgagccttgatagtcccagactccttcaggtatagaatattcaactgcagtcgtcgtcttaccccgacaatttggacctcaagtccagccatctggggacaagcatggacgcataccctgagttgtcggttgaccagaactgcgaacctctctgtagatacctgttccaggattgatgcacgttgaaaccgttgaatctcttcttccgcggcagtgtgaagcggtttatacttgcacaaaatgtcacagtattcgtgagaattctctaagggtccatagctcaatcctttaacggccctgtagaagcaggggttctgtgaatcatgccacaaataattcgcattataggccctgatgtactttatcctgatcagctttgttacctcgtctcgttcctccgcgatatgatgccattttcgtgaaaagatccatttcattaggtacttcttgagtttctcaatcgtctctctgctgatatgtcttgaggcactgcccatttcggcagaccgggatgtaaacatggtactcaattgctggaccacagaacgctccgaacgaaaattcgtgcccgcagaaggcttggaatgagcagcatcatttagaacatcccacatggccttagcttcctcctccacgctagtcaaagctttctgaggaaggctgtacccaaacatgggttttccttcaaaaccagtgccgcaaccagaggaaaggcccacgggtgtatcctggtgaagaagaccgtataggtagatcaaacccctgtgttcaatgtctgcaaacagatctccacgtcttactccgcgaccggtactgaagcctctagagcgttccccaccacgagtctgacatcttgttcgcagtttatcggaaaaggcgtcaaggacttttcgacgtcacgccgactccttgtctcaactctcctaacacttccaggctacatgcgacggagacggaccagtgggtcttctatctggccttcaaagtgccccttgaaagccaagtcaaaggccctgaaatgcagcggatgttgaaggagggagagccgcaactcccgaagatggcggctgcagagtgcacactgctttcaagactgacgatcataaacttctcgctaccgcttctgccttcctgaatcaaattctgcggttgaagtgtggcaccacgaatgacgagttcgacgagaccgtaggaatcgctgtctatcacctcggtggtgcgaaaacgtatgtagcctagattcgctttcaactctttctgcgaagatgtgccctcggcaaggtatagtgcatcagtgccgtccgccttatgctctacgctgattgccaccttgaagctgctcggagatatttcagacaactgtattatggcatcgcacctaaaaagcaacggtgttagcgtcgcacaccgaaaacatcaatccagtcgatccaaaagactcaccagctccgaactaactcggggaaagcaaacacgtttatcatatccgtagtttttggtatcagttgacaggttgatggtcctggctcgtgtgatggattcgaggctgcaaagagtaccgatgatgccggtgttgcccggtggtcgagacatcctggtcctgttgttgcagcttatgctggtagccgaggaggatcgagagacgacagttcgataatgcaagtgcgaggaataaaataacaaacgggtgctcaggtgatttgaatagaaatcaagaaagccgttgtaaatcgaagagaacgagttacgaaaagagactcgtgttttctagaatgaagggaggtcgaaggaataagaggaagcagagttgtattcctccacgggtgtaagaaatggaaggaattcacaaaagaggagtgaaacgcagcaagtcgcaggcgagaacaaaatttgatcagttttctgagaaggcagagcaaacggatcgatcgtaccttcctcaacaaccgcaccttcccaacagcgcgtctgcaaacacattgtggacccaaaaagagacactgcagctctgtattgacgtaattcacccaaataacacttgagagacacttgaaacgaaaggcggctaagagaccttagaaggtctactgacgatccttgaattcaatcaaagatggcaaacctccaaacatatcaaatttcatggtccaagtacatagcatcgcgctttgtactttctgtacaaacaaatcacggccccaaaaaggcatcaacccccaggtatcaagaaatcatagaagaggcccatccagccaaaaagatcgaccatgctgggattcgaacccagaacctttaccagctggagatttaacttgtacacacatgttgaaaccggaaagtaacgcgctaccattgcgctacacggcctatcagtaccaccatggtaagatcttcagttcaagaccatatctcttacagacatattgcagcgcgaaatctttcttcctcttcacttctgtaacaaacacaaaacatacctggaaaagacaactgcagaagcgatcggaaaagtcacaatcaataaaaagatattgggactcggataccgggagtcgaacccggggctgttgagagatttctagactgaatctaaacagacacttctgagaagtgagagtcaactatgttaccgctacaccatacccgattttggagagtgtggtttccgatttggatgcgagttgtggagggaaacggggtatatcaggtaatgggaactgggttgtgtggatatcatgactcaaatcaaagttctctatcactggcaaggcaggctccccctgccaacaccatgttctttgattctgtccagggatgcccaactccaagaagtccaattcttgtttcatcaaagaccaaaagaacattgccagcaccagtgcatatgttattgttgcgtgcatatgtatgaacgtgtgattgtcacccccaaaagcttgctcaagatctcaacagtcatgcctacctaagatagtttgaggactcatcatcgccaacttcatcctctcccagattcccacaaatctcctcaatagcttttatcaaatccaccgttccatccttgggtaatccccctccctcctaggcctccgatccatatgcctcatatgctcttccgacggcggcaaccgttcccaaacatccttatacacccccctcggcacaaccgcaaacctttcgtcaatcctaaccttgttctcctccgtacacatcagcggaagcggaccctccccagcatcatcctccttcaagaaaaaatcaaccaacccttcctgttgactatccaacagctgccagtacctaggcgtagtccccgcccggctaggaacaatgtagacgttcggcggctgagcaagattctgttcttcagccttcctatcaaaagtcaccacacctcctaaaatcctgtcctcagcccagtaaccaaccaggtttgacacccccaaggggtaaatatcaccatgtaaatagtaagggtggtgaaacatagtaggaagcgtctcatcatccgggtcttgcttccagtgggtaatcgcctcgatggaacgatctcccgttccctggtggacttcgataccaacatcgaacagaagaacccctatttcattcaaagccatagcaacgagctcaatgaggcgagtgttgaaaaccttgctaccaggcgtggattggacgtacttggttgtcaactcacggggaaaagacaggagctcaaagtcaagcttgtccttatactcaagggcaaactctagagcgccggggcagagttcagggtggtgctcaatggggtggttgccatagacggcggggatgcgctggtcccaggctacgtcttcaatgggaagaccgtcgatgatttgagcgtaggtgaactgagctagcttagtagaaaggacgtttctcatggcgcggatgaacagagtgtagtgggctgtggttttctgtctcgcagagaagccaagacgggagttgtggtcaaggtgtgcgcgccgcttcatccttgctgagagtgacttcaacgtagcctcgtccattttttttcgttgttgacgcgtgcaggcctatctgtgtgtgcttctgttgttgtgtaatggtaggaaatgaggacggaacgaacactgcaaggttgacttgagcaggagatgaagttggagaaagcaggcaccctacattgggcctgcgccacatgtaaatagaggttggctccccttaaataacccgcgccgttacccaagcacccgttggttataagcaccgccagcataactgcgctattatacattcgtgcatattcttataactgattccagcttcaggctgcagggctgtggggccctagatcaacctcgtgatggtggtcgttagggcgagttgggccgatgtcacaccatcgccgctagtttacccctgccggagtatgtggaccatgctattttggatagattttagaccagaaagggctcagcttcgtcgaaaggtaccggcgatatcagacgcctttggttgaactgaaaccatcagttgggactcagtagagcagacaactggtggtcgttgggacctctctgttgtgatgaattgaggacccggtctggcttcgagattgttagccacgatgagcttcagaagtcaacaacgtaaattaatgtaaccgcaactccgtccgcggagcctttgacaggtagagttgcttttgagattgaatgcatggcgttaatgggacatgggagtatcagataaaggttgctcgggacgtgacagcgaatataccttgcttcgtttttaaagtgattttggaaaactgtgtcgcgtggtatgtgctgtaggaaatcgaccaaatccccccctacccatcagacaagcacaatgttgcccatcccacttgcctcctctcccctcataaccccctctacaaaagcttcccccacaacctcccacctattctcttctccatcacccctcaaaacatacggggtccaacaccccttcacaacaccaattttatcccctactcgggcataccgcgggaacaagccccaaataccccctctcagttttcaccaacctcctccctctcaacggcttcctcatcgccactctaaatctcttcaaacgtctttttcgattgcctcgactccaaggaagccatagtcaaccttccctttcctagtggccgcatttgcctcggtgagtatgtctgccctggtagagaaggcgacctcccagtcgtctcgtcgagcaacaacgaaaatatctctgcaaaagcgtccgaataggggtgcatgccgctcgaatccttcccagcaaccattgtgtgccaaaaggccgtaaagacagagccatgagcaggcgggtacatcgtgtgaaagttcctggaaacgaatttgatgcatctgatccaatctttgttggccgacagaggctgtacgatatccggatctgagaaaaccgtgctcatcacagcaatggtatcaaacaccctgccttcagtgtgtagttcgctgttgttggacccaatgatttggtaaccagccgaatgtttggggaatttatacgccttttccgacccagaggcgttgtacacgtttgcggtcgagctctcatatcccagcgcagttgtctctcgaggcttgctccaatcaggaacccacgagggacatccctcaagaggctcatggtcgatcgagttgagcatggacttgagcggggccgtgttccgcttaagcaaaccgaccaccacatcgtgatacagattcgaatacttgtaactgtcgtggtagctaatcttgatccagctgttcttgatctcagccattcccagcaagccatagattttgtctcgggcgtcgtaacaaagagattgccgagcgctccttagagctggactgattagccactcctctggccatggttctttggtcgctggatatccttcgcgattcgaaaagagtctcaagatctgggtgaaaggatcagggcccggaaacttgagataagccattgagtaacgccactctcttgaagagtgaggcaggcgctggcgaagacgtcccagctcatcattgtcctagctttgtgctctccgccacaggctagagtgatatcctgagacaagatcacctcctggtaaatccataacctctggaaccatggtcgtgtcaccagatcccacacaccaacccaggttgccgaatctgcggttggcaggcagagtctttcaaagtcctctggacatcgaatcgccgatgcatgctgtatcaaatcgggagcatcgcgtagaaagtcgaatgcagctgccgcctgcgccttttcgtcgttgttgctctgatcgatgcagatctgatctattcacagcaccaccgagtgtccagatggtctcaagtgctgaagaacaccgtacagtgacttggtaataagcttctcatgtccatcgacgttgatgggcatatcaaaggcacctggtccccatgtgtagctgagcgcggtgtaccaagatcggtttaaccaggtcatccatcgacaggccaaacttgttttgaggcacggtaacatgtgccgacttcataagctccgacttccgtgtgactttccggtgactttctctgcattccagggaacagtgatggagggtgtagcatatcgagtcgtcgttgctgcctggtttgatttccagaacccgaatttcatacgggtcaaatataggtcgataaagtgttccgggtgagtcgttcctgggagatatcttcttctttgatgcccattgctgtaaccgcggcttccgggtacctatcggcctctgattctatgccaggctgttgcccgaatctcgcaggctcaagcatgggattgtcccgccattccgagcagcaaccgagtcttaactcggaaagatcatgcaaatgttggtacaagcggtcgcctgtgagttctggcatgtccaagtgtttctgaactaaaaggccactggtgaaggttgtttgaggattttcaacacagccaggcaggaggcaggcaaccaagctctggccaggcagttgggtcgcacctacccaacatacaaaataactgctgcactcaccccattacatctgcacaaccaaccaccaccttctagaattaagaccacatagaaaaaggaacacgaatcaaggttagcaaaaagaagtagagactgagaaaaatgcaaaagatgatgcggtttatgtggatcgaacacatgaccttcagattaaggattgaagtggacttcagtctgacgctctcccaactgagctaaacccgcttttcatatcattgggcgtcggatattacaaccatggtattgcaagcagcttgctgctgaacctggttcagtccaattatgcactgacttttggccccaaggaccagaagcaagcctcggaatagcgccatccccttgttgacatccagtcccttcagccgctagaaacaccagtgaaaaggggggtaaagaggggcaactcgttattgtacagaagctcattatcagagaaactaatacagacactggccaccgcattgtcacaaacccgtatcgttctgtttcattacccatacagctgcagggtccaaagcccaagcccacaagtcggcagacaaagaaattcctccccatcaactaccgtcagcacgcttgggaatagcgtcatagacacggtcaccaagaccattcccccaactcccgttcccccccttcccccatctcccaaccccaatacctcggagaaaaggacccaaacagatctcccaaatcacgatccccaaaagcatgacatcagccactcccctctaaaccaagtggaagccacacaagtggaggcaagtacctcgcacagtgtgcgccccaaaaccacaccattcgaccagaacgttcacgatgtcccctttcccctcaaaagagcctctatcatcgtcatcaatcatgaccaagtttggcaagtcctctattgatgatgtcagcaaagaagtacatacacatgcggaaagttgcgttgagttgtggagagccacacaagcttacgtacaaagtaaacacttgatttgccgggcattactttgtgccttggcgtattcgccccctccccttttccatccttctcagccactggtgactgggctgtacctgggctaaacttccagaaaaagatccaagtcacccaagacaaaaatttgagatgaaggctcacagaaagacaaccaaggaaaaaagagtgggagttttgacccaaagtcaaattaatgcttgttgttgatgttgtcaacctgggtatcagggaacagaaagagagaagcctcggaataatctatgtaacatgtgtagtgtgtgtgtgtgtgtgtgtcgttcccattcccttcccaaaaaaaaacgataacgagcgctcaacctcgccataaaccaacccttcctttatcccaaatgcctaaaccaaaaacgcgcgcaaaatgcccataaaaccacttattagtctatcataaacgcagccatcatcatcctcaatcctactcagagacagcaccgaagcaggtctccatgataataccggtgatttgatatgggtcggcgttggaagcgggacggcgatcctcaaagtagccataacccttggccgcgcattcccttgggatacggatagaggcgccgcggttagcgacgccgtaggagaaggtgtcgatagagccagtctcgtgacggccggtaaggcgcttctcgttaccctcgccgtacacggcaatatgctcggcgtggcggctctcgagcttcttgatggcggcctcgatgtgcttcatgccgccctcctcacgcatctccttggtggagaagttgctgtgaagaccggcaccgttccagtcgccgggaatgggcttggggtcgaaagagaccttggcaccgaactcctcggccacacggtggaggaggaagcgagagagccagaggtggtcacccatctcgataccctcgcaagggccgacctggtactcccactgagcgggcatcacctcggcgttggtgccagagatcttgacgccggcatacaagcagcacttgtagtgagcctcgacgatgtcacgcatgacaaccttgccagcaccgacaccgcagtagtaggggccctgaggagcagggtaaccgttcttgggccagccatagggacgatcgttgaggtcgagcagagtgtactcctgctcaagaccgaaccacggcttgtgctcagcgtgagcctccatcaacttggcgcactcgtggcggtggttgtacttgttgggggtgccatcgttgttcaagcactcggcaagaacactgtttactggagttagttatggttacaacctctcgagttcaggacttcacatacagaatgttgggggtacccctgaacgggtcggggaagacagcaacgggctggagatagatatctgagttctcgccgggagcctggccagtggaggaaccgtcaaagttccacatgggaagctcagcgggagtataatcggtgtccttggcatcaagggtctaataggagcgccatgtcagtgtctggtgttccatcaagatctagcttcattgtcccaaagatgtggcatgcacagcccggcaacggcgctgaatttggctttgcggtgtgtcgacaattcgtgatccgggatcctcgtgttcatgcgatatgcggtgcggcgatgtccgtcggctggcggtgcaagtctggccggagcaagccagggaccgtcggtgtagcggcgaggagtttgtcgagtcacaagcggtgtcgttgctgggattgtccatggcggggtttgccagcgagcatccgcagttagtggggtgaaaatcttagtgattttagcggggtgtgattccgcttctgcatcagctaaacgcaagaagggcgaaatcggagtgcgcgccgaggtttcccataaaattcgagtggaatgtggtgagcccgcccggtagcagttgacttggatgcggacccagatccggaggtggacaccagatcaccaggctaattccgccaggtggtgtgggtggtttcgtcgttttgggttcgtcgttggttgacccgccgagccgcagcatgcccaaaaaccattgtttgccggttgtgccgtcatacgaatgacgacggacaagaagaaacataggaaaagttcgggacaagaacatcaaaagaatattgacatacccttgattttgagcggacaccgccctcactgtcgacccagatgtactcggcaatgatcttgccgccctgaggcagacggaggaacttttgcaagttctccgtgtaggtgatatgtgatgggtcggcctgaggaagcatgttagccttcccgttcatagacagagtcgaataccataacgacgagataactcaccatttttgtgaagttgtgggggttgttgttttgaaaaagtggtataggatccggcgaggatgagagttggtttgtaggtgaaaagtgacaaaagttatgcaaactcgataacaagagaagacagaatgtcgatgcacaaggcgatagtggaggagaaaacaacaaaagtaggttcaacgggcagcgggggctgaggcttttatggtaaaaaagattgtcgtctgaaggtggacttgcaaagcgttcacggtggcagggcagtgcgaacaagaattacaggaacatgcggtaccttgctcgaggtacagtacagaggtacctggaacacgccgaggcggcagcaacccaggaacaccgtacaacaaggggtctgggagtgtggggaatggacagatgggaaactgtgtgtcctcccagtgacacagcgagcatctgaaaagccagccgaaaagcagctgtgcgatggaatcgtccacggatgcgtccttgtgtcctcgacggccgtggcctgtctcacgaagacctagtggggtggttggtggggcgaaaccagcgatggctgggcgcggtacgtaccggccgggcggtaattacacacattaccagttggtaatacttcccgtacgcgaggcgtccaggttaaaaacagcgcaacggtttctctatcggcggccgctgcgccctttgcgtttcattgccgggctacacatttcgcgatgccgctttttaagggtttttcttacgtacatttgcaacactgttggtgccagacgagagaaggtcgtgtacactagacaggtccagatcggatggaagttggcaagcttgccccacgtttgctggactttgttgaatccagccatcttgcccttgtgggatcttcctcgtcgggtctcgtatgtccaagacacacagtcatcagtcctcgtggtctgtttccacttgttgaccacgagcatcgatgtctttttccagggttctgttgatgccctgtgacacatcttggagggaccacaatccacatgctgccccgcaaacttttggagtttctttcacatggcatcgcggtcgacggcgggacatccgtgggtctgtgataggaaggctcggcgacccgggtgaccggggtgggtgacgccgaatatcaaaattcggtgttgcttgcggtccgacttcagccattgagccggtaccgaaacgctccgtctacaactgagacatgaggcaatattaatcctcaaggctggaaaaaagaaaagaaattggaaatggaatcgctgaggcctttttccccatcgcagcggcatctttcctgccgtgtactaaaccctgagaaggtttgggttgaacatggggctgaaagatgaaagtgctgggttctggaaaatcatccgctcatcctggctcgttcatcggaagactatcactcctgctccggccgagtctccgggatctacttcttggacgcgggtttccggctcaacaatgaacagatgttgctgtcattgtgtagggttgcgagcggaagatgatgagagggctaatgtaataggtgcacagtgcatgctgagatgggggtcagttctgtccggttgtcgacatggaatgagtgcgttgtttgaagtcttgggtaggccgagaccttctgttttctccccatcaggaagcgtatctcatccccacgatttcccctggcgggaggtggtgggagagaatgtgtggggttcgcaccatcaacctccggaattgcttgttgtatgggtaccgtctggagttgaattctagacatgtaaagttgaaaggcactaggagaagtgtctttatgctggtcgagtcattagtgcgcatcaagtttcgtcgattcacaaagacatccgctagacatcaaatcagcatctggtttcctatttttctccttgaagaaaaacccagatctatctttgttttgaccctggggccatgtttcaatctaaactttttctccgggtgttctttcatcgtcgcattcttggcaatgacctgcggctcctggtggctccggggcatggcagtgccccaaaatcgacgttcccgccgagccatgcacgtgttaaagatctgctgaacatcagcgccctttgggttgcctcttgacatcatcgtgggtttgggtccagtgccgtaacctgctgccgtcgttccttagcgtcataaccccatttgagaatctccatgaaacagcggccttcagagcctcgctcgtgaggtgttgaattgccctcgtattgttctgtacttacggtaagccacgtctgtcttgtaagtgtgctaagtcccacaaacgcgcgtctttttcgcgacgcggttgaagttgatgagtgggtgtggagatggtgaagtctggatgctgggctcaacccgaccccacaaagaatgaagcggcagccacaccagcggcagctgtctttgtgggtgtgtggctcgtacctcgacagcctggcagctcgtttctgcccattaacgaaccgggaaatttcgaggtgcatctcgacaaatttcaagattctctgccgtgcaacagcacacagctttaccgcttcttttctatccgcctttaccgtaacctcagcggcatacagttacccaatagattcctccttgccgcatattacatctgcaagccggaccgcaactcgcgcagcatcccatccgcttccgggtccaaacttgaagtcttccaccacccctgttgaagttttgaagatgtcaggtaagaataatccaattcaatcatccaattcatgtggcgagatctcttctggccaatggccgtcctgaacgccgcatcacttatcgtcctcctcccattggtcccagcgcctttttgactaagttcttgagtttggaccacttcaaggctggtctgggcgcgctacggccgccgggggtccacttcggactccccgcggtgccgcatcagacggacgacgggtgttacatcgcatgcccaggaacgcctggttcctatcatgaacattcaaatgagaagaacatctgctcaaaagtcaccggtacttcgtatgtttgacagttagtgcaaggggaaattccctcaaactagacatgggacaaatcctttctgcatttgtatttctctctgccagatccgttgtcttgttgcatgtggttgaccagatgggcatgtgctggccaacacagtgtagaactgccggtgtcgggctgcctgggcttcaaggtgtcgacacacgtctagaagcagcagattggatactcatcaagtttggcatcagcggagatgtacatttctgtgccttcaagattgctaattagttgaacatcaaggttcagccaagttacggacaagacttccagaacaaccattcagacttctgtaccatgtatgatacatgtaagagttgcgccaatgaacacaacttccccacgctctccacgacagattgtgacaaccgctgtggtgacacgttgacaccgaataggtcgctgtgctcccgcacgcaacaaacgcctagaaaccataaaaagagcaacgctagcaatcctcagctcaggcctacatgacacggatcttgacaaccaaatatcccgcaacatagcagctacgccccatctccttgatatgctcaagcaagttcaagggctggaaatatcgatgtatgtgtaggctgttgatcctcgaaatcctcgatgggatcgctggagtaattcggaatgcttcgaatatcagcccggccatcaacggctcgcttcctcggccgacctcttctcttggttgcagctctggcaactactggcgctttgcttcgttcctggagctgtgaacggctgcccataaagagctttggtggggcaaatcgtgtttggtcttcaactccttggacccctgactgtttgacccccacagaccgcgggggtgccagagctggcgccgcagacgacaggtcaacagatgcgggtaacgatcccgaactattgctccccacgtagcccgcagatcccgatgtatgagccctacctggttccccacggggagactcctggctgacagattccgtactggtcgtgttctggctgtcaggctcggcgtctgataagtgtctgtatccctggtcatcaaggacattgctgccaggctcctcactgaggatagatgcacaacgaatggactggctctgggaacccccgttctgtgattggggagtgccttgactgttgtcgtctatgtgacttgcagaaattcccgcatccgactcaataatgctactgctagcaatggccccgaggcttgggacgtctgatgaagaccatggctcaacagagtcagacggctggcaaatatcagctgtgtacaatggacagcctgttgccgcagtactgttgatttccatctccggtggccccttggtacacgacaagcttgaagacctagatggctgcaatgctcgggcggcatcccgcgatgcttgggtgaacgccatggactcaatgatattgctactatcatcaccgaatacaaatgaccgccatacctcgtcagtctcgagggtctgtgtcgtgatctgttggtgtggaacctcacaagagcgttccagagatagtgattctttcgaccatgaattgccgcaggagtttgcgatgttgccactcgatatgctgctacttaatatgggctgatggttttgagggtccggggtggtgattgtgttttcgccgccatgatgatagctaccggatccccagagttcggtagcgtcgactgtggggttatccatctggccagacgcgagactgctgaagcagctgttgcttgtgttctcgtccccaaacttcctggtgagattcaagctggagctactgttcgtaacgttgccatcttcgaggcggtctgcctggcgtttatcaagattatctcgatacatgttcctctctccagggctgctgagcgtattcagaccgctgttatctgtgaaactgtcgatggtgttcgccgaatatgaataaccgtcgtacttctgggttccttgagccatcgccaacagctgctcgtatcgatcaagagcctctgaggtatcttctgaaccatgactgataggttgcttcgtagaatggtcaaaggcagtactggtggattcctgcgaatatggaaatgaaggtagatcttctgagaaacctgcccaggacgattccgtctcttgctgatgcctctggctgatcccggggctgatctgcacttccggcgaccgctgagtcccagcacccatctccttgttcgaagtctcttggcgacgaaaccagttattccatttggaattcgattgtttctgggaggctggaacatttggaaccatctgacctacacgtgcgacggtactattcgtgtcttgagagtccgggtagtgttgtcgagcgaaattgctagtccttgaccgtgagacatggcgacctaaaggcgatgaggatgatgatggatcaatagagccaggaaccaaaggaatagtatactctcctctgatccgctcatttctatccatctgcgaagataatggtgtcttggataatgaatgcccactcctctgacgcaaccggctagagtctaggaagaagtttagttcggtatcaaatattccaacaatatttataacccacttctataggtatgttgcgaggatggtcttgccggatgcgaagtcttctcagtgcgcgcctggctagctgttctgatagtgttccatccgctgatggccgaaccttcagcaccaagtctcttctgttgacttcccactcgaatcttgacggcatcacggccaatggccggtactgacaggtcaagtttgcgctttcgggtatcggcatgcgaaggcgcattacctggtccatgtcgtactactggtgcatgcagccaagggtccggtcgtggaggaggttcgggtcgtcggcggcgcttcaaaggatccggcgttggatctcgacctgtttcctaacccaggtctgcgagaaacttcagcctcatctccttgagcttctcttccccatacttggcaagcagtgtttcagacccccggttacgtggcggctgttcaagcggttgatgggttgctgaaccgtgactgtcctgtcgagctgggaccttgaagaatgaccgaagctgttcgatggcttcctcatggcctgggctatattggttctgaatgcctgaggatgatccccttcggcccggctgaggcgatggttgatgtgcaagtatcactgtttggcgagatgacgagcgcctgccgtcgtttctagcagcctccctttcttcggcttgggctctaatgcgagcaaagtactccttctggcgttgcttagcagggttaacctttctcagtctgccgcgtttcgaacgatgaagatctccatcaatccagttcatcctggctcttgagaggggcgttccattcctcccgtgtgtttgcaccagaaaaggcccaggcgaggatgccgaccttcgctgtggaaagtatggcatgacgaagtggaagccgcggcgggctgatcacgagtgaagtggattgaagagaaggagctgacaactcatataaaattgggcgtcgacagaattgggatggtacccatcatggttggaaagtggaagttgtcacatcctgccgtcgggtcccatctcaccaagatttccagagaaagaactacccctgtcaagcgtgccttccataaagcttccagaacacagcttaaactgccggccgggccgtcaacgtcaaccccgcatctccgcaaccacaacctcgctccttcaaccccaccatgagagcttcaacaacaaccacattgaggacattgcgacgcctcacgtctctcagccgccatccaacccaaacaatctcttgcgcacaactccctctcccctcgttctttcgcaaaatgtcctcttccccccccccctccgcccaaacgacgcccggcactaccctcctccgccagcccgtaaccctagcctgcatccaactcccctctacatccaccaaatccgacaacctctcccacgccgccaccgccgtctcctcggccgtcaaatccacctcggccaaaatcgtcgtcctccccgagtgcttcaactccccctacggcaccgaccactttccctcctacgccgagcccctccccgcggacccctccaacccctcccccgacctcaacccatccttcctcgccctccaaaacatcgcccgcgacaacaaagtctacctcatcggcggctccatccccgagcttgtcgttgaaagcaacaacaacgagaagaaatactacaacacctccctcatcttctcacccgagggaaaactcctcgccacgcacagaaaagtccaccttttcgacattgacatcccgggcgggatcacgttcaccgagtcggacatcctgtcgccggggaataagcttacgattgtggacctccccgagtacggcaagatagccgtggcgatttgctatgacattcgcttccccgagttggcgaccattgcggccagaaagggatgcttcgcgttgatctatcccggtgctttcaaccttactactgggccgctgcactggaagctgttgggacaggcgagggcggtggataaccagctgtatgtggcgctgtgcagtccggcgagggatatgaccgagggggtgtaccatgcttatgggcacagtttgatcgtggacccgatggcgaaagtgctggaggaggctggtgaaggggagcaggttgttagtgcggtgttggatggggacagcattgagaaggcgagaaaggggattccattgagggatcagagaaggtttgatgtttatcctgatgttagtgaggggaaggtgaactatgacgagaagccatagatacgatgaatgtgtgagaagatacgaggtgtaggtatataatgacatgatgacaccaaaatcaagagtttcaagttgcaaaacaatgtatgaggaagacccattctttcttgttgatgcaatcgacctttatgagaagcttctatggttcgcttcagataccccttttcaggaggcttttaccgcacccactgccctctacccatttacagcagcaaaggcttgaccgtttgctgccctccttttcccggtgctatctcctagtaaatgtttggaatataccggagcctctagtctctaaaccacagtcacccttcttaaatcgcctattggagagccttggcggcaaaggtaggaaggacgaagctggccttgtggatctcggagttgtagtagcggcagtgcttctcctcctcctccttggtccaggagcggaggggaaccttgacgttgcggttggcgtccttggtgcagaccatgaagccgatctggcccgaggggtaggtggggatggtggtgtaggcgtactcggccacggggaagatctccttgcagtcctgcttgagcttggtgatcaggggaaggtggagccattggttctcagctacaaaacaataatagtcagccaacatggttcttgacatgcgcgggttcgactagcaaggagattgtcttgtaagagttaaagccaaaaaagaagaaacccgcagcattcggaaagtcgagaaacgcaaagctaccacttggtaggctcctgaggggcttgggcaacatcagtgttgctatcgggcaaagttgttgtccgacacaacaaaaaagaatataccccccaggcctcgaactttcccagataaaggagacgtacaaccttgagtggtaatgacaccgccctcacggagggcgtcgtggagaagcttgaagtaaggcttctggaagagagactcggcgggaccctcggggtcggaggagtcggtgatgatgacgtcgaaggtgttcttgtagtcatcaaggaacttgaagccgtcgccgacgtggaccttgaccttggggtggttgaagccagcggacatgtgggggaggtactgcttggagaggcggatgacggcctgcgagatgtgttggcaaattggttctgaaaagttaagacaccggaactgaactcacctcgtcgatgtcgcagaggatagcctcctcaacacagtcgtgcttgacgacctcacggaggacaccgccatcaccaccgccaatgacgaggaccttcttgggctcagggtgggacatcatggcaaggttggtgatcatctcctggtaggcaaactcatcacgctcggtggcctggatgacgttgtccaggacgaggacgttgccgtagtcagtagacttgaagatcaagacatcctggtacttggacttctcgtggtggaggaccttctcgaccttgagagtcatggcctggcctatggagagaacatcgaaattagacacatgatctcttcttcaagggggtacagaagtttgtttacttaccaggccacatgttggagatctcgcggaaccagccatctattatgcaagccacaatgtcagtctcgtttcatgagttttcgcagacatcatgtcggtagttgtaacccaacacaatttcactctatgaaccggcccgttttgtgaaatggtgcatttcatgatcaataatgccacgcggcagagctgcgtgagtgaggcgcactctatgccggcggcagagtctggtgatgccgtaacggaatgaagccattaaactctgaaactcttgtgatcaacgccatgacgaggtgagagacgggtcggcattggggcatctggcggcaccgaacatcgcagggctgaccgatatacccgatgattccgattgcccaccacatggagaaggcgtgggcaccgtttcgaggtgtgaatattggtgtggatggcggggtcgtggtcgttcagcccctccatgaaggagagtacaagcgtgaggtgagggccagaaggggaacatcagaacttcttacccttgatggtagagtgtgtaatgtcacccattttgagagattggtggaggttacgagtggtctggaaggtatgaagtggcctggatagaagacgccttgcacaaactcgaagtgaagccaacttgaaggaggggcaggcaaaaagtgatggtggaggtggggtttatcaacaacgatacggcaaaccgattgtagcgagcgggtgcagagatttttcttcagggaggtatgagcgaattacagggtccaaacttcgcggtgtggagagcccagcttgagggttggaagtaaaaactcaaacataaccctggaaaatactcattctgacgtctgaaatctgccaacctttcatccgtagctatccgtggctgtcgtcgcactatcttatcgctatcaaaaacaggcaatgcttttgaggcagaggggtaatgaggaggggtcactagcaacaaaatcaacttgccatagacagactccctgaactagagcaaagcggagaaggagatgttgtggtctgtctggaagcttcattgttatttcagtaagttgggtgtacttggacaacaactgtgcgacgcacggcgttgagccggagagcgaaagcgatggccgggattgagccgctcagaggagacctctacctgccggactggacggccccgctccggcgacagctcggacctttgcccagcgagggcctgaggggtcaaaaaggcaggacgctaatgagggctgaggaatgtctgagcgcccgatcattggcaccatcgcgttgaagatcagcagatgatgtttgcagctcacggaacggcgcgatcactcaccacttcaactgcgcacgagctgccgtaagtggatggtgacaatccgaggcacagagcttgcgggccccgtgggccgtaccaccggggatgtgccgtgccgtgatttgtatgatgctcactccttcacgtttggaataataatgatgatgtcggattgggggcccttcctacccagcagacagctatcgagtaaattatggccgaggtagttggtgtcttttgtctcgagcaggctgtgtaacagtgactcggcctcattgccagacaccacatgtctttgatgctatgctgtatacagatcaccacaaatagattgtagattcgccgaggtcagcttgatggctcgggtccctgcacccctccgagaccaccctcccgctgctcccaaactgttcagtgagccaaagaccggtgagaatgtctgcggccatgcagtcgcccgaaacgcactatcaaaaaacaaaagtgacgccgcatgcccacactgcggaatcgggcgtagctgcagaatatattaatcggtatatgttggcgttgctgccatgtggctctgattggtgcggcgggctgtagatgtttccaggaacaccgtggctttggatgtcgtcaaaagcttcctttgcgtgtgtcattgaacacgaaatcatcatgacgacaaactccattcccgtctcactgagggctgatctgtgcccttcttgtcagtcaaccagtagggctaggtaggaacttttagtgaaaagtgtccacccaagccctggtgaagtccattctcgcttgcccctcatctcatggatgattgcgaaagacggaaaaaagaaacgaagttttgaagctacacaggtcaactccacaagatgctgcgcacgctggagatggtcacgtccatccgccaccggagagaatgtaccgtaggcatctatctggcagttcccagtcagtgagcctatcgacagcttggtgagcccaaagaccaaaaacaatgacgaacatctgacacttgaagcgcacagatcaggcccaaacgctcggggcggttcgcgtggcattttgtggcagtttgaaaggctagcaggccacaggggcctcttacaaggtgagtggctcggggaaaatgtggtaaatctggagacgaagtgagcccgagccgtcgacctgcatctgcccgcggtccttcattggtgcatgtgaagtcaaaggacccgcccacatcttcaattcaactcattgtccagcttcggagctagcggggagaggcagctgcagcccggggcgcaataaaaggggtttccgccgttcttggtaggaaaaagtgcattaccgagatacaggacacgcgcataggcgcaagcgctcggtcttcgtgttctggtgtctttgagtaagacttcttaaagggcagcgagaaaaaccatcagttcggtaccgtcaaagttggctgtagtgtaaaggcatacggatacctagaatttaagggttgagcatgctgcccagttgttgcgccggagcgggccctgcctccgcttccggttgttacggccggtgttgacagagcaggccttgataagaggcaaggaagcgagctgaaatccgtggcgatggcgccaaagctggcgactgatggagccctttttgatgacaaactggaggttttagttgcgatcaaccgttacggattgcggacccgaccttgacgggcttggccactccatcggatctgctggtattggacatttgcgaaatgcaccgatgatactgcgcagcaaaagaagaggaattccagaacacacggcccacccgaaccacgaggaccaccgcgtggccagtgtgcagtactcggtaggtggaacaatgaaagacattgaggaatgaatactctgtacctctactcaaaaaagaagaagcacgagatgctgagatagatgcaggcagttgcaagacatgaacccctgaacaagtgcttaccacttttcgaggtgtgtctggcgtgccttgctagtgtaccgcgctctcttcagcacggcccacgcagggcccctcgaggcgagaagaatggggttgcatggatggacatgggtgcatcgatgcatggaaagatgagcgctgcagaagaattaatacggggggaggtcgcacctggcgctgagccaagggtcgccggccgttctgctgctctttttgctgcttctgctgcccatcccctcggtgcacctgatcgatcctctcacctaaaaatcctgtattacgattattcctctcagcttccattcttctatcctttttgttctcgctgccggaccgctcggattgtcctcactctcccgtcataatcccccctttctgtcaacccgccgtggcccgctttccccatccgtcacatcccggctcactcctcgtcagtccagctccagtttcaccagcaacccccagacaacagcagacagcattgtcgagaagcgccaattgcccatcggaagcctggccggtcgatggtaaggcgaggataaggcgccattgagatcgaatctcgaccaccggctcgctgcgacgtcattacgaccttcttacagcgccatcaggcgtttcatgtcctgtggacctcagctccccttcgtgcgccgccctccgtcattcgctcgcagcacgccctcgacagctaatactccgaagttcgacaatcgtcacacgccgaacgaccttttttggtttttcctttttgatatttcgcatcgattcgccatcacaacgaccacccgactgatataatgtgttttggagctcgtgaaaaaggcgacgaggccggcgcggccaggtcgcgtgagttggacaagattattcgtgccgatgagaagaagatgtcaaaggaggtgaagctgctgttgttaggtacggatgcttcggcccggtctattgcgctgtctgcagctatcctaactgtgtcgaacaggagcgggcgaatccggcaaatccacggtgctcaagcagatgaagttgatctacgcgcaggggttcagcaaaagcgaaaagctggagtggaagccagtagtattccagaatatcgtccattcctttcgattaatcttcgacgccatgaacgagcttaacatcccatttgagaacccagataacgaggttggtatctaactacttgagtgtttggctctcccccgctaacgcaacatgcgtagaaaaacatggcgcacattatggtggactacgatgtggttgcggatgagccactgccagaagactacttggagcccatcaaaagcttatggcaagaccagggcgtgaagagtgccatcgcgaagggcaacgaatatgccttgcatgacaaccttgactagtaagcagcctgcgccgtcgcctctgttgtgatattttgcaatttgctgaccaacccgcttgcagcttctgcggcgatttggatcgtgtttgggccaaagactacgtaccaactgatcaggatttgttgcgctcaaggttaaggacaacgggcatcactgagacgatcttcgacctcggtcaactcacatatcgcatgttcgacgtcggcggccaaagatcagaacgcaagaagtggattcactgcttcgaaaacgtcaactgcctgctgtttttggtagccatttcaggttacgaccaatgtctggtggaagacaaggacggtgtatgttgacccccacacatacctcaataccgttaccagaaaaaaacggaaactaacgattgaactagaaccaaatgaacgaagccctgatgctgtgggagtccatcgccaactctcactggttcagcaagtctgcgctgatcctcttcctgaacaagatggatctcttcaaagagaagctggccaagagcccgataacagatcacggcttcaccgactaccacggcccaccggacgacccgaacctggccagcaagtacttcatggacaagttccgggcgctgaaccggaacccagagaaggagatttacggacatttcaccaacgcgaccgacaccaacttgctcaagatcaccatgggttccgtgcaggatatgattatccaacggaacttgaagcagcttatactgtaaggggcgaaccacttatttgcatattcgatgttttcaacgctttttcttgacacacaacatcgcctcttcactatatctcacacattttatttacgaacagtgcgcgccccttgtaaaggttttctcggtgtccgtctgcaaagaagaaacggccggaaaacggggagaggaggcaaaaagacaaatggttgtaatatacctcactacccttgttttgtttcgcgtccttttttgtttgttttcgtcattcatccttgtcattacttatcatgatactgggtttcaaggcggcttgtttttttgttgctttttttctttctcatgcccttttccccccgttttttatgttttattggggatacaaatgtgacctaaccagagtttttttttacttgattatgatagggtctgaaaaaggaagaagagaagagaacatgatagcctccgtttcttctttgcgagttttccgcgacacatttcttcaccgtttctctacatttgagccgagaccggctgcacccgctgctgcatattcatgcagatctcgacagaccccggctcttattttaccctccgcgtggcagacacggcacacacacgattcccgcccgtccgtccgtccgtctacgaaccgaattgttacttgccgtccgaacgggttcgaatgacgacattgctttgtccgtttgggcagactttttgattcaaggtgtatatgctttttttttgggtaggggcgggggggcgtgttggtttgtttatacttttttatatacctttttgggggaacaagaggactacgatgggtgtgatgatggggtattttgtggctttccatggcgttccttgtttctgctaattttcgacttacatgcgagcagagagatgttggaatagggggagactttgaggtgatgatgatggttgtggtgctgggtgtttggataggagagggaaatgtgttagttattgcatagtgatgatgaagatggtgatatgattgtgagaacaagagatgagaatgtttgaaagaacgagatgaaagaagatgtgaaggtgtgagaaaatgagacaagtggtcgttcgagctgaggaagctgagggggagggggaggtctcttatacccgggggtggctgaagtgtgagttggggctgttattaaaacggctggacggcaagggcggcgggcggacgttgatgagaagtggggaatttactgctgtgagccagggaatggatgtgaccccagtggtgggatgggagaggagagaaggtttgttgatgtgacactgcatgaacggtgtgcatggaagggggcggccgtgggggaacgggaggattggggtgataagcggtgggccagataagttctaagagagatagagagaaggttgagagactatttaatcgctttgagaaatcacattttgctggctgcagttgacgccgtacagatacatttatcactttcttgtggggggtaagattttggagcgaggaaacgggatatttccaagccttttttctcggtcttgacatttttttctgacaagagaaaggggttacattccagatggacccccttgttcccaaccgaaaccagctttctcttcggtggtgtgttttgagggtgtggtgcttcatgctaccaagaccaccacacacgccatcttggataataaaccagctcaaaaagaaagaaacgaagacagccaaggtgcggcgtggatggttggggagatacctatgcgagaaataggggtattgcagatgttatcaagataccggtcaatctggtcgaatcttgaatggctttttttgttgtttcttttcacatgtgaaccttgacggatgaattggaacaagacgatcgacaaaagataaaacaaaagatcgacgctcccaactaccgagaggaggttgggcgctgtggagcgggaaagccggtgcctccgtccgcgggtgctgccgttgcagagaaggattcccaggcctggaagcaatcgccgaagcgttgaggaagaaggggaaaactcaccgaacatttgtgccgcgcctataagacgcccagaagtcaatgctgcaacgttggctgcactcggcgcaaccggggagacgcaagttcaacacccggttttttgacgctatttctgacgagataacggcgatgttttgccaaaatttggatgttgtgagttgtttgaagatatccacctggatatatccactttatgccaacttgaccgttggatgttggggtgacaggtggagtgggcagacaggaagtggaacatcgttacttcgctggcttcttgctttcttcttcccccctgaaattgacaacacagcaacagggaaacaggcagaaatcaggcatttgacttgtcaaacagagaaatattttccagcgacaagtttgaaggaaacggtgttggacctggctccgttttgttcgatgcaacgacattcatgtaggtcaagctggaaccaatgtctcgaaactgcaggacgaatgtcttgggcggtgggatatttctttttcttactcgcggttcggtgtgtaatctgtaccacacagtgtgaggttcaaagaagatgaaccgcggtgggtaagacatgcagatttgttcggagagatctcttctcgatggtggtggcggtggctcgcctacctctatcatgcaagattgggcggtcaagatcaccgattcatgagatttctgttcatcgaggggatgccatgccgtctgcgtaggaaacttggttcatcgatcccgagttgacttgcggttcgctgcaaggcatgagatttcggtaacggcaaaccagagtgtgtcacggacatttcatcaatcgtgatcggacggaggaacgtgagccgcacgtggctcccatgccgtgagtgacacccatgtctaatatcatgaacttaacactgctaaatttcccctggtggtgagcatattcggtcgttcgatgtttgggcaggatcaaaagggattgctaggaccaatctcctgccgtctgccgagcatctccaagacatctgtcgtcggcagtgtatcccggttgccgaaatgcgtgatactactccgtaacggacaaggacggcgactggagacagattcaaggggtttcggtattctccgaggcaggttaagccgggcgatgtgggatcgttggaatggcgccagcgacctcggcagaggtagcgcaacgatggcaagacaggagaaacagaggaggattgtttcagtggtattggatgttatgtaagcggatgtggcatcaggcggcagtgtaggtagaactcagatggaagagtcagttctaacacgggttagcaagctgtagaatgattataagcctgtagatttaggtagacagagagttgacaacagctttcggcgcaaaccgacgacaagcggagggaggttgttgctgaatttcttcggatttgcggtctcagcccagcttgtgagccggcccgctcccggcacgccactaatggcccgctacggatgcacgaccgacgcgccgcgggcactgacaggagctcaaagcgcaaggcgatgcttcattccgagacacaagcctcaggtctgaacaatcaagcattttgctattcccaaaacatttgtagttagtggggatcgttgcatttgttttgcgactgaagaatctcatgaaaaatcccaccgaatctgcgcctttgtgaggcatgcttaaccctaaccctcaagccttgccagccagcgacaacccgaacatgcagtaaggtatttgatgtttgcgaatgagcattttgttaaaattcaacactcagaaaagatggcagtaaaaagcaaccagtttcttcctgcgtggtaatatgaatcgcactgggtaatattcaacctttgaagtccaggtcttggcactatttaaggttgattgccgctggcaacggttggctgcaggtgtaaacaacagtggcagtcacaaaggaggggtcaatcttcgcacctggcttcgcacctgtcttcgcacctgtcttcgcacctgcttttacatcacaaaaccacccacagcatcatttggctgtagtcaaccctcaattaaaggtgtcacatatgcatctcagatctcatccggtccatttgctaagcctgctgttttaacagcttcccctgttggacttttgatactttcaaatgtaaacaaacgcccaatatcacaactcacaacttaccacaagcccttcatatcgacagtcatttcaatttaatcacaactcacaaaccaagatggcctccgcctctctgctatctcacaaagcgggcggcaccagccaacactctgcagccctcctaccttcagaccaaccaccatcatatcaagaaaagaaaagttgacaatcaaaactggcctttttcaagacgaaaaggggccttctcattatcgttctcatacttgtaataataggtggcgggctggcagggttggcagctctcccaaaacacaatgacaatggctccgaggaagcgttggatggggggaggatgattcagaaggatgagtatttctacgggggctcagagccggtctacccctctcgtaagtggatgactttttctttttggcggtgacatgatggagtgagaactgacagatatggcatcgatagcggaaatgactggttctggggagtggaaagaggctttcaatagagccaaggagtttgtgggcaaaatgacacttgatgagaaggtatcctaccgccacgtctggatttattgtgacgaacgaaactgacaggaagctcagatcagcctcacttcaggaaccaactccgagacctcttgccctggcttcttgcctgccatctcacgcctaaaattcccgggtatgtgtctggctgatgctggacagggtgtcagaggaacagattttgttagcagctggccgagtggcattcatgttggggccagctggaacaaggaactcactctggcaaggggcaaaggtatgggtggtgagttcagaacgaagggcgtcaacattcttctgggacctgtagttgggccagctggacgggttgtcagtggtggaagaaattgggagggctttgccagtgacccttatctgtccggcgtgttggttggtgagactgtcaaggggattcagggagttggggttgtcgccagcacaaaggtatgttattatctcgaaacttcaagttgacgctgaggctgacggcatattcagcatttcattgccaatgagcaagagaccaatagaaaccccaacaacggtgtggaggctgtctcgtcaaatatagatgacagaactatgcacgagatttacttgtggtaagtgacgcggaactaacactgctaaagagcaagcgttgacgacgaaaccgcaggcccttccaggatgccgtacgcgccggaacgggaagcatcatgtgctcctaccagagggtcaacaactcgtacggctgcgcaaacagcaagacgcaaaatggactgctcaagactgaacttgggtttcagggtggcgttgtgagcgactggggagctcagcacgccggggttgccacagctgaagcaggcatggatatggctatgccaaatggcggtgacttttggggctcacatctcgaagacgccatcaaaaatggaacggtgcccgaaagtaggctagacgatatggtcctcaggtatgtcgggtgcattctctccgtgtgtgtgaaaagttgttgacccaagcagaacaatcgcttcttggtatcaaatgggccaggacaatgactttcctacgccaggtgtcggtatgcccaaggacctcaccaagccacatcgcattatcgatgcaagaaactcttccttcaaatccactctatttgatggtgcggttgaaggtcacgtcctggtcaaaaacatccgcaatgccttgccgctcaagagccccaaactgctgtctatttacggctactccgccaagaaccccgacgaaaacaacccaacagatggcctctctccctggctgatgggatcgggatcctttgactaccaggagtttggtgcaggcttctttggctggtcaggcgcaacaccaggaacgacaggcattgcttttaacggaacactgtactctggtggcggatcaggggcaacatctcagtctcttgccatttcaccgtatgacgccatccttcagcaagcctacgaggacgatacagccctcttctgggacttccacaacggcaagccggcagtggatcctgtctccagcgcgtgtctggtattcggtaacgtctgggctgcagaaggcgcagatagacctggccttcgagacgattacaccgacgagctgatcctccacgtcgccagccagtgcaacaacactgttgtggttttccataatgctggtataagactcgttgaagaatttatcggccaccccaacgtcacagcagtgatctttgcccatctcccaggacaagcatccgggaaggcgttggcatctatcctctatggaaaggagaacccttcaggtaaactgccttatactgttgcgcgcaacgaagacgactatggagtcatgctcaggcctgacaagccggagggcatcttcaagtatttccctcagagcaactttaccgagggtgtgtttgtcgattacaggcactttgacgaaaacaagatcaagcctaggtttgagtttgggtttggcctgagttacactacctttgggtattccaatcttgctgttgagaaggatggcaacagaagctttgaggagtttcccaaggggaagactgtagagggtggtcaggaggacttgtgggatgcactggttagagtggaggctgaggttgagaacaagggggaggtggaggggaaggaggttgcgcagttgtatttggggattccggggacgagagaggaaaaggtacctatgaggcagttaagggggtttgagaaagtgttggttggggtgggggagacgaagaaggtggtgtttgagctgacgaggagggatttgagtgtctgggatgtgagggcgcagaagtggaggttggggaagggggagtataacgtcgaggttggggggagtagtaggaatttgcctttgtctgggaagttcactgtgtaagacggttttttacagattgaaagatgggatggcgctttggatttcccattggggttatgtacgacatgtgtatgagttatgaatgtgagctatggaggatgttggactagggttcaatacgactacaagatacacgaggccctcgatctctacgtcagtttccccaagatcgcacttcgatgatgagttggagctcaatggccattgaagcggatcttcaccccggaaatggcatatatccggcccgcaccgatttacccggcagctcctccccgatgcgacccccgtcgatcgtcacccggccacttgaggctcaatgcgggccacatcttggctcctatcatgaatcacggttcggctgaagagcttccattttggagatcgtcgtgaggggaaaagaggagtacgcgtggtgcgccgtgatggccctctgcatgaacaagagtctcgcgcagattgcagtgcccttggaatctgcaatatggatttcattaaccttcttgtcccgcttccgtggcgctggtaaaggtgtgaatggggaaaagaaaaagcggaggatgatgctgctttgctgcaggggtgtaattgaggtgatataaagtgcatatattccccccccctcgtccactgattctagagtttgttcgcctcagggacaacctcagttttggctttccctcgcacacaagatgcgtctctccacctcccttctcgccgcggcgggagctgtcccccttgcaaccgcccagctccacgagctcgccgtcaaggctggcctccagtacttcggtgctgcgactgacacccccggcttccgcgagcgcgagccctaccccgaatcttattcccaatacgacgccatcctcgaagaccccaaggagttcggccagacgactcccaccaacggccagaaatggctgtttgtcgagcctgagccgggcgttttcaacttcactgagggtgactacgttgccaatttggccaacaggactaacaagatcctccgctgccacgccctcgtctggcacagccagcttgccccttgggttgagaccaccgagtggaccaaagagggtttgagggaggcaattgtcagacatatcaccgaggtggctgggtattaccgtggccggtgtgcccattgggatgtgttgaatgaagcccttgatgaagacgggacatacaggaagagcgtgttttacaatgtgctcggggaggagtacatccggcttgcctttgagactgctgccaaggtcgacccagaggcgaagttgtactacaatgactacggaatcgagaggccggccagtgtcaagactgcgggcgcggtgaggctggtcaagatgttgaaggatgccgggatcaaggttgatggcgtggggatgcaggcgcatttgcatgcggacaaccacccgagtgaggcggatttgatcaacactattgggatgtataaggaggtggtgaaggaggtcgcgtttaccgagttagatgtgaggatcaaggtgccggttgatgagcagaagctgcagtggcagagtgagtgctaccagaaggttgtgggggcgtgtgtgaagacgaaggatgtttgtgtgggtatcacgatttgggacttttatgacccttttagctgggtgccgcatgtgtttccgggtaatggggcgagtttgttgtggtttgaggactttagcaagcaccctgcgtatgatgggatggtgaactactttggggagttgattgaggcccagggtggtaacgctacgtgctcgtagagcctcgcagtagtgatggaaacgacgctatgctacaaaagactctgttctggaaaataaaagcagtgcgtttctgaccagaaaccgtgtcatgtcttgtaccaaatccagaccagctccacgacagactcttccctccctttagacaccctcccagccatcggggaatctcttcttggggaggcgcttcgtacagctccttgctgaagtggacggtggccagagccgttttcatgaaccatggtccaactgtttcccacttactgttgggtatcgtctgtagtgctggttggcatattggaatagatctgtcgtggcaatcagtccaggtacctccaaattgctgtttttcgacccttaacattacatacgaccatacgcagctgtaaatacgggatcccgtccgctctcccctagtcaaacagctgacggccagaccagtactcaggtgggtgaccactggggaatccctggtgttgtatgtttttgtctccatttttcgactccacttgaagttattgtgaggtcttggcattgttgatgtggtggtgttaggttgtatagatacttgggagaatgtgagattcggtatgagtagatattttgtaaaaactaggtgtcatatattttggttttgagaccccttctgttgccgatcttcatggacaggactgtgtctgggggttgtaggggtctagggcctggcaacggacaggtctcgtagatctatagagatctgttgtggtgagctagaaatccgtatacaatatcacaatgcttgaaatttttcaggagcttagagattcattgagaagggttggggcgttcaatcgttcaaaatcgggtagtcatcctaggggggttgtatgggcccacaattaggaagatttttgaagctcaggggcttcagggggtgtttgtcaccatgtaaacaaagaggaaatacaagagtgtttgatgtatgctaatccgaaccaatgcaatataaaaatgagaaacttttatgagtacaaccgatctgttccctttccaaaagagtgcgctctgcctttttcatgcctttgtatttgcattccaagttccaaacgtcatcgagtcaatctcctgctttgctccctcatgcaacacattggaattaaaagtatcgccaacatgctcagcattatctgttgttgcagttgatatgttcatccgtgtctgaatgggggattccatatctccgatgctttctggtcagctggtcagtaccaagcgtgcgtgaggctgaagtgattcctgtgtaaccaaccgaatgtcatgtttttcgccttttgttttccaccgtacatcacgttcgagttccagctggtgccaatctgctttggccgacgcaggattgcgttttggatcttggcagcagatccttttggatatttccaggccagtgtcgcaataacgagtcccattagtgcgagcacggccgtaggcacaccgaccgcgattccgacaacatctgaagtcgccagccctgcaggtgcggagctaggctggttcgtggtgttggcctccgtgtcgatggcgtctggtattggggccattgttcgcaagtgggtgtggtcatcaatgcctaaggaactgtgacgtctgcagccaccgacaaggctccagatgctgccttgaaagtggatgaacgcagaagaagcagtgagcaggctctcgacccatggagcgcacctggacgataaatatgtggtgtcgtgtggaacgactgctttgctgaccattcagaagatcttctgtacgtaggagcacagagacttgacgtgggaacatcggtaccaattaacaacgtcttcatgtacggtagattctgtcgccaatcagcggcactcacatgcactgccacgtcctgtgcatggagcccaaccgaagcctagcctgctccgactacatacatcacggcattcgtatcaggtcaactgtttaacttgccggttagacggagtcctcttatctgagccgatcatgtataaatatgttgtggatcgggcacaagcctgtgcagttttgattcctgacacatgtgtctgcttatcattgttggctttccctgcctgtcccacagtacctccagaatgagcaatatccctactaatctcaagaagaaaggagtatatggacttgctgagatgtcaacaaccaccgccacgaccgtcatgcaggagcccagctctcagttccgcggcgacggtaaaacatgggacgggtcaatagtcaaggtcaaagcgagtgatcctgtttactatataatctacccattctaggtgtttctatcaatcctaacctaggccgccccttagacctcaccagatgcttctaagcatagaggcaacgacgtcagctcatctgtcaattatggcggtcatcagaaggtgaaaaagagaatcaagtttggtatggcccttcctcagtttcctcaattaaaccccatgtgaatgaacacttatctatcttacctatcatgcaggtgcctgcaatgagagtgagctcaaaatggctttcagtgcaccgattgatccgaaagtctccgagtcaacacacactggacataattacaaatcgaacgttctttatgctggagctgagcaggaggttgatgagcttgtttttgagtaaatgtgaaaatgtgtagaaagtattggatacctggcgttcaagatggtattaggcggtttttgtcgataatttgttgagtgaattatggaagtcatttcctatgtccagtatacgaacaatgaaaggacatgatatcttgatcttacgttacatgtggatgatcgcggcatttggccacgatagcctgtgtacaacatagataggcacctgagggcatgtcgctcaagatgattatatcttcgttatcgcacagccggatccactacccactatttatctggtcgtacggcggacggatttcctcaaatcgatgcccaggatgcagtctctttcctcgaccctcgcacttgaaacagtagttgaagaagagtaaatcgtgatagcatgtacggcaatgaaatcggatcccatgtatcagcttcatcccttttctgttagaaatccacgcaccatagcagcttgcagagaagattggcgtaccctgagacaactgtcacaaacataatccttgtgcataagacctgcactccaccaatgccattcggactgtggaaagacgttttctcctgtctgctttccctccagaagtggcagaaggtctcgatgcccatggtatatcgcaatacgggctggtggccatttgttgtcgtcaggcattctaccctctctcaaacatacacctcgcagcttttccaccactttcttctccccagccttagccgcccagtgtaaagcagtccagccgtcatcatctgtctcagtaggatcaacttccggatgctgttcaagcagtttctccactacagatagcgagccacctgatgctgcagcatgcaatgcgtttcggccatggttatccttggcgttggctttgtaccctaacttgaggagcttcccaaccatcttgtcctgtccgcccagggcagcaaagtagagggcagtacgcccatacgcatctttctcatgtcgcatagaaggctcttgttgccaacatgcgtcaaagactatatcctcgccgccgaatgaagcagcatttagtatggaaccgaaaacagggtgtttgttgtagagactggcaccctttctcagcaagattgtggcaatatcagaatggcctcgtccagccgcaagtggcagggcggttattccaagcttggcgtgcaagaaaatgtcaacgggaatgtcgaagtccacaagcacttgtactacttccgtatgcccttcgcacgtcgcatagcgcaaggcagttgaactggcgggggcgcccttttcaagaagcatacgcacaatctcgtggtatccgttgaacgccgccacagttagtactgtgtgtggtttatccgggggggcattccaatctgcgccgtttctgaggagcaccctgacgatgtttatgtgccgagcccacatcagaggagggtatccgcagttggcgaggatattaacatccgcaccattagccagtaataactcaaccacgcccagattgttctgatatacagcaaaatggagagctgaaaacccattggcctcacaatcgttgactcggcagccaatatccagcgccagccgagccattctctggtccgagagaaaggctgcggcatggagtgcagtgtgccctgagaccggcgcgagattcttgaattctgcaccctgatcaagtagaaactcaacggcgtcgtgttgccccatctggattccccagagcaagggagttccgcagcaaatcatgggcatgggccattccaactctgacgttacttcgctatcatgcgcttgaaacactgtcttgaggaatacattgagaggacccgtcgcgcaaatttccatatcggcatttctctgcaggagcaaagtgacagcagccaggttacctttggccatggcatggtgcaaggcggtgtctccgtgagaactggttttattcacatctgctccggccagaagaagagccctcaccatacgtttgccgtcgtagtctgctgttttctccttggtgccatcactgtctggccaccaggaatgactggggtcgggcctagccttgatttgctctgtccttccagtttgcgggatatccgagttcttgaccttgcagtgtggaatatttgagttgtgaatatgatcatgaaggagagaataaattaggagattgaattcgcacatgcaggccgcctgaagaggagtgtgtgtggttgcttccgtttctgtgggcgcttggtgctgaataagaagatcaaccatgagctcaaaacacttatacgcggccgctttcaggtcgttgtgaacttgttccacgtcccgatccaaatcgtcgaccaatcttcgtgtcgagctgacccattgtgcaaattccgatgaggccgacaaccgctcagaaaagtccagagcggagggtgtttgaggcttcttgtggaaaatgttccgcaacggtgtaccccagtaattgtaaatccggtgtagccatgtcaatagagtgctctgagtcccattgtctgggacagactccagcaccagttccgaatcctgtctggactctagatactcgagtacatgtctgtaccagttgttgatggcatactcaagaagcggccgtctttggaggtcacattccagtactttcccgccatcaacttcgtcctcatcagattcatgtaaggtgtggtcatccgtattgacaacacattcgttgatatactcgagacattgattggccatcatgaggtgaaccacagccagtccaccacacctatccgctttgttcacgaggtattcctccaggctggaaaaggcaaaatccacgatttgcttgccgtctcggtctggagactctggaaaagccactagactgccaaagctatggcgaatggagactgaattctttttgtttgtctgaccccagttgatcaagtcctcgaattcgacgaatctcaacggccggagggtgcacatgagccattggagagatagataggcattgggcatgacgcatattctttccaaggctttatcgtagaaagcattgatctctttcgggatctcattcaatgcatcaagtacctcctcctcatcgggggctgggtcccttcgccgaatgaattcgtgaaattcaggatccaacagccgtaatttgactaaaccgaagctattgatccagttccaggttagctttcgatcacttctcaaaactgcttctcggtaggtggtatttggtgcaaaacagattgtgttgagccagttggtcatctttgcatactacctaggtaggtaggtatatggagatagacttacattccgtctgaattgtccaccaaattttttttgatgatctcaatccactccggatgttttcttctgattattccccagttcgacttttttagctcctggtcaaccatcaactcgatgccgttcgtgtgggcgatcccttccactgcaacgtcgaatcccccttcacgatcgtgactcaggtcccagcatcggtcctcgagagccgtgtctacatgatctctgctcacgacaaggatatggacaggatcatgagatttgaggcactcaagtaactcgaataagactgccagcgagtcttttccattgggtgactctgtaagagaatccaagccatcaattacgaggtacacctgccctcgttcctcggctagacatcgtatcgcatactttaggagcgtgtaatcaagactgccggtcttcttgaactcttgccgcactttctgcactcccttgggcaactgggataggccttcgcatagttgtcgaagccatgatcttaagagtcgttctggaaaggattcttggcggctttcgccctcagaaggtttgatacaaaactcgttagaatcgaggtaatagtaagcgactatcgggactccatcggtagcttcttgttcaagttcttcgatgatcgatgcactgaggtaatgttaaagaacttccaaagaagtgtacatggaattgcgagtaacaagcgacagcaagggattcgttcgacttaccacaatacagtcttcccgcaaaagtgctttccatgaagccaaagaaagcttttgggacaaactttccatttcttgaatgcgtccaaattcagaagccaagacactgtaccctcggttcggctttccaaagctctctcatgtgctgtgcgatggtcgaacttcgacagccagtcaagaggttgtttgtctgcaagaaagtctgggtcttcatgtcaagcattaacactccagaattagcagatagaaacatgaaagctctcaaggtcagtaagtgtaacttaccattcggctgtgcacctgttcgatgaccctttgtcacgagattcatgacccctatccgttggtatcccatgttgctgttggagtgaacattatgaccactatgctgcatctgtcgagcctggaaattatcctgccaatattcgggaccttcagcggacttttagggtgtcagacccagcataatgcccggtatttagtatacaggtgtcaggtgtgacttaccaaggtctcctcacactccagtctttcgacatcttgatcaagcgtgttactttttggttgaacttcagaagagtgtaaattggccgagagcaaatgtggcggaagcgaaggggagctttggggggtggatggcgggggcgagggagggcgaaacggttgagatggtaagctcaaacttgcagccatttggactgattacaattttctgagagtatgtgagaataaaggggagtaaactataatcaagaaagcagattctggccctcataaaacattggaatgtggttgttttgtctgatcaggcgatgtccaagatgtgacaagttcgagcgatttggaagtttcctgtggtagtcacaaaggtgagctgccctgttgtctgccttggaacaaggcaacccccaattttccttcttttatttctgattggccttgaatggcaaggcataataatgtggctgcataaaattgcatctggctgaacgtgaggcatccaacttctcgccgattgacgtcccattctgtgatgggtcgcccaagggtacggcgcagccttttccgtccctctacatccattattaacttatatcgaccctacattcttcacttcctagcatcgatttcacttttctaggtatccaggaagtactgtccagttctccaccattttgtcaccattcacctttcctacaagacacctcacatttttgttattagacagccttgtggttgtcgagtagaactccacatcgacgacgacgatacaacgaccgttcgaatttttgacttggagctatgtcttctgaggagactaaggtggttgccacgcctgaacctggcgagcagtgcgatgtcaaacacctcaaacgcagctatgtggatggaagcaatgacccggtggttaccgagggtgactcggatccggtcaaaaaggaggaagacacaaaacatcagtcatttgccctagtgtcgacacaaaacttcgataaggataacaatcgcaccgatacaacgcttttgatcaattccaagcacatactcgccgctctcacaagggtagttcgttactatcccgaccaagacgaggaattcgacaaaccctctgagctgacatcaccattcaatcttctctatcatcatcgcaaggagctttctgaggaggctgctagggtaggcggtgacggtgccctccatctcaaccttctcctgagctaccttgacaagcagaagtgggccgaggccgagacactcacagctcgagagaatcctgtcattacatttgatctactttggttcgtttttaaacccggcgacttgctatacaggatggtaaacggcgagcctgctttgtactggcttgtgagcgtgtgctatgacgaaacgccaacaacaggagattcatggaaatacctcgagcttgagtgtctatatcaagcacacgacggaaagaaaacgggtgtggtgcgggaaagtctcaaaatatacgaacaccaggaatttgcgggcgatacccccgagaagattacaagcctctcagtctttccgctaaagtaccacaaagacagagaaggaataaaagaacgccttgtgaagcgcggacaacgatatttggagcttgtgcaaaagcagggccaagcatatcattacgaaggtctatgcagaaggcttaaaacacctcctgggggctcatacttttccagcgaagaaaaatttattggcgtctggctcccagaaacagtgagttgccctcatatccgctagcaacccagctttgctaaaagattaccataaggctaccggaagagtcgtcttagactgttcaacattcatggaagataatcctttccaccgcgtcaatgtttccaattggagcatctcgaaaggtcagtaaacataccatatgttaccatgataatactgcttgcagcctctaaagagtccagtggctgaagcaagagagtctagacaaaacaaccgatggcttcgatgaccctacactactctgtctgccatatgtctatggatattctctggacatgcgatgctggtgtatgttctctgtagacaaggtgaagacggccgactggaaacataaagactttgattcggttgtccttccggatggatataggaagatcatcacatcacttgttaaaagtcacaaattcgccagtcatacccgagatgagactgccctcaaaggcaagggtctgatatttgttttgcatggccctcctgggactggcaaaacaagaacagctggtgagttgcgcttcacatgcgttctgtcaaagtatttttgtgccgtggcagccatagaagttactccgtactgacagtcatgacagaagcaattgccgagacaacctcaaagccgctcttgctattcccaaccggagaactcgggggtgatctcagaagcattcagtcagagctgaggcggctagttagatacggcactgcatggaaggccattctacttatcgatgaggcggatgtatttctggaatccagacaggttgacggacatgtgtcgttggagcgtaatgctctcgtagcaggtaagcagaggcttttccccaagatagctttggtaaagcatccataaacacgctaacgcttttccgtaacgcgaacagttttcttgaggcagctcgagtatttccagggcatcatatttctgacctctaaccgcgcccaaatgttcgatcccgcagtcaagtcccgcatcaacgttatgctgcactacccctcgcccgacaaagaaacgcgaaaggtgttgtgggcacaacggctaggaccaatattgaaactcaaatccttgccaagatgcgaactggatctaaattcagcaacggagacactgtcggagtatgagatgaacggtcgggagatttcaaatgctgtcaactcggctttgaccatagccaaagctgatacgctcacccttaacatggaccaccttcggtctgtggcaaaaatatggaaagactcacaggaaaagagcgtcgaagtgggaccagttgtggacgcagttcaggagatcaaaaggattccgtctatcagtgaggttcttaggacacttaaaatcccgctttgggtctggaaactattcgtttcagcattccttgctggcgctctatttcaagggtcccttaaaatctttaaggcaaggataaggtggcgagggcgtcgagctcacaggtgaactggtcttgggagaggatagttgaatatgcactgaaactgtaagaatatgtgttctataacaagaaggaagattattaaaggggtagatatgtaatagggggtctgtcaggggaaaaatcttgagaacctttcctacaaatgttcacgcgcagtcattgatagaaaccagatttcagcatcccacgatatgtgcagaagttggtacatctatggagataggttaggtgggaggctgacgttgacagagtgcccgctgtcaggtcagttgcttgagacgtgaagggctttcactctttgcgtataggcattttcacaagcgcgatatgctgtttggtggactttctcttgcctattttggctcttgattagtaggccaagatgtgaaagtggcgcgcaagaatggatgtcatgggcgaatacgtttcagcagcaaaaacagtcaagacctgcctatcttgacgtacacgatggagaaaccaagatctcggtatcacgattgccgatttgaacagccggaagcaacatgacgggtgcggatgcagtagcgcttccccggcaaaatgcatgcaaaccaagactccggggaagacgggaaaaggctaatttccacgtggtaatcatccacttgcgctccgttcaacatctacaacttagcttcgagatgttgatcttcgactggcgggaagtggttcgaccggggaagcgcacgaattgcttttatggggagagaggtgttttgttgcgcgcgcattgacgatcgatagatcaccgttgaccaagatattgactgaaccgggaaccaggacagctacgatcacatcaaagatttatgcgcgaggatatgaagaggggtatgcagggggtggactgccggagggaggtaacttagcggagacttgatgacaacaaagaagatgggtataagtataagggaagacatgcgttggagaatgggtaaagctttagacagtatcaatcaggatctggatcaacatgttgctaaagtctgtcatcctcgctctggcaacggccactggcatcagccaggccaacccaatcgccccccgtcaaggagtcagttaccattctcatcgaatatctcttcatcgtaccttacccttcatgccagtgcaccttccttccttcacctgtttcttccttcctctgctccttcctcgcactgctctttcccttccagaacttattccttccattgctccttcctcccgtagctccttgctccctgggcaccttccatctatacagtttgcaggcgtcgtgccttcccttcctcgcattatctcatggcctcataccacttaccccttaacacatttacacattagcactttgacattttagcacattcacacattacccttttctacaaacacatccatcttcattaacaacgctcaactaaccaccttatcacaaccagcctaccggcaacggcccgttcgcccccgcgtattacaccaccgactcctccctcaacggccacaccctttacctcccccggaacgtcccccagggagccagaatccccgtcctggtctggggtaacggcgcttgctccgccaacggcctcgacttcctcaacttcctgactcaaattgcctcccatggcgtgtttgtcatctcttccggctcgcccggcggccaaggctcaaccaatgcccagatgatgacccgcgccatcgactgggtcaccaacaccgccaccaaacagcgctatccttggctggaaacgtctcgaatctcggtctcggggatgagctgcggtggcgttgaggcgtacacggcgggagtaaacgacaacagggtcaccaccatcgggatttacaactcgggtctgttgagtgagcaggagagcaggaatgttgtgccgagaatcaacaagccaatcttctactttatgggaggccccagtgatatcgctttcaacaacgtgggtgtttcatcgcgaatgagggttggaaagaagctgacagaagaccagggcgagagagactaccgacttcttccgcaatccacaccgacctggaagggcaacttgaacgttgggcacggcggaacctatggtgaccaaaacggcggcaagtttggtgttgctgctgtcaggtattatcagtgggttttgagaggtaacgcgactgctgccaacttcttcaccaacaatcaggaggcgagccgagatgggtggagtgtcgagagccgaagcttggggaatctgagggtgaatcccatctaagctgtttccatagctacaactgaagagtggtccgagcagtgggcgttggaaggtctcaatcgcctcgcgatatggtcgtactgaggtagccaggctactccttggtaccggccatatcgatttctatctcgagattgttttggaagagctcctctattgtcggctagaaacgtcggaagtgttgaagttgtccagctttggcttagtgtgccgaagatcacggtataacagtgaaagtagctaagactcccatgactgggtttcacatcgaatgagccctcaagttggtgacattttcttaagttcttttttaggcacctacctggagacataacgcagagtttgactagcggccactgttggatggtatttcggttaataaaggcattcatgaccaaaacagtcctagggtcaagaggaactcgtggatgatcatctaatgtcaaggtagaggagagctcataaattaatatgtaattaaggaagtgtaggatgtgctgaatgcaaggcttgctgacagcgttaagtatgcatggccgttgccgtttggccttcggaaaccgatggcgtaactggacacgctttggagctgcctgcaacgccgtagatggcacttttataatgccgattatttccattttggtatttgtctagattttcggggtgaagaagaaacctccatcccgtcatcatacttgttctaggcacctcatcccccttttcggatttcgagccaacttctcggattagaagaaatctacctctagtaacctctctacctctttcttcagggagcccttctctgggcctaaactctgaaccgatttcagtaatactgaggtcacggggacagccggccgaggtgcttcgtcagtaattgaaggggcaggtagactctctcccctgaggtagctgatgggagacggagcttgatatggccattgcccccgaaatgcattactcagacagagccgaagtgctttgttgtccatgtggtctgcagcagggcacacaagcaaatgcatctacccagccaagatgaatgtatgtatatgatgtcgagcgcggacattctggacgtactatcgaggctactgtgcgtatgttcagctatcctggcggctataacttcagggagcttcaacctctactgcggaccgtacctcttctgtttcaacttttgtgccgtttgtcttgacacgatggggagcatctaaattactggtcctcggttgcgatttggcgcaattgccccgtcacccatgctatcccgagataccgttggcagcaaccgacgttactggctacttgtgggccaagatgattggacgtggtcggctgtggcgctttgagctgtttcccatgcacgagtaggaatcgccgaacgacttgggttttgcaccagatattgggcgctctcgtctatgagggcaagcgacgttcgatatttttctcctgccgtaatcgtgcacaaagggcgcaaagcgtgtctatagggatctcgttttatcctctcacatattttgtttcaacagcgagaccccaattctcgaaatattcctgggataagtaccatggtaggatccctttcgacataggaaaacgcggccggacgctaactgccgccaatccgcctttaggctccgaagggactccgccggatcgccccagcgcacgacgtccctgacaacacgaccatcgagtacgttgcaccgatccaacgactaaaggcctgtctaatagcatagtatcatcgcaatccacggcttgggcaccgagtcgccgcggacatgggagttcaagaagaaaggaagaggcggggtggtgagctggttgtcggacagcgacatgctgccggcagctctacctgaggcccgcatattcacctacgattggaacgcaaacttactcaaagatgcacccgtacaaacgctgctcggccatgctgacacgctgctcaaacttgtttccgaaggccgcggttcgcaaacgcgaccgatcatcttcgttgcttcttgttttgggggccttatcctggctgaggtatgtcccgatggattgacggcggacagcggttaacatccctaggctgttaatcgagcagcccaggtaggcagcgactaccgacatattctgctttccactgtcggggtcgttttcctcgccactccgttccagggcagcgatgccgcccagcaggctcggtggcgggtgctggttgccggcattatgggagagcaagcctccgaccagctcatacaagacctcgagcagaaacacgacttcgttcgccagcgtatccagaaatttaccgagatcgcgaatgccgaggcggtccgactgcccctgtattgcttctttgaaataaaggagacagagatattaagagccattctaccacgaggttgggcgaagacgctgactgagcgtgtattgaagaagattgtacgttaattttatcgcgattcataatgtagctgacgcaggatagcttgtgacggagtcctcggcttgcctccatggtttccatcgtcaggggctagatgcaacccattcgggcatgaacaaattcgagggtccagaatgccccaactttaaactcgttaaagatgcgatcaagcaattcgctgaaaatgcacctgccgttttaacgcggcggaagaactgtgagttaaaccatcccctctgagcggctgctacggctaggatcctgctaacatgatgaagtacctggcaagcggcactggattgtcccgtttggacgtaacaaggaatttgtcggccgtgaaaagattctccaggaccttctcgggaggatccatcctagtgcagataaggatgactgccagcggaccgcaatcgaaggcctgggaggggtgggaaagacgcaggtcgcgctcgaggttgcttttcgcgtcagcaacgagcacccgaactgctcggtcttctgggttcccgctgtggatgtcaccagttttgagaacgcataccgtactatcggtcagcaacttacggtgcccgggatcgatgaagtgaaggcagatattaaagcacttgtcaagacagccttgagtcgtgaaagtacgggtagctggcttttgatcatcgacaacgctgatgacagaaagctactccttagcgacactgcccttaccgactatcttccattcagccggaaaggatctattctattcacaacgcgaacacacgaagtcgcggttaagctagtggggcctaagagtcacattatctcagttgaagaaatgagcagagacgaagcctttaagctattgcagaaaggcttaaagggagatcagatacgtgatacggcaagcactatcgcgctactggaatttcttaccaatctccctctagcgatacagcaggcgtctgcttacatggccgagaagcagatctcaactacacaataccttggactatgcaagtccagtgacgaggatatgatcgagctactaagccgggactttgaggaccgacaccgatatcagggcattcaaaaccctgtcgccacaacttggctaatttcgttccggcatatctcagatcacgacccgctggcggcggactacctcaggtttatgtgcttcctagctgggaaggatattccgcaatctctgctgccaccggccgggaggctaaggactgttgacgctattgggactctgaaggcgtatgcatttatctcccaacggaaggagccagatacttacgacatccatcggctggtccaaatatcgatgttacgctggttagcccaaaagggagagcgaaaggaatggaccgccaaagtgctacaacggcttgataatgtgtttccctatccggatcacggcaataaagaagtatggatgagctatcttccgcatacgcaatatgttttggaactgcgggagagggcggatgacgaggaggcgccaacaggtcttctgtccaaagtgggccagagcttttataatttaggaaaatataaggaggccgagcaaatgtatcggcagacgctacagctatctgagaaggtgttgggtaaggagcatcccgacacacttacgagcatgaacgaccttgcgcttgtgctctatagccaggggaagtacgaggaggccgcgaagatacatcggcaggagctacagctatctgagaaggtgttgggtaaggagcatcccggcacacttaccagcatgaacaaccttgcgagtgtgctcaatagccaggggaagtacgaggaggccgagcagatgcatcggcagacgctacagctacgtgagaaggtgttgggtaaggagcatcccgacacacttacgagcatgaacgaccttgcgcttgtgcttaatagccaggggaagtacgaggaggccgagcagatacatcggcagacgctacagctatgtgagaaggtgttgggtaaggagcatcccaacacacttaccagtatgaacaaccttgcgcttgtgctctatagccaagggaagtacgaggaggccgagcagatacatcgaatgaacgcggcagctaagagtatctacatggggtaagagcatcccgacacacttacaagcatgaaacaaccttgcgcttgtgctccnnnnnnnnnnnnnnnnnnnnnnnnnnnnnnnnnnnnnnnnnnnnnnnnnnnnnnnnnnnnnnnnnnnnnnnnnnnnnnnnnnnnnnnnnnnnnnnnnnnnnnnnnnnnnnnnnnnnnnnnnnnnnnnnnnnnnnnnnnnnnnnnnnnnnnggtaaggagcatccccaacacacttaccagcatgaacaaccttgcgcttgtgctctatagccaagggaagtacgaggaggccgagcagatacatcggcagacgctacagctacgtgagaaggtgttgggtaaggagcatcccgacacacttacgagcatgaacaaccttgcgcttgtgctcaatagccaggggaagtacgaggaggccgagcagatgcatcggcagacgctacagctacgtgagaaggtgttgggtaaggagcatcccaacacacttacgagcatgaacgaccttgcgcttgtgctctatagccaggggaagtacgaggaggccgcgaagatgcatcggcagacgctacagctatctgagaaggtgttgggtaaggagcatcccgacacacttacgagtatgaacaaccttgcgcttgtgctcaatagccaggggaagtacgaggaggccgagcagatgcatcggcagacgctacagctacgtgagaaggtgttgggtaaggagcatccatacacacttaccagcatgaacgaccttgcgagtgtgctcaatagccaggggaagtacgaggaggccgagcagatacatcggcagacgctacagctacgtgagaaggtgttgggtaaggagcatcccgacacacttacgagcatgaacgaccttgcgcttgtgctcaatagccaggggaagtacgaggaggccgagcagatacatcggcaggagctacagctatctgagaaggtgttgggtaaggagcatcccggcacacttaccagcatgaacaaccttgcgagtgtgctcaatagccaggggaagtacgaggaggccgagcagatacatcggcagacgctacagctacgtgagaaggtgttgggcaaggagcatcctgacacacttaccagcatgaacaacctcgcgagtgtgctcaatagccaggggaagtacgaggaggccgagcagatgcatcggcagacgctacagctacaagagaaggtgttgggtaaggagcatcccggcacacttgtgtaagaaagtcgtgcggtatgtttgagagtgttaagttttctattccaagtataaagcacattcgtttgttgctttactcgctcttttatattctgtcatgttttcttttcatctcgtgccacaagaaaggtctcggaggacgagttactattaggtcgtttattgttgaaatacagcacttatttgtgtatttcatagtatgtttttgtttgtgtatccgaatcctcatacgaaagaacccggaccttcggagaacacggacatcatcggtggcctgggaccttggaaaccatggacatcatcgatagcccggaactacggaaactgcggcagtgaaggaattggaggaagcaaacacggggactggatgcttataacaggctcctcttgcagcacattcgaagtattctgttttctctcttgttaaatcaagctatcaagtcaaggttaatatactggttttctacactctctttcagagcatagtcctctgttattaagttcctaccatcttattcacagttccctatatcttcctccttacagggcacagttccctatatttatcttccttcagtagcattgcacaccgtcgtacagcgcagtccaaggaaccctagagttctcaggttgttgcttccacttactcggcaggacctatttaactggcctgccagagttataagtcataacatttattttagcatctggaggtggccagggtctacccgaatgctccttgttgagcaaccttgaggtggggaaccatccactcccgtgcatcgtaacatcgggcggtacttgttaatagataacattcgcaagtgctccgaatttatacagctccaaggccagccccatcatagcttcaattcgtgaatgctgcatattcctccgtgtcgaggacccagttgtatgcctcgtcgagcagcacgtccttctttttccgaatcttcctatgtcgtcctgaggatctaccacgaagaggtcttggaggtacccttcgtcgttgtcagttttgatgtgagcaataagctctcggatgtcctaaatgatatccccgagtggcttttccattgctttggcaggcttgacgagttagcccaatgcctccttcgcctggagcttgttgtactggtccgaatccctctgcagggcatcttccgcatccgtgacagccttcagggcggcgtcccagtcgtcccagttggcaaggccacagagaaaaacgagaccctggtggcggtagtaggagcagatgctttttatcaggtatgggaggagggccttgtaaagcgcgacgatcctcgcctttagctggggcaggatcgattctaaagactcgtcgatgtgatccttctccaggagatattcggacggggcgtaataccaatccattctagagataatgtgggcggtaccggcaaggttggttcttgttgctcttagctgtagcccaaggaaaacaccggtccctggaagcgcagccgatgcagcttgtggcacgctttggagtactaagtcaaccattgcctcagcggataggacgaaaccagcgaggtcgccaaccccggtacttatcctggaagccttggatattttctgttgatccttttcaaccaactccctctatgtgcttttgtcgcgcgattagatccttcagtttggctcgggggtcggctgtggagggcttatcggtctggccgccgagaactttttccagaattttcccgtaggacccaacaagatctatatcctccaactcaaggctgtcgtacgcggcgttctatagcctctcggatgtggaaatggcaggggttggttgctgtaatggcacttgcgcgcagcgccctagtaccatcaccatatgtacaccactgatctgagtcaagccggtaagcttaactcacctgtagcttttgataggaatcatagttggtttggtgcagtggtcctgcctaccgtgacagttgctctgtaaactcggttgttgttgacttgtatcggggctcgccgggaagatgggctttttgaaccacccgctgccccagttcgacatgttttcggtagagattacttgaataacgatacttgccgggaagagggatgctatagtaacagcagcgacgacgaaatttaacagtggcattctacgcgattttgccatacgacgaacacccacctacctataaggcggaagaaaccaatgttgtggtatccgctacggatcgttcagggcgggctcttattaagcggtttgatgaactggacatccagtgggataccctggagaggcagctccagacatgatgtagactgtgtcgtaccgggaagaggctcagaattcagatgtcgtttaaatacgtcgatgccagtcggtcgcggaatacgacaacgcggcggggtcccaagcgagtgttttcgtccatctctgaacagatgctctccgagcgagctatgcagcttgattccgaagaagcccccagccagccatccatttggcatgaagtgtataatctgacgcgatgcccagggccgtcctgccacctaggaccatactgctggcgtaactattggaaacaggcgctacaagttgaagacttgccacctaagaagcctcattgaatgcatattttcttgccacagccacttctggttgacgatcattgtaatctccgttggtgtaatactgtgtatatcctgccgggtacacaagcgcgtgtgagagcacacggtgtggatggttagatgcacaaatggtccgtcagtgtcaggccagtgctgtgacaataaatattataataacgctttaaacctcttttataattattaaattaaagggcgaacaaataacgacggaggtaaaaatataatcgctaaaaagatattaatattcagcgatagcgtgcaggtaattacggtaaagattaacctatatactatcggaattaaggtagtttataacgttacaataataattaatgcttcattaaatataaaccgcaaagtatactacttaacttataagttctatcgctactagagttggatataattatcttcgaccctaaggctaagctttcgcgggtaggaggaaactacgccggtagcttgggggccctactaagcgtgacgacgtttagcatccagatcaactatcgtaggagcagcgcaggtcgtgggaatagcgtaagttgtaggaaggggcacagggacgacgagcaggtgtgagcgggaaagtaaagtattaatcaaagcgcgcaaggacagcgacaggtaggagcggggaagataagtattgtcagtcaaacaagagccaaaaataccgcactgccctctatcgggccagaaatatgccggttataatgggaggctgcggcgtgagatcaagaggggtaaagccaacaagacagtgcggtcagttacaattacagaaaatagtggtgttaagccttttgcagaaactaaaaacctttaggtactaactcagtggaaaagtagggcaaaagtcatcccggaagataacattgcgatcaactatttaactagaagagcggatgggatcccgtattttcagttgtctatggtcgtatgtgacggtctgggcttcagttataccttccgccagaatctggtgaaggttcagctgagaaaggggatttcttggaattgggaaatgattagcagctttcgtggatagaagttcagtgttcaggttgtatccagttggaacagactatcggagcatctttggctccttcccaagctcgggtgcaggtttttggctcgatgcttcaacctaccagtatctctgcaatctttcttcgggaacagtttgctggtccatctgtgacagattgcaatgcacgcccgtggtgatgttagtctgatgacctgccgaagctgttcacccttcgagcatgctaccgttgtcgagatcatcaccaaccccggagttatcctcccgcatgcgtacctccccctacgaacaactccggaccaaacctccttacttacccacatcgaacgtaggccactccttcagttgtgcaacctccgttagcgggtggctttcgcacactaaacgcctcagccctacctatctgacgtgtgcaacagtaagtaccatacacatcaagacgccccttttctcccagctattatccttccaaaaccacaagcagctaagtgcgaggtcaccactcggccttttccgtgtggatgttgccgctaaactaccgtcaacggcgcaataaacgtcccacaacatatgcggacccgatccctctccctcatcgtccatctgactgattgatatctgacagaatttcggtgccacaaattttgaaccaacgagccgggtcaggtcgtacacatccccaagtccacagctaattcgccgacatttttctccaatcacttcaaagcaaaagcaggagcaaggtaaaggacaagtagtaagtcaatgtaaattttgtcaattctttcgtcaaagttctccccctgactatggcaggcctaaccccaccccctattcccatcccttgccgagtgagctcatgtctcactcttacccatccgaccctttcgcagcccaccatgatgtaagcagcctccctgcccgagttctttccctgccccatagatgcttttgatgattcaattccgtatgcaagaaagcaattgatagccaaaacctgaaaccccaaaaagaaaaagaaaatgtacaattgccccagctacaaagtaaaaaatgaagggagaaaatatctggtatctttgatagcgcactgttggtgatagccttcctctccatgttttatgggtatataggtagaacggccctgacgacattatagcttttcccctgaaaatatagtagtcctcaacgcctggcgtgagtgtgatggtgatggtgatgttaaattacaggaatagaagaatgaaataggtctggtaaaaaaatgtgatagggtaaaacaatgtgcattgaagtgaaaagggtcaaaaggaatgttaaaagggggtatcaaagaagatgagtatgtgttgggtaaaagattgtatgcgggtcggtcgtagcatcgttactcaaatgagcatgagatcgtgtaatgccaaaaaataagaaaataaagcagaaattagggcttgaacaccgcgttggtcagaaagaattcttcgctggcgggtgttggcgtcacgatgggtgatgtcgacgcagttgagcaagtagtcgtggtgggaggggttgaagaggaagaaagagaggacgaggaggtcttggactcgagtttggagaaagggatagccatcctggcaggagaactgctcttcaggaacatctggctgccccgagtgcgattccactttttcctctcgacatcagagactgggtcctccttcgccacggacactgcaggctcctcctttaccacggacaccactggctcctccttcgcaacggcctctgtcccacccatgttgctaatcgtttgctcaacgtcggcaaggagggcatacacgtcattgtcagcgtagatgcgaatcgtctccgcccttttcagggtcgtgacagactccccagtcttctctttggccgccgcagtctcctcggtcaagggatcctccatgatggttgaaggaacttgagctaccactcgctgaggagaggaggaaggcggagaggaaggcgaggtttgtgtgaaggcagtcttcgtggggcttctcggaggagttgacatgctggtcgggcaattcagggggcgaactcccatagcgagctgcagagactcgctcacactagcaacgcccgtgggtgggacggccagggtggctgcggcggcgacgtgctccagaagcttctggcggacccgcatgcgccggttctcagcgtgttcgagtttggtaacccagtcatcaatcgaagcgtcaagctcagcaagggcttcctcttgcttcagcatcgagtcgtgactgaacttggccgtccggggtgatcgcagatattggcagatccgagtgtgtaggttgcgtcgtccagcacgaagcgaggtgtaggtacggcgaaggtattcagtgcgctcatcaagctgacgaagttctctagagagattgtcgacgtcatcttttcttagtacctcaaacctagccgcctgctgaagagcttgcttgtgtaaagcagctgcctcaacagggctaagcatgttgaccgcatcacttgccttccaccctttgggtagttgctcaaatgctcgtcgctccgcactggagcttctcttggattctcctcgccgcgacatagcgcgaagagtgagatccgaccgcttccgcggccgacctctctccatgatacttcctgtatccgacacatttctggtatggccttgggaaacttgtggtgtttcgtcattgggttcggcctttggcgtggccgagggatccggtgagccttctttgggggtcccgacaagcgcatagttcgtaacacgttcccatggtctgggtgatgatcgatgctcgatgggagcggacatgggagcggatacaggtgtggggagcgtcgagttggtcatggcggtagtggcggccgatgcaggtgtcaaggcagctgaacagggggtgaagggagtcttgattcttggggagtcatccgtcctcgccgaccgtagtggcatgtccacaggtgtgctgcccgatcgaagccgattgagtgaggcctgttgtgttaaacgaggaactgctgatgttgaagctggaataaccagaggcgtgagactttttggcgataatggttgccggagttctccgtggctcctaaatccacctcgaagttcgtgtttttgttccggagattgctccaacgttggtgacaggaagtcgaccatctggttctgcttccacgatgctcccggtgcgctaatcgagcgctcatggaaaggtggtcggcctggaatcgtggctatggtggggttagtccaagcacatgaaagcactcgtgttggttgggaatggtaacatacgggaatccatggccacttcttgtacggttgtcataggtcccaaatccgggacgctaacctttcgtctgcggatgaggttgtgttccttgatccgtatcctgagccctgccgcggcaggagttttttcgcccttctccccgttttgtaacatggccaacgcaaacgcttgctcggggtccagagccttcccagggcaagtagctacttgcctctctttagggaagagctggtatttcctctctgtcgtctgctgcattctccacgcaaatggtttgatctcaccagatgaggtagtgtttagctgtgtctcgacgtgtaagctcacagccaatgccacgacaagggagggaattatgtttgggggttaaagtggctgcataccgaatcattggaagcttgcggggtgactgcttttgatatagtgttgaggctaagtgaaaggtcgtccgagtcggaaccagaaccgcccaagcagttggcaatgtgagccattggtgtggtgtgaacgcaaagccgaatctgtgtaagaggtatatagtcgcactggcccggaggatgtgatccagttaagggccaggaaatgttctaagcttcccgtgtctgtcgaccggttgataggctggaggagttgacggtatgtatgcacttgttttctccaaccaggacgcccccgagttcttaagagtctgatagaaattcgagaccggacaggccccccaaagtggataacaaaccccaggccctgctcaccaggggcaaagagttgaatcgtgtgtgacaaggaaagacaggcagagcgcagtgcacggagatgagggttggcacatggcaaccccatatctttgcggtgggggtgcacagtacagaaagctgccaggacaagacctgccagtgaggaccccttgcctcgacatctttggtgatttctcccagaggtacctctgcggcctggacacgagagaggcaccgggggaaaggggcctgagacaagccatcgttgttgtcgcgccccggtagctatccgagctgttgagaattggggggtacacaacgcacaacggcgtccgaggcgagcagtcgggtatccaggaccctggcttgacagctcaaagcggaaaagccgccgtcgagatacatgatgagacatgcccagaagaagagaaaaagctgctgcaagaggcaaagagtgatgaaaccgcttagaccagttcagggccgaccgagcatccctgctaggaagacagggggcttccaccgcagccccaccacccaggcatctcgccgcaacccaagactggacgtgcctgtccatatctggccgccgctatgaactactcctccacagatatcttccagcagaccaatgggtgacccatggctaaatgaagggacgttggtagagctggggtgcagcatctgagagtgcagcatgtgcggaatagccagcacggcatcaatgtcgacgcaaaccttccgtgctctgaagagacggaataaaataaagaaagagagggcagagccagaagaaagcagtggccggaaaatgtcctgaaagtttcatggatatctgagctttgcagttgacgttcatgccgattacctgctggtttcagaagaggagctcccgtcttcagtgtccggctgttgcggatcgataccgaaaaggttgaatcggcagtcttgttgaagatggatgcagaacctggtatcatcccttctcctcaacgaccccgcaatcagaggcttgggagctcatcggagacgggaacgcgatagaacccctcttcataacccagtgcctacccagtagttggcctagcttgagagcgggaggcaacatgacatccagcccgtggatatgtcggttctgagggtccttgcaacgacgccgggtcagtggttgctcaggaagatatcccgataccgctcctacttctgctcgacacgattcttcagggcctctctacgagtgggcatacatggtgagattatgaagattgtaacatcgcgctggtcagggtgatgggctaggccgatgcttgatggctcgcacggacctctcaactttgcgatgctgtaactaaacagctgattggtgggctggtgcatgaaggagtcgtagggactggaaaggtgaatgaagaagcctgcttgaggcgtctgagagcggctgtatcctgtgatcggttgcgtaagaagaggaacaagcgcgagattcgcaatcgcttcgcggcaatcccacgttaacggttgttgcgcctcagatcgacgtccagctcaccagtgtcatctaaactggcaccttcccggcagggcaacggtagttgatggcgccggcgatatggggacggagccatccgcgtgagctcaggcattctcttggtgtgacggagtcgaggatggacgttggcagtggggtcctgttcgaaccatgatccatctcgaggacaaacaactgccccactatgcggtccgataattgcttcacgttgggcgggagggcatgaagccggtggcaagatcgaagacatcactgaatgaatcactgtagtgtatcatggaacttgtttctgctcgaacctggcagaaattggccactgtcatgcgtccaaaaatggaagatcttgaagttgaatgacactccatggcaggcagcatggaagtgaggggtaaggtgaattgcgggacgttactagcggcgttcgtaaaaggaagtcaactcaacaccaccaccagcaaaataacctacttcgtgagctctggccgccgccgctaatcatagaaatcagttctcttgctcgttatttccacgtggcggattcgatcttcgtttgcggcatgttctagtcatgatccaggccttcttcctgcttggcttttaacggccgtcagagaagcagagaacctcatcttcgaatccgccctgcccagagacgccgcctttgcaacagcaggacaagccgctaacttgtcaatgcgcttcatgactccagcctaattcaggatggtcgagaacagaccttggaaggccatgtgcctcaagacagacacagctaaaccttgtggaccacacattcttgaccatattgacaaaggggactgacacatgtgcgttgcatgcagatacctatctacatacacatcaacaacccatctcttccctcgttggcaacgcgtagacatcacgagtactcatcttcgacatacaagcgagctgtccacaaaacaccttcagtaggatatattctctcgacactttctctagcttaatgatcaattcctcctctcagcctcgacatcacgcagcatggtagctgggcttggcggttcatctgatctttagagtcgcaatactccgactgcaatgcgagatgtctgtacagactggtttctcgcgtcacgcaagacgatcacagcgctaatggatacatctaccagatttttgatgaagctggatctcttggtagtggttctgcagagtgatggtatttccaactttgccgggcatcgcagcgtgggggacggcactgttagtgagaggcagatgaagaaagtgagcgttccccctgtcatttcatttggatgctgcaatgctgcaggttgatcgacgttggtcacccggtttctgctatcactttttttgggtctcaagtcgtttttcttgcatgcttatgttgcattcaccaccatcaccctgcattaaatgttgctttcgagctctctttactacagcaacaaccctgacccttctggcggtgagcatttgaagtcacaatcactcaaattaccctgcgggttgcagagccacgagagagcaccaagagcttgcagaagcgctgtttcttgccatattcacgactttatacagcttatacgagccatgtagcgttgacaaacggacggtactcggaatcaaacaaaccaacatcattcagtttccaccagtacctactggcaagggcaaagggtataagtggagcgatcaggtatggcccatggcgcactggaacccatcagcatctgatatttgaactggcaaggtgctgtccaatcctttgtattagcatgctacatttaccttactcaccggccacaccttagaccttttctacagacaattgtggaatacatgagagctatcgacagggcattattttgctgtggtgttttcgtacactgatacctacctacacaagtgagtacatctaacggtcagcaaatcctttcctcatcgggacagctgggctaaccgaccgcggcaaagtcttgcctaactcggggggttactcaacccctgaaaagattttggctgtggatcttctgaagccgcgatctctccgagatcctcagggatcatgttcttatgtcacatacttaaggacagggggccgcgctcggtctcgacaatccacagaatgttgctccgatgctcgcggggctggatgctgttgctccaaagcaagccaccgagtctacgcgcgatgaagcgcacgccagaccaacagtaagtaaacacattcagaagcttgagctatcgtataacaactccaagacatttaccccgaaaaatatcagaaacaaagcatgcaggtcaaactcggcagaaacgaaacaaggacccaagcttttcggaagcggggcaacgaggttgagaaacactgtttcatccaggatgtgctagagactggggctatcattggtcaagtggccagagtagctcaactaccaccaccccttctctcgtcctgatatcctattcatgaatagcctcataggcttgaacggcgccattgacgaggcaaagcaaaatccaggtagctttgcacgggatcaacgcggtttgatatcatccccttggtctagtccgagccttcgtctcaatcaaggacgggaagggagcactttgcgggaaatggatgccctcttcagtcggtcttcgggctgggaaaagagcaagaggtgcaatctttgaagcaacgcacaggtcaagcgatgcaagcactcaaagtccgcaatttctctgccgtccatggctatagagatcgcaaggccgtgcgcactcgtcgacttcacaaagcagcgcacaatatcagggtgagggagcaaagtgaggaggatgtctcggtagcattgtgacgcccatcactttcccacaatgtgtatctgcttgatcatgctgtagggcaggcgttatctcccttttctgcccaaactccgtgggcttttcgttacccctgtttccaatcgtacgattttgacgaagcttgttgcagtgacagtggacctttagttttttcccccctcattttgagatcacagattttcgattactgttacaaaggaaagaaaaaagaaactgctattaataacaagcagcattatagcgcacctcccatgcaatcgagaccccatgaggggcctggtccattctaacgcgagtcacgcacaagggcacgatatatcctgtgatcaccaaggcatgcgatggttgggcattggtatcgttgtatcgcggcatcacattcgagcatcaccacttttgacagcttgacaccatcactatcacacggatgcaggctgatagcaccgtgtctgttatagcagtctgctaaatcttgggtgaacacatggactggttgagagcaacaattgataacaatgatcgagactcgatgtgatgacgaacagcaacctgcagaaaggcctttaatatgatcagataaatggctcaagatcgtctggatctgttgctgttcaacatcttgaccctcgatgggatggccaaaggatccgagggagtcctggactgtgtcagtctggcacagccatcatgtgcagacatcacataccccaatcacttgcatcagcacacaatacatctatccatgaggcccatgcatcgttcttggtgcaggtgagcaaccactgtccgcagctttgcggttcagtggaaagcaatgctcgctttctgtactgcaagaaaaccccagcccaagataatgtttgtttcttttgtggtcaagtttgaggtgatgatcgctgacagataccggtcactagcttgctaacgtcatggatcgtctccaacgggccgggagaggcgcagtttacgtttcacctgctgggcggtcttccagtttgtttctcggttcttgaagcttcgtggttggcgttcaccttcttcacaccaccaccattggcgatccggaccggcccttttctgtttgacgttcgccggaggttaagtctggggaataacgaccagaaccatacgaggagcccatccaccctctcgggtcgagtctcgctgtctcaggacggggatcgacacgataaaagctcgtcttaagacgcccatcgcggcacttttgggacctttggcaatcatttgatggcccagctgtgctttgtcacggaatattccatacaccaccttccccatgcgtcgcttgcgatggtggtggtcgttgctctggtcttgaatacttgacagccccccattggtcgcttatcgccgcggggaaaggggtgacagggaccgggcctgcggcacaaccacgcctcccagaacccaaaacactggcttgggaaccctcaccaagatcttattcagcagatcgtttggaatttggggggagcgctggtgataggacaaccgatacgaacatattgttttcttttgcagacggggttgaagccctcggatcgtaagcgatgctgctgctggtaagaggcatcgccgacatggttgacgctgatggtccaaacaaactcaacagggggaccacgtttcctctccaaactccatctgatctatgtacgagcagtgcgacgatgagggtggtcaacgtgcgcgcttcaaagggaaaggtatgttacaccttgagaagatgacgagcggcccgtcattcccttcaaaagcagtgaacagatacatcccaatctgcagaaaagcaagacataaatagcttcatcgtccgagcgggcataccattttctgcaagcacttgaaccagctttttcgctgtgatgttgacctttctttcatcaacacaccggccgtgctctcgggcgtgctccgactgcatgttccttcgtctgcgccgcacagaatatcgctgcacgagactagcttcgcttcgatgcgtgttgcaaggttcctgagacaacagcgggggagaaagctgcctgccaagcatcacctccaaggtccttcaagatcggacgaaatgcctccaccctcaccacgtttttctttagtctcgaaacaaacgctagtgaaagagagagaaaaaaaaggtttaagcgcgaggggggcctgatcggaatgctcggggaaaagaagaagaagaagtttagtttaaagcgagcagaaaccgggaggatgattcccgatatttcggctttcggccgacaagcactcaatcggcggttgtctccgtttggcaagacccggccaccgcggcgctgggacggtggggccccgggagctcttccgcgctccatccagcaacggcggggtcaagcaactctgtttccaaggcttttccccctgctttttccttgcccggaaccaccaatgttcaacaggaggacaacggcagccaaacgcacgaaatcttgttcccacgtcgcaacgattcgaagtgcccaagagaaccactgccggcattcgctgctacatacagcaggcagatatgtgaatccccaaggatcatgttgcaccatttgctatccagacatctcgatgtacggtacggtacctactgtctgcctgcgataacaactcactccacacgatctatcattgatgtttcgaactgtcaagtttgcggtgtttcaaaactccaaactttttatcacctgaccttggaagaagcattaatgatatttcttgatacacaatctccctgctccgaaattgcccgtatgctagtgtgggttttactaggttgtatccaaatgtatgttgggtgcttttgcattatagcccacgagatgatcatatcatatcaccaggtggcatatagcattgacacagggtctctgcaaagaagatttaaacattgaaacctcacaatttacttgcaacatgacgcggggaatgctgcattgtttgaacatactgctacggaacaatgattaagaggcgagtgccgtcagacaaccccctattagacccttatccagaacgatgggagatgatgtcttggtaaaaagcttctatttcttatcaatggttgcgataggtgttgatgagggaaccaccaagacttcttagagtagggagcagagggtatacgggaggtgttatacgtatgcaggagggcaccattggaatagcctcaaatggggaaaaataagcacgttcccgtcgatagaatatcacctgctcggaacgacataggaaaagcttccaaacatactctgtcaaatatcttgagtggtatttttggcctaagaatgaagagacatttactacccgtgacagcctcgttttccctcgatgctgcgaaaagctcgttgtcatgcaaagtggacagaaagagaacttagaaatgcttatatttgaaacaagcctgaacctctacatccatgggctaccatgggatattaccttcagttatgaactatactcatcaagggagatagtaagcatctgaagcatcagccttgagcatatggcgcatatgtctcgaccccggattattttacactgtgacatcgcctaacgtcttgagcggaattccaagaccaaagtcaacgtagacatgctcgcaaatcttgcttcaatctcaatactagaccaagactcgcatcttggtgtcacagagcagttcccagccaagccgaagagaggccacctttcaactcctaaagtagcaagagtagcggacccaaatatgaggtatcgtgacatcgccctttacgaagtgtggtctctatcccccgtcttgcatattgtgggaggtgtttgaggtcttcaaacgctggttgcatacttgtacatgttgctgagcccttttggacatcatcagattggatttcctgttgttacacggtgaatcaaaaccatgaagcttcagacactgttgaatgacgagcatgtgaaggtcatggtagctctaccatccagcagacatcaccacatgtgcctggccataccaacacaggtaggtacgagactcttgagcttagtccctattacccatatcaccatacacttcaccaatcccatccaggtagggtatacatgcccacaggtaaagcaattccaaggaatggaatcatgtcatgaacaggctgttactctaccacaatacagatcaacatgagcacatggctctccgcattctacgacttgtcactgcagcatatccccgacttacgaggtaagccgtcttggttgcggtcgctccacgctgtgtcggcacttgggatcgtaacctcggagctcagttgggcagtggagagaagatagcagtgatgtccaaggcaggtggttgtacagtcatgaagttggggcacaattaagacacggaggctgatacttgtcttacacagattataactcgtttattgggtatgaaataggatgagaacttcggctcggctgggtgaataccatacattatccttctcgaacctttgaacaggagggtaaccacccgcctgtgccttgtttcagcttttcaggtcaaaacttagggactgagggtcgaagttcaaatggtttagaagtctgggatgagatctttgctagccgaatggtgctcagtgtttaagttgaggattgtaagaattggcgaatcagatagcgctcctgacccaagaagcgggagagataatgggtgcttgggactgaaacatgtttcgtgtggaagttcggatgagtgagtgcggctcggaggtaagcttccagagcttcaaagctctcatctggtctccgtggaggtaagtgcatagttatcattccgaaggagcttattaaatcaagaaggtgctgaaaataaaacatgtctcttggcggttaagtgatcttatttagagagtttgtgtaagatcttgactttgaattgaggtcaataactgagaggatgaaaagcgaggtgatcgtgatccagtgacaaatcacgtgctccacttttcgacgtcacaccggttgtagcctatcagcttgtcgcaattgtgcccctccattcctcaaggtgacgaactaggaaggcgtgaggtaaaagggtagctcaggtcaggcatcaaatcaaccattgactttggacggaagctcctcatgtggagttcgctcttccgacgacaggcggggaaaacagccatcaccaccaccaccatcaccagaatcacagctcaccaacaacaacgattcgtaagccgcctcacctacacaaacggcaccatgagagatccgaacaccctctctaattatgatgcctggcgcacccggcacaccactaccaacctcaaggtggatttcacttccaaatcccttcgcggcaaggtcatactcgagcttgagtctcagacggacgagagcagcaaggagatcatccttgactctagctacctagatgtttcagccattaagctgtctggggagtccaccaaatgggagatcaaagaccgccaaggagccaacggatccccggttcacattgccgtccctaacggtgcccccaagggagatgtcgtcaaggtcgaaatcgatgttgctaccacggacaagtgcacagctctgcagtggttgactcccgcccagacgagcaataagaaagctccgttcatgttcagtcaatgccaggccattcatgccaggagtttgttcccttgccaggatactcctgacgtaaagagcacctataccttcaacatcaccagtccacatgtcgttgttgcgagcggtgtcccggtgaagggcggtgagactgagggagagggcgacgagaaggtttacaagtttgagcaaaaggttcctattccatcgtatctctatgcgttggcctcaggagatatcgagagcgcgccgattggaaggatatcctctgttgctactgggcctaatgagctgaaggcttcgcagtgggagttggagggtgatatggacaagttcctggatgctgcagagaagattgtcttcccgtataagtggggagagtataatgttttggtgttgccgccaagcttcccttacggaggtgagtgatggttgaactgttggtagcatgacatgcaaggactgacatatggtaggcatggagaaccctatctttacttttgctacaccgacgattatcagcggcgacaagcagaatatcgatgtcattgctcatgagctggctcactcatggagcggaaatctggtgacgagctgcagttgggagcacttgtaagtcactgcgagcacattgggaactattctaggcctgcttctaactctagcgttttagctggctgaatgagggctggaccatgtatcttgagcgtcgtattcaggcttcgattcacggtagtgaggctcacatcgatttctccgccattcgcggatggaaagcccttggtaagtctcgaggccatatactgcccggtaccttgctaatatcgtctagaggagtccatcgaagagtttggcaaggatcacgagttcaccaagctctgcatcagccataagggtattgatccagatgatgctttcagcacggtgccttatgagaagggcttccacttcatctactacctcgacaaacttgtcgggcgtgagaactttgacaagttcatccctcactactttagcaagtgggcgaacaagtctcttgactcgttcgagttcaaagataccttcctcgggttcttcagcgccccggaatacgccagcctgaaaaacaagatcgcggagattgactgggagggccgcttttacaacactggccttccaccaaagcccgagtttgacacatcgcttgttgatgagtgctacaagctggcagaaaagtggaagcagaaggatttccagcccagcccgtcggacatcgagggatggactggtaaccaaattctcgttctgttgaacgaggttcaagactttgaagagcctttgtctgtcgagcagtcggtatgttctgaacagagtactctcatttcctggtccctattttcgcaagctgacacaggaatagcaatccctcggcgagacttatggcctgacagactccaagaatgctgagctgaagtcggcctattaccacatcgccatgaaggcccaggataccagctcttatcagggtgtggctgaccttcttggggaggtagggcgcatgaagtttgttcgccctctgtaccggagcttgaacaaggtggctcgcgaccttgcgctggagacgtttgagaagcacaaggacttttatcatcccatttgccggcagctggttgagaaggaccttggagtggctagtaacagtgcttaagccattctatatcaggctcgaattaccaatcaatgaacccaacttcacggcgtagccaacgaaacagacatttttgcccgaaaggccaaaaacactccaacattttgtttgtagcacaatatcatgttttgggtgtggtattccccgaaaaaatatcagccgctacctaaaagcccgtggagccttgtaagagacagggaagagggtgctaaatgaaagacatgcaggtacacagaagctatgatggtatgttttgagatgaataaccaaagatctcgtacacatgaactgctcatttgatgtacaaaacatgatcaccggttacttacatgcgaagaaaacttaatttccagccatgacgaagctttctgctgtccaataagcttcggccccaccctccagaccagtttgtcaaccctggttcagcgtcgagttccagcgagcgcatgccgctggcagcgttcgcgctgtcgcgttctgtccccgagttttgttgacacggaacagcacttctagaaatcccagatcctccagagatcgccaaccaccccgacagacatagacgaggcgcacagttcccaacagccatctcctcagtagcttctgacctgtcgcgcgcacaacacaggcgaagcttccaaacatcccttcgcgcaccgctttgactcttaaccacgatacctagcccaataactttgacaactccattttcctctaggcccccgcgcacctcccccgcagacacgatctcgataaagaggtccaccgtccagccattccgcccagcattcccaccaccatacctgcaccgcagtaggaaacacgacgataaacccctccttgtttttggcgtggtggaggatgcgcgcgaatgttgttttacagactgggaactacatgctgggaaataccacgagggactagattgctcgattagcgaaacccatccgacgagctgtttgtccctccacctcagggccacaaaacaaacacgcacgaagaaattggaggtctactttgtaaagaggagatacaccacaagttctaaccatggcaccgggcgcgggccccgcggggggagggggaggaaatatcaaggtggtggtccgatgtcgtcccttcaattcaagaggtaagcgaccgcctcctaggctacaagagtgcatatggagatggtgaactgacctctcacctcaagaacatgaccgaaacgcaaaatgcatcatcgaaatgaaaggaaaccaaaccatcctcacccctccagatgccagcgcgggtggagggaaattaagtgggaaagactcggctcccaaagcgttcgcgttcgacaagtcatactggtcattcgataaaagcgctccaaactatgccggtcagaaccacctcttcgatgacctgggccgaccgctgctcgacaatgcctttcaggggtataacaactgcatctttgcctacggccagaccggttcgggaaagtcatactcgatgatgggatatgggaaggatgcgggtattattcccatgatttgccaggacatgttcgaacggatcaaagtgatgcagcaggacaagaatttgaagtgtacggtggaagtctcgtatctcgaaatttacaacgaaagagtacgcgacttgctgaacccagcgaacaagggaaatctcaaagtcagagaacacccttcaacgggtccgtatgtggaagatttggccaagctggtggtaggaagcttccaggagattgagaacctgatggacgagggtaacaaagccagaactgtggcggctaccaacatgaacgaaacttcgagtagatcccacgccgtattcactctcatgctcacccaaaagagattcgatcctgagacaaagatggagatggaaaaggctgccaaaatctctttggttgatttggctggttcggaaagagccacctccacgggagcgacaggcgcgagattaaaagaaggcgctgaaatcaaccgatcgttgtcaacacttggtcgagttatcgcagccttggccgatttatcaacgggcaagaaaaagaagggcggtactggccaggtaccatatcgcgacagtgttcttacttggttactcaaagactcgctgggtggcaacagcatgacggccatgatagcagccgtgagtccagcagatatcaactacgacgaaaccctgagtacgctacgttatgccgactctgccaagcgcatcaagaaccacgcagttgtcaacgaagacgccaacgccagaatgattcgcgagctcaaggaagagctggcactgcttcggaacaaactgggtggtggtggaggagctccagggatgccggtagaatcatatccagaaggtacgcctctcgagcagcaaatcgtcagtatcacagcaccggatggtacggtcaagaaggtctccaaggcagaaattgcggagcagctcaaccagagcgagaagcttctgcaggatcttaaccagacctgggagcaaaagctggccaaaacagaagaaatccacaaggagcgcgagtctgcactcgaagagcttggtatcagcatcgagaagggcttcattggcatgtcgacgcccaaaaagatgcctcatttggtcaacttatcagacgacccgcttttggccgagtgcctcgtttacaatctcaaacctggaatcacaacggttggcaacgtcgagtctaacgcggaccaccaagcaaatatccgtctgaacggctccaaaattctccacgagcattgcacctttgaaaacgcgcctgatgggaccgtgacagtcattccgaaggaaggagcggccgtcatggtcaacggcaaacgggttacagaaccttatcagctgcactctggatatcggattattctaggcgatttccacatcttcagattcaaccacccgctcgaagctcgtgcggagaggcaggagcgagcggacaagagtctgttgcgccagtccgttaccgcaagccaactgcaagcacttgagagaacgtcacccacacccagccccagacctggccatgacaggaaccttagtacagccatctcagactttggtgggagccgcccggactctccctctccatttatgcgaaaccccagggaggcagattggtctttcgcgcgcagagaggcggctggcgccattctggggacagatcaaaatttcgccagtctttcagacgaggagctcaacgctctctttgaagaagtgcaacgagtccgggccgaacgtgtcaatggccgcgatgacaacgaggacatggagtcgatggcatcctttcctgtcagggagaaatacatgtcaacgggcaccctggacaacttttcgctcgatacagcactaacgatgccatctacccctaagcagggcgaggccgaggacaggctgcgtgagattcgcgaagagatgcagacacaacttgagaagcaaaaggaagagtttcacgatcagatcaagagtgccgaagcggcaaatgtggaggttgccgagatcaagaaggagaaggccaagatggaggagactctggtcaagatcaaggccgagatgcaaaagcagcttgaggtgcaaaggcaggagtttgagaagaagattgagaagttagatcccctcaagagaccgaagcccaagccgagactctcggaagaggagattgaaagagccaaggtcgcggtcaaacattggagggggaggcactatgtgcaaatggccgaggcggtccttcagcatgctgctacactgaaagaggcacagatcatgagtcacgagctggatgagcatgtcgttttccagtttacagtggtggatgtgggccacatgatgtgttcgtcctacgacatggtccttaacgggctgaccggcgaaggggaagatcccgcactcgaagatgcacccaagccgtgcattgggatccgggttattgactacaagcagagtgtggtacatctatggagcatcgagaagctctacgatcgagtgagacgcatgcggcagatgtatcagtacctggaccagcctgaatatgcccagcatctcagtttggacaacccattcattgaggactgcatgccgcagtataccctcgttggagaggttgacgtcccgctcaaggctgtctttgaaagccgagttcaagactttacgcttgacgtattctccccatacacatcgcacacgatcgggattatcaagttggcgctggagccgtctagcgcgcgagcgcccaccaacactctcaagtttaacatcgttatgcacgagatgcttgggttccccgaacgtgagggcaccgaggtgcatgcccagctattcattcctggcatctccgaggatggcatcactactacgcagatgatcaaggatttcgacgagggccccatccggttcgagagcgttcatagtatgagcgttccgctgttcgcgccaccccagactactcttcgcgtggctatcttcgccaaagtgtctgccatgcacctcgacaaacttctcagctgggacgacatgcgagacgctgtgcctgccaaccaaaagcccaagactcctaggatcagcgagactcagttctataccgaagagaagcatgatctgctcacccgagcgcagatattggagctgaacgaagagggcgagtacaagccagtcgaggtcacgcaaacaagcgagatggacaatggaactttccagttgcatcaaggtctgcaacgacgcatttctctcaatctcactcacagctctggtgatgccctgccgtgggaagaggtggccaacatgcgagtgggtaagatccagctgctggatagcgctggaaagtcacctgacatgggatcttctggccccgacctccatctcaagttggcctccaaaccagttttccggacgaatgccaatggtaccagaggcttgacgatcatcggtcagtgggactctagcttacacaattcgctgctactggacaggatgacttcggagaagtaccgagttcaaatgacggtgtcctgggagattttgtcagagaagctagcagagccgatgaagttttcaatgaatctctgcgtacaaattgtctcgcggtcgttcatacgacaaacatcaatgttttcgtcgctctggcaaaacgttcggtttgtgcactcttgcacagggatcttcactcttcaaatgcgacctgcgcctattaagagggcgggcgacttgtggaggatgaatagtcagcatgactacgtcaagggagaggagcttcttacggcttggacaccgaggggtgtatctcttgtggcggactttattggttcaaggaggaaaaagcagatgatgagtgagatggcagttatccagtcgctgatgaaaaaatatggctatagggagaatgggcacctcaacgggaatggaatagacggtggaaccgacgatgaccttttgccaccaccgaaaatcaacagcgatgctgattctatcgccgagttgctcaaggatgacacacctgaggtatcgccgactacatcacctgttatctctcactccgagctcgccaaggatggggaagaaagccctgaatcaagaacgaccgaggagcccacaccaccactggaggaagagaaaccagcatcagagtatgacgacaggcaaactgccctgttaaacaaatgtctcaagctctggcagcgctacccagactctacgctcaaactcatttcaccggaaaacaccgatcctccagaggatggtgttgcaactgaaaacaaccccaacggcaatgggaatgaacaccattacagcgcccccacctttgtcgctactgtcatccgggtccctaagaacccttccgtcctcaaaggcggttatctcttggtccccaacgccgactcaactcgctgggtgaagcgcttcgttgagctccgtcgtccataccttcacatacactccgtcgccgacggagaagaaatcggcattgtcagccttcgaaatgcccgggttgactcgcaacctggtattcttggcctcctacactcccatcaagactatgaccacaacaactttgaccctgacaacgtggctcaacaacaaagcggcggtatcgtaggcggcgtcgcgtccacggctacaggtttgatctcgtctttgacaggcacacccggacaagggcaagggattagcaggctcagcgaacggctgcaagcaggcgtgtttgccatttacgggacggataacacgtggctctttgcagcgaggagcgagagggataagctggagtggatttttagaattgatcagagttttgcgcagacggggagcacaccggccgggagtgtgatgggtgccgggagcaacagtgggactgctagtcccatgccgaggtggtgaagaagaagcgcgcagaggaaagagcacaatcggataggggtggatgggatggtaaaaagggagatacccaggactttttatttctttcctttattttgttgacttttcgtttatgaagaacctggattttcatgagctgctttcatcctggcaggagatgacacactggaggggagaagattttgctatagatggtttcgtaaagacggtggcatagaaagagctccctttttgtttgttgccagactcatgatttgtttttttccctgttggtacatgagataaatgtatatagctaggtgaggtagttagaagcatgcttttgcaacacgcgatacgcgaacaaggaaacatgtgacagagggacggttgattgttaaagcaggataaggtagttaggaagggggcagccagggaaatgaattgggatgtaaatgaggttatggaattgagcgagatacctatcatgctttgaaaagttgtcccttgggtgtcagtgatgtctcgttgtttgctagcagcggcccatcatcccggtcttcagcgtgtacatatggaagctggagagagaatccaacttgatcaacttagtttctgccctcaaccagcacatacgaccatacgcaggtgaaaatacgggatcccgtccgctctcccctgatcaaaacagcttacggccagaccagtactcaggtgggtgaccactggggaattcctggtgttgtatgtttttggaccctttttgggtccacttaaaggtcatcgcgaggtcctggcagcagcacattcgagagttttgaatgggtgttaaaaagatgatggttgactcgagaatgtgcattatataatattcattttgaccgatctgatggaatggttccacgagaccagatgtctaaatctcgagcttcagaaaaagtctgggttacgtttgtctgatgacgcttaccggagcttggttttcggttttcaaatccctcaagaaattggccgcttgttgtcgatagatcttgcttgccagtaatcctcgcacatcatttaggacactgtcagtattatgagcaatcagcgtacatgcaaatgcatggacaccctcactacaaaatagttgatacacacaagtaggttaacccatatctattgtgaattatgcgttaaaagatggccattacgcttttacagatagtaataggtctttaaagatagttaaagtaccttttaatttaccttcaaggtatagtttacaatatcctataggttaacctacttgtgtgtatcaactattttgtattgaacagagatgtgggttacagtattgtattctacacgctccggtctttttccattttttttcgctagctagccatactcaatcaacatcaccactacgcccgctcccacccactacactcctcattgctttcatatagacgactatgccgagcccctggatggacgcttgagagctctgccaagaaaaagcatcctaagcccgcgcctccaagtattttgctgccttttcccaaacagcctggtcattggccgagagctcgctctgaggcaacgccttgatacccgcataaatagccttgaagaactcgcaggcaatctcgaggtcttccggaaaggcagtggcgtaggggatataactggagggaaagttcttcttcttcttggccatctcggggtcgttgggattgatctcgtcaaaaaacgtcttgacggcaatgccgagggatacgtcgggatcgaaatggaacgggaggctacaacgtcaaagtcagtacatttgggtgtagaaatgaggagagatacccatcccatacctgttgcccaactcccagttggcgtctttccgccggtcagcctgagcagccatgaatgtcgaagccaagatcgcctccaccaagtcacggtctgccgcccgcacctcggatgccaacgaacggaaagccagcagactcttgctgaggggccccgtatacccataggattcatgccgaagtttcagcaggcacgcacacctgctgatcaacagcaagctcaattggtcgtcctcgctgccgtgcatgggtaagccgcgcaactcttcatgcttgttcttggcatttaacaagtcgaaacgaacgagctcaagagcgacaatgatggactcataaaggtgtggtaccttccagtacctcttggctgttggctgaagtgcagtgagagcttgtgataaggccttgccccagctggtgagttcgtgtttattgtcaacgtagccccgaatgtgaagaaaccgccagatggagaaagatttgatgaggtcagggctcagattcttcacctttttgtccttctgagaaaaggtggtggcaacgaactctggcttctcaagcgccagaacttcagaaaagatggatccgtggacaaaatccgggaacaacttctcgactacctcggcggacactctccagcttttccactgctccaggtaagggccctggttcttgaagtcccacaacttccgcttaaaatcccgatcaaaccatacgcccatggtgacggtgctgtgtaagaaggcacggtgaaggcgagctaccaccaagctcaaggcggcttctttgatctggggagtttgttgagtaaccagcttcctgtactcaggcgagaccgtcccatccagggtgggcaaaacctccatcgaggccgacgtctgcttcttagaggcttcagcctgagtaaaagcatgcgtgatggggttcagaatccgtggcccaattagacctgtgttcaggtaatggaacatctcgggcggaagagagaggcccaaatactcatagttgtcttgggtaagagtgtcatagttgtgaacggttatttctccgttttccttgatgtaggtgaagtggtcaacaagcattcgggccttgcggtacttgtccaaccagttgggatcctgtgctttgagggtatcggcaaaggtgatgcagacctgcgtcacatccttacgagcgactcgcaggatgttcaaagcatcattgatgttggacggttggttcttgatgatgttgccgtctgtaagggcaggaaaggccggtagaaacgacgtgcccgccatgagcatcaggtcgacaaaagtatggtgagtgacgttgaggacactcaacagatgagtcttggaaactgcgcggacggttctagtttcccagtcgatgcttctgatcacgcagtcattgatggggtacatcaggagctcgacagaccccatgacaccaccggcttggtccgagtcagtcatatcaaacgaagcaatcttttcacacgacgtgttagcaagaaccttcggtaggcatcaggcaatccttaaactgctcacctgagctgcagcgttgaagggcgccacaagaaagtgaagctttctctccttcagtatcccttgaagaaggcgatagaagttgtgaggatgaaaggcatctaattcaattagctctgagcgagacatgtcgccttccctgcgacccttgggttcaggtcgatttacatactcgtgttctcgccgaatgactgaacggcagcatcagcctggccattgaagtactgctcccaggccctgtcggtttgggcaatgccttcccgagcacgtctgatgttgacctcatcttgacccttgagattttggccatcaaagataaagaaagggataacattgttggcctgccattggttaagatcgttctcaatgcgcgactggataccggttacgcccccgagggccgagaggaggggttcgctgggctgtgaatcgagctggaggtggagatagtaggtcgcgtcaactgcgatggcgtggtcctcgagcatcgatacaggatagctcctgaatgaaagcaggcaagcggttagcaaaggtgctcggagaaggcggacgaaatggaattgacctacgccacctgggagttgatgtacgcatcctcaagaagagcttccatggctgattagtgaacggtgctttcaaagtagaatatataagaaaagagaggtgaagagacggggatccgtcgttgggtttgttgccgtaggcgccgaacacaaagatacgagacagcgaatggctgggggggtattgtcttgtgttgcgtacggtatgcgatgtgtgcgtggaacagcggtggtgtcacagtggtgggagagcttgtgatgcgtcactccccgagctcgaggatgcgtaaaggtagggcaggttgttgtttcgcaacgataaggaaggtacggcgtgcgtggagaggtaggcgcagagcttggtggcagatggcggcggggtaggtgttcgtttcgtcgtcgagagtagagcgcagagggcagaaagagggcaagagcagtcgagagaaagaagtcagatcgtggacttactcggcatcgtgacggtgcggcgatcacagcagcgatcaacaacgagtcttgggggcagtattcggcgcggcaacaatgacagagggggggggggcgtctatgagagggtcccacaactggcggccaaataacctttccccaaaagaacccaagagtcgcaaagctggggtccctttccttcggttgggctggagcaacttcgtaagaggctctcaacgacaagatgccaggaacagacttaatggtggagcttcaacccaaagcagagtctggctgggctgaccagttaggtagattatggctgtggaattcgggtatgatcaaaaaatcgtaaagtgaagaagaagattaaggaacgactcgagagtttgtcaaccacaaccgcagaccatcatctggccggaaatcacaaggaggggtcgttgttttttccttttctcgaaagaggcgtgaggctcaggaaccagaagacgctttgaaaccttgctcccttttccgtgtggctgattgctgcagattgacaggggcccgagctcccttcaatcaatgggtgcgcactgtgtagacacactgtgacccctgagatgccccctttccatctagctctcatggattccaacattgaggatctgtactcaggcatgattcaaaaatgtatgaacgcaaaataatagaagataccttgcctactcagtcaaggactgcgcctcagcatcagactaggtgttgagacccaatcccatttgcttactcacacccagccaacatttcaaaatattttccagaagcctcgaagcctgcaatggaagccttctacttccaatttctcagcctgataaatcagtccaattggttttgatttcaacacccaccatcaagttacctaaccactccggaacgtaaccgttaggcgactcctcagtgactaagcccgactacctactgctgcaacctaggaggccatattattcaacccccaagttcatgtaataccagcccttttgtaatcgcctaccgtctttgtggcaaatgtcccccggattctcaccgcttcattggccttgtccgcagccggtactatctcagtcaagactcacacccacacactcagccctacccgcacaccagccgtcttccgcccttaaggctgaccaactgccatattagtgccctcatatcttgagcccctaaaaggccaccatataccaacaagagtagagctccaccataccaaccctcaaagaaacacatttgcctatgaccatctagaaccatctagacctcatcaacccccaaagcagcaaagttgcccaaaaataacaacctgccggcctagatctagacccggccagcccgaccccaacgtcgatcaagcgacaagaaaagaaaagattcccgcgcggccaggaccaggtcatgagtataggtgtgtgtggggatatatgcgtggtcgaccggcctagccgctgaatcaaggtcatcaaatgtacggttcttcattcgacccactcgcacaacaagaatggagtgagagccgttattcagcatccagcatgatatcgccggatgcctgatcgaaacccgccaaatggagataagcccaatggtggatggacctagacttccacgacttcgtagattcaagaccattaacgttggctgtgtagaagtactcgcaagttgaccacccaagccctggaagccatggtataggacactggtagctacccacacacctaccggtgacgagatccattatccggcatctatactagacagtccagcctgatatcacaaggcccgatgcctaatgagcgtccatctcatcttccctagagtcgtaacaatgtcggtgagtctagacttctgcaagtcattagtttcaacatcacaaatgttgataggcatatattcagcatagcaaagacgatctcttactcagcaacctccttgatattgccacatgctgacctcaagtcccagtttacctcacgaaatccaccgaaccgacaatgtcgatgacaacgacgacgacgacgacgacagtagaacgagcccagagttccgcagctcggttaccacaaagccagtagaatgagtccagactcctgcaactccgtgactcagggcaacgctagaccctcaacactttcgagacccttcaaatctatgaaactattgttgacttcgtgataggtcgacacataagtgaaaaaaaaagggggcaatgaaacagcctggctgcctaacccgcgctcggcgagccggaataggaaggcaacataacacaacacaagataaaccaaacaaacatacatctcaaccaagaaagcctagcccacctcgcctctcctgtcttccccagacctcccacacccatctccacaccccaagaaatgtacataccatagcccagcaaaacgggaaaacaaggcgtaggtatccgccctcaccagcaacatcgccagcctcggcagaagtagctagcaagctgaactccccccgtgagccatccaacctcgtagtcagcacccggttatgtcatcatcaactcaggcagaaactcgaacacccaagcatcacatccaatacatcccatcccaacctgccggcatcaataccgccacaacaatcagtcagtcactcctgatcgaccggtcctccccaaaagccacgaaaccatcccctccgtgtgctccatccgatgacgaaaaaaaacgtggcagtgaaaccatcacttttcgggcccgtcaagacacccgggcgaataagcctctgtcaacaggaaagcaaataccgggcccgtaaaggtgcggtgtggtgagtgatacaaactgtaacaacagccacgccagagagtgcaactctgggctgtcccgcaccgtaatatctagaatgaaaggaccgatagacattacagtgcaatatccccaaggccaaccagctgatcaagtgtgcagctccccagccttcctggggaaaaagccctcttgttcatctgtgctgttctcaccgcgccttgcaccaatactagtaaactgcgcccttgatgaataggtaaaatgatagttgaaaatgtgaaatttggatgctgcacccttacgccaagaaacttgtctcttcgattgacaggtacacttgcgagattgatcccgccataacagcctccgatatacaccgctacgtcccctctcgcagcgtcgaaaaggcggagagccgagaacacgggacgttggggtccgcggggctcggcgaggaggccgcatcctcttgcatgctctccggcttctacagccttggctttcaggcctcccttttcgcatctcatcctctcgcaaaggaaaaacagatgactcttctttcgggaacatgttcagctcaacatgggtagaaacaacaacgctcctgcgttacgatggctggtaggtagtgtcattcctacccaagcacgtggatggcaagtggaaatactagggaagcagctttctgtgtagttgttggttgctctgtaccacacagcctgccgctcccgaaaagaacatgagatggcatgtcgtccaaccgtccaattgtgtgcccttgttcgcttgtaaagagccgtcagagcaccagtcttggcccccacaactcacttgatcgtagggctgcagttggatgtcgactcgtttcagaaccaccggacaccgcagccgcaaaagggaatttattcgcaacctagaacaagctgcactgcaggttcggtccgagatgggagatgagtaacacggtgatattttggttcgatgcccgaatcgccgtcttgatatcaaggtaagcaagatagatttggaagaagtgctgatggtcaatgttattctgaggcatctttatgtggaagcctggaaaggcctaacgcaatgagggtatttgacttccggagctcaatgccggtgaccaatctccgcgccaagcttcaaacgttcccgggatgacgggcgggtagccgggcatttggttctctgggaccgtgcctcaagagagccgagacaaaatgtcccggtaaccaggggggagggggccatccatgatcatggtgcgggacgaggggggggcccggccctctgcttggggtccctctcgtctggatcgcacgtggcaccaggtaccaccataccgtaccgaccaccaccatcagtgaagcaaacccgcaataggcaaacttattcactgtcgcttaacccaggcggcaaggtcacagaagagccgcggtctgtacgacccgacgaatatggtgtggtgtcaacatcagtactcccccctaagtctgcagatggaaatagtctgaaacagatatgcatctcggacatgatcgcaaaagtcgcagccgtgatcaatattcccagagcgataccgagacaccggagtaggttgaaaagtgacaggttgagcagtgagatgtcctcaacaatcatgaccaaagattcttggctattcggcaatgtattccccggaaaccctccctgattgtgccactcggttgtggtagcgggacctccacgtgctgacagtcagcagcttggtaaccgctcgtataattcagcatcttgattgcttcatgacatgaagttgtcgcggtctggcggactttgctgtttccgatcaggaaactgacggcccgaaaatctcaccggaaccaataggtctggctgcggctggtatggtcattattccgtccgatggagtctctctgcacattgcgtggctgctaggtcggtgtgactggcatgccacactcgtctatccacagacgagctctaaacaccattcttgaggttgaacgatgacatgctgagtaactcgcgtgtcgtctgtacatacgttcgcggggcagatgcgggaccttacgtagacgttcggttgcttggcggagcgtatggcggataacagacggaaataagatatcggacgacatagccccttcatgacccgccatcatcagttccaattcaagaaccatgacttgggaatagccgtcgcaccacgtaagtctgacgtgcggctcgcgacgatgtgggatatctgatggaagagccatgtgcattccaaattctgtgtaggtgtagccaggtgcggttgtggcagatgcgtctcttgtgacatgtggttggaagcccaacacgtgctgttggtacagctgcagatgctctgccgaaagcttgcggctcgtccggcactggcgatgcgttccactgggtcggagacagacgacagacgaccggtaccaccagagcacaagtctaccacacttcgcgtaccactgagccgcatctgcaggattctggagcacaccagatatcggcacgctggcttaaaccggcaacgacatgctggtattactcgcgaggaagtcgccgtgtatcgccgtatgtcgccgtataaaccagtttgaagacgagcggggcatagagaatccggcgtgcctggcaatgtctctgtctgcgtagtcagcatgcgaccgaacgacgtcaacgtaaacggaaaaagattgtgaagcctcaggcaaggtaccttttttgtcgcagagggctgcatgcaagtggctcgcgccaggtgtaaccccagcaaagcccactggtgcttacacaggccaccaaggcatccatccaattccatctttggatgccactcagccctatgcaagtgtaggaaagtggcccagtgtgcgtattgacaggtttcgaaaaatcccattcgcccccaaaaacggtttcgatgttcgttctaattccctgtttggtacttgactctcggccctatgcaaagagtagcatcaccagatgtccggatctcacggcttggaggcgcagatgcatctcatcgttgggcccagtcccgaaacctgtcgtaactgccatgcatttcgtccagcttgccttggtgccgtccagtacctttggcccatgccgtgcgagtcacatccccagggggcgtgatatgtaccttgacaaggcgttccaccaatatcacccagtcgtatcacgatgcctaaggcgtgtggggaacgtaaggaaagtaaggtctcttttcgccttatgtcatctcgcggatttggggcccccgcggggcactgtcgcctgcaactacatggcagttcaggaaagagggcgagatgaagttgcatatctattcaagtggcattgacatgtcgttcaaagttatatatttaaggaacttcgtgttcccaggttccggtcctgtttttatcatcagcatcagcaacacatcccatcaaccgcgtcagccagctcaactttttactcacagcatcaccaccagcaagctcttccaacacaacctatcaacacccaaaccatcatccctagcctcagcttttaaacttcaacccataacccaaaccttcgcaatggctgccttcgcttctttcaccactgagccttgtgtcaactatggccgctccggctacaacaagtaagtcgccctctcgtctcaacatcttggggtccccatagactgacaccatgcttcaggggcaactccgaggatgatgaggagaacaagtttagcaactttggccgctcgggatacaacaaggggaatgacgaagacgaggaggacaagttccgcaaccatggccgctccggctacaacaagtaagccttccggccatcgagatcaacttgaagtcttccaaccagaactaaccgtttcacagggagaacgacaaggaagaggatgacaaataaatgcctccggaaaattcacaacaccagaccggcattctctcccctcttaataaccagctcaactctgaagccatcgccagctcaccggggcaagactcgccgactgtcttctgtttcctcctttgtttttccatttgttttagaagatttcatccgtcatcactgacgatactcctcatgtaccatcaatgcatatagacgggcggcataaatatccggggtggcgacctgatcgcatcccaaaacctcaagagatggacctcacggtcaatggcgacaggcggtggatttcctttgtcgtacacgaaatggccgggacgaatcatgagcttctggcccctcgatggggaccttgtacaacacggatattattattagttagactagaattgcatttgcatattcattttccaacacagaatctgtaccacattgtcagtcaatagtctcttcatcacattgcacaaaaaggagcattacttttcgaagatcactcctaacacttcttcgacgtccccggagtcgccgcgtcccgtgatacaggcaagccggttggcggcaagtcgcaagtgctccgccgcgagtacaacgtcgggttctcttccggccccgcacgcttgtgcctccgtcatgaagccttctagatgcatctggcattcaaagagaagttgattttgtcgttcagtgacaccaagcaaatgatgcacatcgccaggcaatgaggtgagctctgagaatgattggaccagtctctcagtgagggtatgaacaccacctggatccgttagccctgcagccgccgtcgccgcagccttgcaggaaatggtgagcggctcggcaccttggagaccctgaacgctcccaagagccgaacttttaaaaccttggatcagcggttccagtgtttctcgttccacaacatcactcttgttcaccgcaaccaagcactgctgagctgcagctgctaatttcagcgtctccacgtcatagcttatctggtgaccgcctccttttactgcttccacggaggccaagacgatgacaatgtccgaatccattgccttctgacgtgctctgcggatgccctcctgctcgatagcgccgatgactgggctcgagtccccgtcaagattagcaatcgacctggtcgactcggttcgtatgccagctgtgtcagcaaacgaacagagatatccccgaatatcaagattcgcctcgataacgtcgcgggtagttcccgcttccgaggaaacaatggaagcttcccgtccaacaatctggttcatcaaagagctcttcccggcattgggcggtcccaacagagctatccggataccgttccgtagaagctcactcttttggctgccaagcttgtgcatgttgattgaatgcaagatgccctccactagccgtctgacattggtaagcagctcggtcggggattcgtcaaagtgctgatcttctgagaagtcaatgagtgcctcgatctcaccccgagccagcaaaagttcctctcgccagcgttcgtatgttttgcccaaaacacccgagttgccctgcacggccacgcgtcgttgctgttctgtcacggcgtcaagagtgtcgcccagtgactccacctgtgcaagatcgagcctcccattcaggaatgcacgtctcgtgaattcgcctggttcagcatatcgaactttgcccgtggtcgagcactttggaatcgccgcaagcacagccttgatcgtagcagagcctccatggacgtgcaattcaagcacatcttcgccagtcacggtcttgggcccagggaagtagagaatgagggaatccgagtccaggatattgccattgggcagattggcagaagctgggtcaagcaacgtcctcacaccagcatatctgggtttcggtggaggtttcgttgggcatagtgctttgtaaacctaatcacatgttaatggagaacttatcactatactccacgatggataatgtgttacgcttaaagaacctgggccagaaatgcggataacggctatgcccgcctttcccgcacccgatgacaaggcatatatggtgtcgtcgttctcattgaagagcatgtcgtcagttcttggcgtagcataaccaaactgccgcatgctgggtttatgacatgacagccatggttgaggttgttgttgagcgggcgcaacaggcaatgcccacggccgtgctgtgagtgctctcttcaacacatagcgaaacattgacaaaaatcaaaagggagaaaagcgggaatacagcagggaaaaaacaggtctggcgttgtttgtcattgcttctttccttcatattcaattgaagtttcatgttggagcttccaatgcttgatctctgattggctggtacgggggtagctccgataagataatcggtggcacggacccgttcgctatcaaccaaaacttctgtctccaaaaaatttatcagcagcgcatctggacgagcccctccagaatcaacgatttgcctacgaattctcgacctttgcctccctcccacacccgcaacaaaactgcgcgtagtttttcaccaccaccataacgcagacaagacaggccgaactcgagaaccgcgatcatgtctgacgaaatcgtctggcagattataaatcgtaagcattggttttcatggaggcgaattggttgcatggtctcagtcgctaactatccgagtagaacagttttgcgccttcaagctcaagtacgcattagattatttgccattttgagctacacaaactgactttacttaggacgacaaagggccagaacttttgcagaaatgaacactcggtcagcggtctttgcaacaggcaaagttgccctctcgccaacagcagatatgcaaccatcagatcatcgcccaagggcacgatatatctgtacataaagacagtacgtggccatcgctgtgacgaaagatgacagtggcaatgggcgaatggctaactgtgtatgctctcaacagatcgagagagcgcatatgccagcgaaatggtgggagaagatcaagctttcccagaactacgcgacggccctccagcagatcgaagacaagctccaatactttcccaagtttcttcagcacaagtgcaagcaacgtcttacgagactcgtacaagtagcgacccgcatgcgcaagctcgccgccgaggaagccagacttggcgaacagctcgtaccaaagatggcgccaaagatcaaggcacgtgaagccgccagagaacgcaaggcccttgcggcggccaagctggagaggacgatcgagagagagcttcttgaaagactgcgacaaggcgcgtacggagaccagcccctcaactgcaatgcgactatctggaagaaggtgctcaatgctcttgagaacgagggcgagggcacccgcgataaggacatggacaagggtattgaggatgatgatgagtccgagaaggagatggaggaggagctggaagaggaggacgaggaagaggacggaaacgtcgagtatgtttctgactttgatgaaagcgacgaagaactcgcggatatcgaggactggttgggcagcgaggaagaggatgatgccgaagacgatgacgatgatgaggatgacagtgaggaggacgacgacgaggagatcaagaagaaggccggtgataagcggaagagaggtcgggccgtcaagccatcggcacgcaagaggaaggagatcgaggtggagagagagacagagcggtccaagctccttgctttctagatatgggaatggacggcaggatggaaaagagctttactcggcgtttatgggttgttcatcatggctggcaagatgggttgccaggtgtctttatgtaataccgacttggactgggtatatagagcccgtgcattatcagcaagcgattcaccatgtggtgttgattgtatatctacagtactgtattgttcattgtgagcttcccagtcgcagccttgtaagtgcattgacacgtcaagccagctgttcggctataagtggggcagacgaggcttgttggaatgccccgtgagtggtatgaaacactgcgacactgcacaagcgctgaaaccaagtcggtcgtgggattgccactcactctcccagctttcttcctacaactcttccaactttgaacaacctgacaaccggcccacgaccgcagaattccgccatctgagtagcacagcaggttgaatgtcaactaccccacggtattctagacagcttaattcagtgacctttttctcttctcggctggcaaccaagcaataattcgcgaccgctcattcgctcgcgcaacgattcacacgacaacaactcgttttccgaccgaccaccaagaaagcttaattcagtgatcgaaaatcgtccaacattcccccagggccacagtgtagcaaacagcgaaagaaggaatagagccaccatggcctcatggtacagctccctcctgaccaacgcgtccacaaacatcaccaagctccagcgaacctacttcgcgggcgaatccgacggcgacaccgaagacgacacgcatgtctgccgcgtcttgagaaactactacaccgaaaaaggcagccccttccccggctggctgccccccgacccgaaggctcctccaccgcaacaacctgttttggcgcagcagcaacagggcagatatggcgggtttaacaaccaggctggaccgggagggtcgcagacgagattgaatagtctgtgggataataacaagggcggtcagcagcagggacaggttgcgagcagtaggaacccatttgctgctgggggacaggcggtgcagcaggataataggccgcaggcgcagagtttgaggacaggggggagttatcaggggggtgggaggccggatggtatgtcacccacaggaagcgcggcgagtgggacgagcgcgcaagaaaagttgaagcagaggctttgggggggaggtgcaaggactacgagcccgaatgcggcggggcctttccaaccgccggctcctcagcagcaacagcaggcgccgcctccacagcaaggtagacgggggtggggaggggctgctgctccggagggggggtattctagtaggcgggacgagaggccggttatgagtgcgaatgcgccgtgggcggatgggggttttgattctccttctggcggcggcggtggtggtggtggagggaggagttatggtttgccgagcggaccaaggggagggttgccaagtggtcctcgaccgagatgatgggttggtgctagggaaaggccgaaagcattgggatgaatgaatcttgtaattggatctatgggtcaagagtgacagaggggatgctggtgtgacgactcggattccgtgtacagagtcggccgcgtccagttacgcggactacagtgaaatgcgaaccaagccgttctccaccagtgaaagccgagccatgacttcaggggcttcgatgggttggaagacagctacagggacagtcgaacatattacgggaaaactttactctcaacaaccgtgtgaacaacggagatgatcatttcagcaacaaatagtacagaaagcgttgtcaagcaggcgtgtgtttgatgtatcagtatgtccatagccgtaagtcgtgccttgatggcagcaaatcatctattttacaaaggcaccgcgagaatattctcttcttggaatttctcggcaagactatcaccatggtctgtttgttggcatcagatgacgacgacatgccccgagtggtacgtgttgaaggcgagggctggttttgcctcggtgatagcaagtaccggtaccttttcttagctattattaggtaaggaccagcggcctatcaaagtaccggtaccttgatcagggagcaacccctccaactgcgcggggttgcctgcccatctgggcgttccttcaaccttgacaagccccccaaagcttataaaacacctcgtggtcacagtccactacctaccagtccgtctcctgctgaccccgggcaaaccattgcgcatgtgaatctgtttttcgttcaaaagatctagtacctatctgttgcgaaataattaaccaacctagcacacagcctcagcgagctagctaagggagggatccaagcggttgctgttgctgctttgcgacaatgaccagggttacaaagatgacgtcgccgtcattcccaaactctcaaccgcaaacaccatcagcagactcccactccaccatttccatttccacctccacctccacctccaacatttcccgctcagaaatccctccgcgtccgtcttctccctcaggaagcctctacgcaatgtccgacgacgaagaatccgactacaacaccatcacccacaccgaaaccggccgcggcgtgaagctcctcttttcaaagtccaaagtctacgttcaccctacaccttcggccaaggacaatatcccggggtatattgccctcttgcagcaaaaagcctcctccggccttacccgcccgacgagttcctcctcaaaagcctcgattcgctcctcggatttgctgctcgcatgggtgcctgaatctcaactgggggactcggcctcgatttatgtcaaggttgacctctgcgatgggggctcccccccaaaacaatcatacctggtgccgcctcccccgacggtgactacccaccggggttcggtagggagctatgcgtttgctattcccgtgtcggcagtgtactcgctgctcgtccgtccgccaagcttggggtggtggtatgggagcgtgattatcaactcgagggccggtgattcttttccggccttgttttttcacgacaatgaatgccagagcacgttgctgaagaggaaacagcgggctagggagacatttgatccttttggcgaagggggggaaatgttttggggtggggatgaggtgctgaggtggttgaggaggtatgttgagattgagaggagtgtggcggagccgaatgtgtacttggtcgagccgagccaggaggatctggaggggtttggggggaaggttactgccggtgggagggcagggctggcggtagggggtggggtgcctggaccgtcgagttcgagggatacaagcaaggatggggggatggatccctttacgaagtttatcaaagagacggggtggaatattatggaaaagttcagcaaagtgacgacttttacgaggcaagcagcgcaggatgtgcttgataacccgaggattccgccacagatgaggaggttgatgaagaaccccgaggttcagacgctgcaggaggagtttgatagtgcgaggatatacctggcgaggtgggcgatgggaattgcggaacagagcgagagggatagaaaccagaggatatggactgcgagggaggtgatggagttggaggatacagatgtcggagagtttgagctgctggatagcacgaatagtctcacgctggagcagatgaggaagccagttacgctgagcgagtggaggaagttttttgatccacgaactggacggttatcggtgacggtggatgaagtgaaggagagggtgttccatggtggattggaccccgatgatggcgtgcgcaaggaggcttggttgttcttgcttggtgtgtacgattggtatagtacagccgatgagcgtaaggctcaggctgcctcgcttagagatgcgtatatcaagctgaagggcagctggtgggagcgccagatcgaccagggcggtgagggtgaagatggagagtggtggagggagcagcgggccaggatagaaaaggatgtccaccgcaccgaccgcaatgtcccgatctttgctggcgaagacatcccccatcccgatccagagtctcccttcgccgaagtcggcaccaatgttcacatggagcaactcaaggacatgctcctcacctacaacgaatacaacaaagacctcggctacgtgcaaggcatgtcggatcttcttgcccccatttacgccattcttcaagacgacgccatggccttttggggatttaagtgcttcatggacaggatggagcgcaactttttgcgtgatcagtctggcatgcgggctcagttgttggctcttgaccacctggttcagttcatggaccccaagctgtatgaacacctccgttcggcggacagcaccaactttttcttcttcttccggatgctgctcgtgtggtacaagcgcgagtttgactggccggatgtgctgcggttgtgggaggggttgtggacagattatttgagcagtagctttcatctgtttgtggcgcttgcgattctggagaagcacagggatgtgatcatgacgcatttgaagcattttgatgaggtgttgaagtatagtgagtattttatgccattccccatttatccggaagatgaacagctaactgttgtgctagttaatgaactctctggtacaatggaccttgagtcaactctgatccgcgcagaagctctgttcaagcggttccagaggctagtggaggcggtggacaggaagggtcactttcctgcgcccaagagggtgcccacacagccagcaggagacggtactgcttctggttcaaatactgctgcgacgcctgcttcgccgcagggcaacacgagcgcgaatgaacaaaatagtaacagcctgaataacaatggaaagggcagggaacaagtggagaaggttatctcgccggagctgaggaagttgttgaagagagaggtggaagtgctgcctagacgggacgtggctacgagtagtaagaatggggggaagtgatgagtttttgtttttttggtgctctgattgtggcttttgtttggagttctgggactcgggagacggcaggtgggcaatagggataccattctggcgaattagggggcaaaactggaagtatgggggtttggggagggaacatacctgggaccttggacgagggattgcatgttgttgtgcgagtttcgaattggttgtttagtatcctttggtggtatagtttattgctagtgaataacaagccaacagaaagtacagcatgtcataccatcgagttcgaatgtcgtttacactctaaacacatttcaagaggaaagacgcaaaaaagtcaattgctaaccctgtctttcgtgatgaaagttatattccagctaggtaccgaaaacctcaagattgacaaacgcccctgtggtccccagggtcccaaaagcaaaccacatcattaaccatttctttatcccttatcccaattcatatatgtataacccaaccccaagaaactaccaaatagcagcctgatcaaaatcaaacctcgccaactccccattcgcatcctccagatccttcttcgccttcatccgcatataaaaaatcggacagtccttcgagctgcaaatcacctcacagtgcatgctcccctgacacctctggcactgtgtccacaaccgcccaaatctcacctccaaatcactgaccttgtccagcgtcttcttgtacaactcacccaccctcggcgcgtcatcggcacacaccgcgccccgactctcttctttccctgtcaagggtttcttgcaacccatacacgtttgggttttcttggcaaatttcatgagaccgcctactttgggtgccgcgacggagatggcgcgggtgtgatcacctgtcagcaaggacttggcttttgtctcgccgaggatgggctcgaagatgcggccgaggggtttggcgagctgattgtcgaggtagtattttgtgtcgatgggtacgttgtgctcgaggacgtagatggggtcttcggagcgttcgaaattcttggagccagtcgcgcctttgaccatgacataggctacacggtcgccgagggcgggggcggaaccggcgtcgcgcttcttcatgcggtgggcgagctcgacgtgagcttgcttggcggcgtagtcgtctttggtgagggctttcgtgatgacgagcttagacatgtcgacgcggttttgaaggaggtcggcgatggtgtctttgacgtatctaggggaaattagtattccgcagggtaagtgatgagaggaggggggcttactcttgagctccagggacgtcacgatcgatgagaatcatgcggaggaccttctcgatgacggtttgcaccaaaagacagttgtcacgacggacagtctcaatacccttggtgtccatcttgtcatacttctccggctttgtccagtacagcccagcataacgcttcttgttaatcagaagatagggaaagtacaccttttcgaactcgagcttgatgggcttgatgaacttgctagacacataattcgccgcatcctctccgagcttcatggcttcggccaactccttggtgccaaacttgaccatgacggaatcagtatcaccgtagatgacctgagcgtcatgactgtagccattcttgatgcaatatctctcctcaacttcgtgcttcgtcctctcaatcatttgacgaccgaaagcggtggtactactagcaatctccaagcaggggagtttgccgttggtggcaccagtcaaaccgtagacggagtttgcactgatcttcaaggctagttgacgaccgttgagcacagcctttttgaatggatctgtctcagcggcaagttctctcttggcctcctttctagccgagagcaattcctccagaatttgggccaacagcccctttctctttttggtggtaacgaacatgtcgccattgggggtaacgatgtagtcctcatccttgactaagctccacctctcaatatccttcttcttgatgagagtggtgtaacacaaattgtgggcttgaatgatgctggggtacagcgaagcgaaatccagagtggcgatggggacatcgtagtatcctcttgtaggctcaatgacagtggcaccctcatactgctcttctgatgactccgatctcatgttgggaatgacaagcttttgctccagggccttgcggaagagctgactcaagaatttgacttgctgacctctggcgaggagaaagttgaatggtacccccgtaactcttgccatttcggtgtagttttcaaggcaagacagcttgtccatgagtctttgtggcaggtaggcatccttgagacagtagagtgccagtctgcgtctcgactctggggtaccctcgaaaagctccgtgatcatggagtgatggacatcttctttttgttcaccaagaaaatgggcgcacacagagttcagggtataactgcgaagttggtggtcacgttgaaccagttgaagcaagtcgagctggagacgaccgttggtgttggtggccttcgtgtcgcggttgcccatctgcttgctggagaagttggtttccttcgctaccgacttgacgtgcgtgcgagaccagtattcgaagttatgcaccttgagatgtttcgccctgtcaaggagataggggaaatcgaagttggcaatattgtacccgatgatgatatctggatcaaccttctctaggaagtcccgccatgcagccaacattttcccttcgtccttaaactccaggatctgagtggccacaatgggacttgtggtgtcgagacagaacacgtttcgtacaaacggcttcttgtctccgtatttggtgacgatattggcgatttgaatgacggaatcgtgttgggcctcggggaaaatacctttgcgaccagcgcactcgatatcgaacgagagaatccggagaggggccatcttagaccactctccagagggcttatgcgaaatcagctctcggtagctgatgacagcttcgaactggcagttggactgcttgttcatgtggataaggtcatatgcgccggcgggtgcttcaacccaagacatgccagcaatcgaacagtctaccatgaaccgaagcaagtactggatactgtcgtaggtcatgatgccgccatcatgcttccacatccccttccagttggcctcgcctctctcgatcatggtgcgtaccttgttgatgtgttttggatcggtaaccgtaaccttgatataaggattttggacgttcccttggaagccatagatgttctcgcgcatggtcagcgatacattatgaatgacctgttgatattggtgattttgcgacatctgcgattcgagatatgctttgaacgcaaggcagtcctcaacgacgaacgagactggcgccgcgacatagaggtagtgcttgaagtctttgacatgcaaaagaacggagttgccgttctcggtcacgccaaatagcttcacagcaggttgaccaccaccgatcgtgccctcctctgcctcgatggcttggaagcagagactttgcttggagggatcgaagtcgttcggaatgggtggccgctcccatgcttggtccttttctgagttgttttgcttgaggtctgagatgtcctgattcagtctttcgagcacttcgctctcgaaaacactcttctgttggctcgaggccattctgcctttgctgtcattttgagagctcttgaagcgttgtgctggagacgatgtgggctcatcgatgcggcgcttcttggtggtggcggtagagggagttgcggcgatgttccgccgggtgcttgaagcctcgccaaaggcccttttctgcggtaatgtcgcggaaggcattttggattgctttgatgaaggagtggcttgcggaagagcaagtctagattccagctgtatgtcgaggcatgggatggtgggatatggcagctgggtcgtctctggtttgacggggatagaaagacggttggaataaggacgtgggatctggctggactgttgttggaggtgttgatggcacgaactcgaaattcattgagccaaagaaactgggtggacgcgctccattcccttgttacgtgactgccccactttcccgacgcgagagtttaattgaccagtgaggtatgtaccctgcgttagactttaagtggttcctcaatacggtcgcgacgccacgctcttgccctaccttagagcaaaacatatcgggttcaagcaaaagcctctcttgctcgtcatttatccattggtcatttctaacaaaagtggatgacagcttacaggaagagttggagcaaaagcgcagcctgttaactagcactacgtgaattcgcgttacctaaccctgaccctggaccctcgcatccatctcaaaccatttaccccgccaaccttcatcggatcttattgattgtttactttcaccaacattctcattcaacttacaacatcgacatccagaaacaccccaaactaaaaaccactagtccagtctcacgagttatccataaaatatctcaatcaacagcagactgacctccaaaatggccgatcgccacctccctccctcctcccgacttataaccacaaccactggccacatcccttccaaaccctcgtctcgtctcatccagcagccccccggcccctcaaccactccaacaacaaatccaccgcccccaactgccagctctgtccgaagaaacctcttccaaagccaactaacccgccgcgcacctcaccaagcctcgtcctcaacctcctccgacaccatccgtctccaccaccaccaccactccaactcctacgactcctccgacccctaccaagactccccacctttaccacccccctcaccctcctcagagtcaatagttccccgcaactcccacggtgaaatcgaactcctaggcgaccccccaacccctcccctctacgactcagacgattcagccgaccacaacaacaactctccatcccaccaccaccaccaccaccaccacccggggaaccaaaacgactcccaaagggccgaacaagccgccgcccgcaaccgcctctccgaagcagtccgacaacaccagctccaccaaaacaaactccttatgtccatcccgggtagcaacatggtgggatccgggtacggaatgcaccaacaactaaacaacacccaaccagaaggtcagcaacaccacccccatttcgatacctccccctttctcttcagtcccaccaccgcacctcactgttctgatcctttttgttctggtcaccactacccttcttcttctactgcccccgctcagaaattaatctactatcctacttcttctccttcctcctcctcctcctcctcctcctcctcctcctcctcttcttcttcttctttgcctcccattcctcccaggcttaataaaaagcgaaagggaaaaatgaaacccatcgtctttgatgagactgtagacgagaatgacaaggaagactcatttgctaaaaccaaaaaaatcaccgaaacagagctcatcgaggaggtcaaagccagtctgcgagccaaagtggctgccctggcccaagataactggatgtttgagccagaggagcttccgagacctcattgatcaccacaactcagataatcatgtcaaaagaaaataaaaatgtaacgataccccaaggcgttatgtatgctcttaattatcgaattatcgggctctgatcccttaactccaagaatcgtgtgtatcgtgtacatacaacaccaacgtatgctcccctcccccgcgtgtcttgctttcctccctcattaatccagcccctccgcagccggcgcagcctccaccctcctcgccatcggtctcccaccactcccaccaccaccacccggcatccccaagaagctccccatcatgtcaaacagcgggttgctctgcctcggtctctgaatcccaaagtacatctccccaatcagctccagcgccgtgtcccacaccccgtccgtggcctccttgatcgtgggcatgtacttccccttcaactgcctaaacacctctgggttgttccccttctgcaccgccacaatcaacagccccaaaaagttcatgagcggcaggctagggaagatcttggtctcgccaacatcttgcacagccaaagacgggttctcggcggcgagctgtgaagtaaacaccttgtagcacgtggtcgccgccttgaggttggccatcaacaggtacggaaggactgccctggcgcagtaaaggggcgcggtgtgggtttcatcctgcttgtaccattcatactccaactgcgcaaggacaggaggggagtctttcgtggtgccgaggatcaaatggcgctccgcctcgtcgaggctctctttttcctctgccaacatggagccgatgacgtggtgaagttctgggtcgccggcggggtagtccgagtacttctttgaccacctatttgttatcctgtcagtctatcacttgttcataacgttggagatgatgatggggtgggaacgtactcgaccacatccttcacaaacttcttcctgttcggctcggcggggtcaaacagcctcaaacaggtcaacaccctccccttgcttgtagcgtccaccttcagcccagcctgcttgtaaacatccaccagcaagatagcgagatcgcccccactgccgccgcctgttggacctgtcttgaggagggactgggagacagaggacagaatgtcgatggcggcggtatagttttgcgatttggtgtaccgggccgcgacgagtcgggtctcttgggcggcttcgtattgggcctcgaagggcatgccgggggtgattttggattggaggcgggtgatgattttggctattttggggtttgtgggagccgccgccggggcgggggatggggaggaggccatcgtgagaggttgattggggaggttgatatgggaggctgtcgagtggttacaggagaggtgaggtgaggtgaggtgaagcttaggtcgggatcggttcggctcgaagtctgtgttgcactgttcagcttgtggggagctctgcgcgcgtgaaagtaaatacgcaggtagttgacgcagagagtcaaaggttcagcaacgcaaggtaaggtacagttaggtttaggagagtgtagctaaatccactgcatcgggacagttcaagctcaaggtcaggtccacgtccaacgtcccctcgtctccactcttgcgcaactgcctgccgcttcgtgtgctttgccccgcaatgacggatgattcttcgatcttctgcggggcacaagtgacatgggacggcttaagccccgcccattctatcctatatcagggttagggtatgttggcacaacctgaagcccctgaaccccttttcgctgagtgcgcgtactctgtaccgatatcaggttcatcttcacatgcatgctaatcactcaaaacaacaaggtatagtcgtatgtatacactcgacattatccccaacttccacaccaccaagtctattaactcgaaccgctccgtgtattctgatcccctgccttctgtctgtaatgattttcgctaaacttctcaaatggtatcatctgtccacgctgctacagaaacatcacaacagtggcctctcaaacaaggatcctctattatcccattcaattcaatccgtaaccatcctatccccatctccattgttcgtaataggatcagctaaactcccgccacctccattcccacccacctcgttcgcactcgttttcgtagcagcgtcgccctgagcaatctcataagcgtcagcactcgcaattattgggaaaaaggcagaagtgcggcgttccaccatctcctgaaccgccacacttacccctttcccacccaccggttcaccaccatccgccccatccccaacaacatccagcatcacttcatcatccttgtcccctccagacccagccgaagccctgttggaagacaaggtatcaagactagccgacctctgcagctttccaggtccagcaatgccagcccactgatcgtcggcccctcgcttcttggatgcttccgcctctggtggacgctgggactgatccgtctgcagctccttcttgaaaaagtgattatcgtccttgacaaacttctggagcttgtccggaagagggtcgtacttctcattcatggccgaatcagtcgcatacaccaacatgcggttctcctttgatttgttccacatgtcgagcacggacttgagcttcaaaaactgtacacaaaaaccgtggttagaatcctcaaccatgagtaacccacgaaagccgctgccacacatacctcatactcaaccctgttgcgataagacatcttaagccaccagccaccggtatcctccactcctggagacgagccctcctggatgatatcatccaatggctcccccgtccatcgcaacagaacttgagaatcccctatcaccgcgccaacaagcgtatacttgtatgtgggattccaggctgggtcgtcagacggcgtggtgaactttgcagaattcgcctcagacttcgctgctatcgggtggaaaatctgctcattgagctctagaatacagtcagtatatgtcaatccatgttcgccttgattcagaaagaatggttccacatactctctgtcacgctctcggtcctaggcgatgacctgttcaagctgcttgattctcgtctggtaatgagcaagaatttccctctcctcgtccgaccacgatggctcatcctgtgaagaaggcagatacatgacatcttcagcattgctgaaagcatcgttatagttcctccaaagagctccttttctcatgctttcgattttgtccttcagcgactttatagtcgcgagagccaactccttgcgtgtcgcctcgccctctgccgttttcaacccattcgtctttctgcggtacagatcaatctgctcccttgcgatttccgcaagcttctcctgattacatgccatgtatcggtcaaggtaaaagatttctggaatttcgatgtcgtttatacggctgtctctggtccgcagagtcaacactgaagatggatgtcgaatcatagctagcatgccttgatccagatcctcagccgccacgggaacgtccggataaaacaggaggtccaaataatcgtacaaggtctttggtgactttgcttcaaacttggcatcgatgtggtggaggggagcgggtatgaataaatctaaaagaccaaactggtcctccgactggtgcactgtaatgtcctggatcggaacgacctcaacttccgacatcagaaccgagtagcccactgtcgatgaagaaccttcgacgtcccgcagagcattgttgtatgcaaatctgtgaaggaactccttttcttcatcgtcgtcgaagtacctttcaggttctgggaactgcgccaaaatatcagctgtcgcatatgagcgcgttgtcccctccagaaaagccattagacggtgaacttcaaattcccatcgcggtccgttaaccgtgatcggctcgcccttccaccaatcctgtgaacaacggtatccccatgctggctcatcaccgatcctgagcaaagtattccgcgccgcaggaattcgttgtaagatcatcagtagaccgcccagcagatgactattgtggttcggccggcgcctgagaaacacgggcaggcctggttttctttgtcggcaagtcggtacctcatcttcgagtggcggcggataatgactggtcaccgcccattcttcctccgagtagtgctctctggtggccggcccaaattgacccttagctgaggacgagggcctaggaggtagtgttggtttctgcgctgcgagcgatgccgctacggccttttgaatatcctcgtcttcctgctctttggatgttggggccctgttgtccgctctggatgggacacgtgtgggaggcgcgcccgtggttccaggagtctgaccgtacagaacctcatcctcgccttgtatcctgaaagctaaaacctgtcagcaatttgctcatttttggcttccagaaaacaacgcccttgtgtggctgtgataaggagtacccgcaggtcaagatagccccatgcagaaagcaaccaagactacctgaaaatcagacagccctaaagcttactccggatgcaattctgaaatcgagtggacctgtccgcatccccagaagacctcacaatgacctccacacgcatggccccgctcaacgtaacccatccaacggtaaagccaccacgcccacttccttcgctggttcaagggtaaaaggggtctactcacaaggtgatgactccgcccccagcaacggcgtgatattcgacgtttctgtcgcctccaacccaggcatttcctcccagctatcccagccagtagtagcggatttatcagtagaaggtttatccttatatctcgacacccattcctatttccacaatcatgtcaatcccctaccctacaccccaagaacaagccaaacttacatcggtaccacaaagtgtaaaccactcttcaacaacggcattgacattgttgttgtgctttctcagggccctgatcagcatcaaattgtccggaaagacaatcccagtttctgtcgccatcttatgagcctcctgctccttattcgtgagcacggattcgtccgccatggtgtccccggcttccagttatcgttgtgtagtgttgccgcaatcacgccccccgtcaggtggtatgttcgagagagccaaagttgatccgttcaagcttccatcgaaagcgggcggtggatactcctagaggacaagctgaagggcccaggggtgagagccactgcagaaagcggtgcgttcgtagtccggtggccgaaagtcttttgaggtaagcaataatcctgtaaaagcttctgtcgtttgtcaaagtagatgttatgagcaagcccgtggcccatcgaatattagcaagtgttatgacagaaccgatattgagtgttgttggaagcgaatgatttccgtggcggggggtgacgcgggtggaggggttaactcggaagttgctgggaggcaagacggatgatcgctttcggtcgtttgttggctggagaaagtcgtcgggcttctctcaacttttcaaagcagttgtaatctggtcaggaggtacagaaggtgggatagtcgctggaaccacacgacccaatttacaaggaagctgcagcgcatctttggttttgggggtgggcagctgcttgtctcatggtcttggcagcccatctcaacgcacgggccatgacaattcaccccgccatggtggtttggagaatcagtacgttgacacagaatatgtttgcaactgacaggagctcgcggtgtaatgtacagtttgctcgttatctagagttaataaaacgattaatatctcccgtataccagctttagcatcactcctcgctgcatttcacaccagacaaacaaaagctcttcgcaatcctgaacgcagcccatctattctgctttcgctccctggcctcccataaataaatacgccgtgcttccaacaaacataaaacaaccagccaagcattgtgaaggaaccctcacccagtatttcctccttccccagcccataaacgcccattctcgatgttcgaggtgttccccatgcaatgcacgctagacggatgggagaccgaaccgatagacagaaggaaaagtgtaaaatgaccgtaaagaactctcccgcgataaactgttgatcaccgcttcttggtccccgcgccagaagcaacctcatcctcactaccatcatcatcactgccctcctcttccccatccccctcttcatcatcctcatcaccctcaaaatcttccatctcctcgtcgccggtatcactccctccaaagtcaaaatcctcatcgctttcttgccaaaaaccgtcatcattctccatcttcggcggcggcgcactctcaaagctcctcggcatctcaaacccctcgggcacctttgtcttggagtactccaccgtctccttcgccttcctgttatactcctccctccgatcccgatacatgactcccgcgtcgacattagcgggggagccaatctcgggatcgtccagcagcagcaacaccgatctcaacacactctccacaccatgtaacggtgtccaccgctccgacgccgactcgccagacatgacatcctccccgggcgtgtgcaagatcgagatgcagagctggccgtcggggtacacgttggggtgggtgatcgggttcaggaaacggaacttgggcggggagtaagggtaatcttcgctaaacgacatctcggcctggaggtaggcgccgttgaaaaccgagtcggagttgatcaccatgagggcgaacctccatttcatgatgttaatgtcttcgttctatagtttgagagaaaaacgcaaacaggttagcttcgagtcgagctttgtagggagcaagcatggcaacagggagacctacatcgtcaaaatgaatccacttctcctgtcgcaaggtcttcatctcccccaggagccgcgtcttcgcggccgtggccttgctcactttggacatggtaggcgggttggttggggtggggtgtgtgtgactcgtagaggtaggaaaactatgaccgaaagttgcaaaaactccagtgacagcgtcgggaaatccagaccaaagttaacaaaaacaaaggctgctttgccgcaagaaagagcgtgggcggagagatacgggtggtggaagttgacagtagggagaatgcaggtcaaagatcaaggcagctgatggacaggttgtttcaggctttatttaagaaaggcctaaagcctggccctgctaggatggctggcgggggtgtatcaaccacactgcggcagtgtggggaagaggggcgtgcgaggaaggttttacttgggtcagggtgaacagaaatactcaaaaaacacttgtaaagggatgggaaattaagctctaatataatctaatactgagatccagtggcagatgccttcttcatctgaagatctgtccgagaagaaaaatgctgagttcaacaagtcgttccggcttcctgccgctcgccgcatgttggcagccgaccaccacgaacacccagggcaggcctggacacagcccacgcacccaagtgccgcctccatgggtgcaataccgccccgccacacgctgagttaagcaacagggggcttccgccggggcttgggattggtcccagcgatcccgagccgactgcgagcccagccgtcaaggtgtcaccgacgccttgacaccccgtgacagtgttccattgagtggtcaatggaacttccattcgcatgctttgatcagcttctgaaggttctgaaaattcaatgtaagccacatcatgcagacaagacgcggagaactctcacagtacgcagccgggcatgccggacggagttcaggtgggagccagtggctaaagccactaaaccaccaccactttttagctccagaccgtaaacacacttcggaattgcttctttgtgcgcaaatttcatgtgaaactttcagagaacatatgtggtattacactaaaccttcataacatcaacgctgggtatcaaactcgatctgcctaaaaccctaaaacctgaccacctatgagccaacccaaacaaacaaccaaaccctgctcaaagatatgccgtcgacctagtatagtatcgaaagaaagactaaaagccttccttggtgagtttatatacgtcgatgatcccgggagaatctccgccctcaatgacgagaaagaaaagagcttagcaacaacagctggaccgatatatatcataagatagaatgtgaaaaccgccttggccgcgggggagcaacctaggcccccaggtcgtagtagatgcacttcccagtcctaaagttgtaaacaaacgcatgccccggccccttcttcgtctcccactcccaccgccaccccttcagcatctcgtggatctctcgcacatacttcttctctgccgtgccgacattctgctccaccttccgccagctttcggcgtcggcaatgttggttgatttaatcatgtccatgaccgtgtctgacgtctcaatggccgctattgggccctccaggaaacccttgactagtctagaggcactggtctgcgcctgttcaacgacggcgtgacggttgaactttttgctcttggtctgcgcgactagaatgtgaacttcctgttcgcgatcaccctcgatagcattggccgaatctacatgcgcggcggttggcatgctccgggttttggcaaggacgcgagaatctctctcgcgaatctctgacttgagccagttgaggagatccgtggctgagatatcggcatctgaagcgtcctttcggcccatagacttgaccttgaccatgttatcctgcttgataataacgatccagctataagattcctctcggtagctagaaaggaggtcttctggtgagcgtgtgtcgcgggccaactcggcactgatgttgtgagcccaaagcatctgcaaaagctcaatcccagaagatcgaagaacagagggatcgaaactggcaatcaaaacgtcacactactcaaaatcagcaccaaagtatctgtttggaagaaaatgacaacatacccgtttcatgctgaagataccctgtgattcctcttcagcagccttcttgaggaaagccttacccgtagctttgggcacctgtttagccaactgcttctcccagttgaggctgaagcccacagcgtgtcgctcctcaaacctgccggctatctttgggcgatgttctttgatcaggttgtcataacgacctcctgctgcaaaaacatctttgactttcttatcatagagacatgaaaagaggatgcctcctcgaaagaagacttcgttgatgctgctcaggggcgcaatgtagaccttgttggacacaccgaacttcttggtatattcataaacatccttcaagtgagccaaaattggcgacaccttttgcgaaaattcggaaccctcaaacagacctcgtatcttggatatggccttgcttggtgtgtctcgaaaatcgaatcgctgaagctcgtccacactggtcgccgagatcccaatctctggcgatcttagctcactcctgaccttgagccaggtgaaattcctaatattgagcttgctaagaacgtcagcagccgccggtctggcattgatatccacaccgcagaactcaaagatcaggtgtagaaggtccgagtggccaagctggaaacatatcggcgtggaagaggttgtggggaaggccgagacaatttcgtccaagaccttgatcgcttcggcctctttaagagcgagatctagtgcgtctgtggtgacaatgtcaaagtctacttctccatagacatccggttgtccaccatcgcggcgatctcgaaagatattcccaaaggcgtacgaccgctgaatcacaggcccctgggtcactcgggcaagagagcgagcatttcccatgaccaaatcgaatggcatttgtagaaccgtaccattttgatccagaagacgaacaatattttggtcgtagtagttcgaccggggatacagacacgctgtaggagtttcaacagcgccgtgccgccggaagatcgagaccagtgtatccttcacaatataacggcgcatcaagtctgctccgctcggcgcggttgatcccatatcccaagcataatcctttgccggctcaacctgtcgactgaacaactctttgagaactttcccgtaataaggagagcttggatcagctatccctgcgagagcacgccgtacggcctcgctctccatctgaacaggcatcctcccactcttcaacagttctgagctggacggacgatctttgggattgtgtgtgagcaacgaaagcaagatgtcggtatgattcttatcagccgccttaaagtctgacggaagaactggcgggttatgtcgcacttgctcaagcgtcatcgcacgttgcatcccaagcatgggagggtatgacatctcgaagaatatgacgcccagggagtacatctgggacggttagctggtctgttgtgtagttttgaggaaatgaagcttacatcaaccttggcagtgtatgagccactgcctcctgttctgacctccggggcaacataaacagccgtgccgatacttcttgtaagatcgccggcatcgatgttggccatgttcttatcgaccgctaactgtccacttgtcgccaacccaaagtctccaatcttcacattctcaaccccgtctgggccagcactgatgaagacattctcgggtttgaggtcacgatgaacaattgttaggctgtgtatgtgagccagcccttccaggatttggcggaacagacgccaaacttcttgatttgaactatacaaatttcgagtgatcaaatcccgcaaggtctgagcacattagttagaaacttaatcatgaacgagatgaggtagaggaaattgaagagaaatgaggacctacccgcttttcacaatattccatggaaatatacatgactgtacgaaaggggcggccacttccccttctatctcctcgagccggaacagggagatgcctcggtgcccgttcgcctatggtggatgtatcctcacctgactccgattcatcatcctcatcgctgtcttcttcatcatcttcttcatcatcgtcgtcgtcggaatcctcctcgccagagtcatcctcgaaaaccatgtccgggtgtccgcttgaagacatgaaatcgagacctctgctcttgctttcagcgaactcgatattgatgcttctggagattggggtattgttggaactgtcttcactggagacatcgtcgctttcagattgtccagagccatcagagtagtccatggtttcctcgagccaagtgttgtaatatcgaaccactgcaggatggttcatctgtgagaggagcctcacttccttcagcatctcagacaaggtctcgtgcgacctctgcgtaatcttcttgatggcatacaatcgcccatcaatcatcttgcgagcgcgaacaacctcgccaaaaccgccctttccaaggcgagcctcttcgatatagtcttcttgatatcgggaggtgacagcagtccgattcatcgagtcatgccggagtctccgtggcagcgatttgggtgctgataagagtgaaccggaaacgaccgcagagtcgttttccaccaggatgggggcatttgtggcgagaaactcgctagagcaaagctcaaaagcacgaggccgcttcttagggtctgctttaaagaacctggataccagctcttctaaagggctcgaaagcgacagggaatccatcagagccgacggggagtggtatttttcaggaacgttgaggccaaataccatctgcaagaagactattccaaaatcccaaatgtctgttttctgcgtgtactggggtttggagattccagcaatctctgcgggataccagtagacagactttgctgctctgctagtgactactttgaccatgctcgtggatatgctgtggagttctttctggaagccgccgtcggagagcttgggaacgatatcacccgccggcgttctgcaaagcagaatattgccagggtgtatgtcctggtgaacaatcccattgctgtggagatatgccagtgcatcgagaagatccgtggtccagattctggctttgctgatctcgatctgccccgccaagctgaggagttcatcgagaggtcccttgtccgagaagggcgtgagtatactgatggtccagaccgtgggaccggacgagtcaatgtcactgactgtgcggtcgatcttgaagttgataagctccaaaagattctggtggtttagcttcttcagtgactccagcagagattccaaggcttgaagttgcttcttgaactgagtcgagtctttgccgtgcgacttgatatcgacttgcttcaatgcaagacttggacgaacatgtttcgcggctagtaccggcttgactttgtgcactgtggtcaccggtccctcgcgccaaactgttttgccaatgacggtctggaaatagtgggtatcgccagtgtggtccatcaaactgcaagcctgatcaaacacaagggcgacgttggtctcggaggggtccgcttgagctcgattgggcgacatgttgtgacttcggtttttctttctcgactccttcaacttgttgcgttggcgtttgagctcctcttggaccatgtcaccgaggactcgctcttcttccatggtttcctcgagtttcttttgctcctgttgctccttgtggtcctgtgcctgttttgccaattccgcttcatgggccgccctttcctcttccagagaaggcagctccagaccttgggccttcttcaaggcggcctcgtccagtatatcgcggataccttccacaagacggtcgaccatgacctcgtcatccttggcccatatttttggctgcgtctccacaaacttttggattttgaaccttgttgattcacggagatgaccatcatttttgagggtcaagagcggtggggatttgggatatgtggcgacaagaaccacagagagcagtactgaaaagttgtcatccgatactgctttgattctaatatcaaatgcaggttcggttttctacaagatgttagtaacatggcatccaaccacatgcaaagctttcgtaccttccacgcaccgtgaggtgccgagtgtcgaataaaatcctcgccgtaaatagctgccagggcgatcacctcatcggcttgtttctcttgatactgtgtcttaaccgctggccgagctgggccagggcctttaagcccagggaaactctcagttccattcttcttggtttgaggaggggccttcttttgaccgccttttcccgccatagcggaatgctaaatgtggtggtgacgagttggtgtgagatgaggatgagagcgtgactaatatcaaccagtgggggagggttgggcgctgggagatgttggatatgaaactggattctcggtaaaggtccgagaatataagactgcacagccaggtacggctgtgaagactttaatgagttgcgtccatcctcggagcaattcagacgaagcagtaatgtgaaataggtagagatgagggctgagatgtgactgtgtgtagtgcctggcggggtatttgcactgtccagatgccccaagggtcactgaagctgggatggcattggagacaatcatagtgacccaccattcagcttcacagtggagctgaagccttggcacgaagcttcgagcagccccgccaaccccacttccaacgccctggacgcgctgcgggacgcggtaggacccttgctagtgctgcgactggccggccgctggcaaccacgattctcttctggttccggcagtcaagtaaacacaacagtttgactgccgacagcacactttgggtggcagcccaccacgacctcgagagacgactgatcggttgattgactgacttggaaaacgccaactgtggaactgaccacagattcagttagttgcgcgatcacagcgcccgagtcaccatgatcagctgggcgctcaagcgcaacaacaataaagacgctgacaccgcgcgcgacgcgaccggcgggggtacgagatcccattcccgcagaacctcaagaaagtttttaggacaccgaactcagacaaatgcagatgatacaatccagctggacatgcccgacacgccagcgccggtatttgctgtgcgcgcgttgaagacagccatcttcgggacccccgcagcccgcgccgaccgccgagcctcgagactgacggcagcaaacaacaagtccgcacccgtaaaacccgatgtcgtttctgtccccgaaaagtcgcctgcgaaaccacccggcattcttctaaccccaggcactggcgccgcccgtcgaaaacgagtgtcttttggccatgacgtcaagcaaggctcaggaggaccggcgagatcgagcaacggcgaacttgacgatccgagttcatgggctggcaggcctgcggataccccaattccgaaagcgaagacgaaactgcagcagactttggaaaacgcacggcgtaacaaggccgaggagaccaccaccgaggtcagggactttgcctcccacgacaacgaacaggagggggcttgggaagaggtggacgatgattatgatgagtcggactacgaggccgacattacgaccgatctgaacgagcctcactccaggtctggtcagtactggaagtcctactttgaaacctaccacgccgatgcaaaggccgagatggagaaattggttaagtacaagcagctcgcaaagtcttatgcgaagatgaaggacacggaggccgacgagctgaagcaaaacctgagggaggaacaggagaaggtccagcaaatggaggagaagctggctgagatgggtaggcaggtggctgccaagactcaacggaacggagggcaagccgatatgcagttggtagatgagctgaacaagcagacggcactcgcacgggagtacaagcttcaggttgaagagctggaagatttgcttcatgatgagatgagcgaggacgagccaaagggagcacgacaacgccgcgttgcctctccacggacccaccggacccttatggaagcccagcgggaactgagaaaagcgaggtcacagctaagggagatggatagtctgcgggaagagcgggataaactgcgttccgacttgaagttcgccgagcaaaggtccaccaagcttgctgatgagaacaagaagctgtctggggagttgtctaagagcagcaccaagattcaggacctggagaagaaccttagcgaatcaaaggcctcgttcgataagttgaaggaggacgccaagaaccggttcagggaggcccgggaggtgttggagaccaagaacaagaagatttccgaactccaagaccagatcgcctccctcaagaaggaccccaccgagagcaaacgaaccacctgcgcaactcgaggtctgagtctagacgaaaggtcaaaacccaccgctgaccgcccagcaacatcattacaatccctcgaaacagcagaagaagaccacactcgtcttttgcgagagcttaaagaactgaaaagaaccagcctccaaacagccaccaccacaactaccacgcgagataagaaccgccccagtgtagacgggtataaatacacctcgacaaccgacgacctccaaaccctcgccacctcccgcgccctccgcgatagaatcgagagcgaattcggcgtcgggaaaaagtctcaactctccttcccaactcccgcgggtaacatcctcatcgaccgcgccaacctccccgacagcccctcccccaatccgaggtctgtcccctcctcaaaggaagatgtcatctcccgatcaccaagcagaggctcatcccgcccacgaacatcacggatatccatctcgagagaaaacctcagatcgaaaagcagcaccgacaccaacgagtccgaaaagcgcctcaccaacggcagccgcacctccctcgtgcagccccggaagaaattccctcctcctacccccgctgctgcggtgcggtcgctccctacgttggatgtcaccgaggacttgacgcaagacccagaagcagcaggggggatcgacctcgtgacggggaaatttgcccggctgggtggtggtggtggtggcggtgggggtgttgacaagcggcaggatccaaacagtagcgctgtctggagcaccatgaacgcgtcacagcttgcaatgccggcggatcgaaaggcggcggctattgcgcggttgcagaggaagaaggcggcgaggttgcagatggagaggatcaatggcggggatgggaggacagggacgaggaataaggagaatttgaggccttattaagggtgtcgttgagggtaatggatatatgatggatggggagggtggtagacattgtttattctttatgagcatggcaacaacataaaggggtgggagcaggcatcatggggacataattcgggactctggatgggattgattgatttgatatatcatggcggcggtgttttgtttgtaaaggctgttggtatatttatttgtataaaggcatgtcaggtttggaggagagagcaactgctggttacgttgttttaccattcttgatagggatttctctgctatactcaatacctgcaaacattatcatttacactcatctccgtgattgccttatcaaaatataccattgattacagtgacaataattatatgtatatctcttctcaaatatgacccctcttctccctgtctgccctctctggctggccatacacaagagccacaagctgctccggtccttctccgcaaaccctatggtatacaatccccctctcttcatcccatcatgttgccaagttcccccaaataccctacatcttttggtatcacgttaacacaaaatgcaatgctttgtaaccccccgaccatgtaaggaccaagcagcccaaaaacgagatcacttgaccctcccttttcggctttcccccagtccgctcggagcgcacaaaacaatcccataccaatacccaaatcccagaaccgatcgtaaaatccagtatcaacgcctcacataatgctgcactcccgttcaggtaatccatccttcgagtctttccccttccccttctcctttttctctttcttctccccatccccatccttatccttcttttttcccttatccttcttgttccctccgtgatgccccaagtgatgatgatggtgctccttctccttatcctttctgctctccgtggcggtttcagaccccgagccttcctcctctgtcaccacagcctgctcatccaccgtggcaaccccatcaacagatgggactaccaccacagtagtactcccgttgctagacgtcgacccatccttgttcggccgaataaatccaagtctcgagatggtggagctaagccttccctcgcctatctgactagtagggcgagatttacttcccgtctttgtgaacttggctgccgcacgggatagtctagcagctgtggattcttccttgccttcttcctgagtggcggtaggtgtcgtgaccgcaggtgaggttgcctctggtgtaactggggccgcggcggctgcatcagaaacagacaagctaccacgtctggagtgctcagccttggagttgattgaatacgggtcgtcgtcgaagctgaggcgctggtccatgttcatttccgagctcagccggatcgagggcttctcgctgttttgggtgagggtggtggcagagtcaaagaagccactagtcgccctcgaaatcgtgccattcacggattccttgggtgtttcgacaatcagagtagccgggacctttccgttcaagtccttgtaagccggaggttcggtaacagaaccatctgtagaagccgtcgtgacgtcaaccatgggaacgacctggtagaagagaagatatggcatttcttctcgtagcgactgcttgatatcatcgacgtacgtcactcgattctccaccgcgaggtcgtcaaactttgcccactgctgctcttcgtagtcgggaggcgggtcgtcctcgtatcttcggttctcggtcagcagcttcggagccacccgagcaaacgagatatagtgaccactatgcagggaatctccgcggtgacagaccactgattgcagtaccagcttgaattcttcccgaagcccactggaatccttgtccttggtgttgatgtcctccgccatgaactgaggcaatcgcaaactgtccgggatatcgatcagagtattttgtcgcttaggaacaccctgttctgtcattgtgtatctcttcaagcagatccccaccaccggtcgttgggtaaaatggcgagctacttcagcgtcattactaggttcgctgtttgttgtggcatgccatgctacagaatgttagccatgaatttccgctgacatgtatgcatgtgggacacccacggattagccggaaaaactgccacgctggtatcgtgacagcctttacaattgttgaaatctttcgcttgtgcttcggggaggtgctctctgcttcaccgttggatgccgggtcctcctcgttcttgaccacaattcgctgtatgatgctcgtagatctattacgcgacacagccggcgactcggcggcagcctccagggtggggttcgtcatggataccggggaatgtgtgatggtctcttgtaacgtccatctgcgctggagtttcgagctctcgccattgtcggtcggcgttgccgcgtcctcatctgtggtgcccaataatgtgtttttgggtgtcgagaatccgcccttcttctcctcgaggctgtctcgaagcacatcgaccttgttgttgaagtactcctccaggcagtcctcgagtttgatgcccttgcccgacggatcgggagggacggcaaggttgagtaaccgctcgtgtaccactttgtgatcatccacatcgccctttccttggtgaaacaaatcgacctgcagcgtaagtagaggtagctgtagtgtctctgtaataaacgcaaaagcctctgaggtgtcttgctgttccaacaactgggcttccttccacccacatgcagcaagcgattcctggatgtgttgtgtctggacatcaagtcagtttaaccccgtcaataagactgctaggctcctaccatatccgtaggaatcaactttccgcttctcaacatgttgacccataaccgtaacaaggcagccagtttcctttgagcctcgtccgtagagtcattcttgagcatgcactcgaaggcctggagcttggcgaacatggcaaatagcagggcgtcgagataacaagtaacatttccccggttcacggcgcccagcatttggacattggcgttgtatggctgtattatcccagcgaacgcctgctgttgtagctgtaacagctccagagccttgtcgacgtcgccgtcggcgaacttggagtcgagggcataacggataatgtcggttgtgatctcgtggtagttgagctcttcgagtttctttttgatctcctcgacctgtaatatgactgtcagcacctattcaacttcacaagctatagaggctagacgactccaacaaacgcacctttccagcttctttttcctctacctccttttccttttgggcttgttttgcggactctggcctaaagatagacagccaggaatcaatccccaatgggcgagcctagacaaatcgtcagcaattgaacaagctttctcggagccgagacagcttctcccacacagacctttgcgccgggttcagacgacttgtttcgtcggtggctcccactcttgtctcgcacgctcctgaattttttaggcatgatcatctgtgctgccttcatcttggtgcttttgcgcagcgcatcgatatatgcggctgttgggagagcgaggtgactgtgtgttgtatccgccacagaggttgtaccatgtacggggcaggtaccgggacgtgggggaccgcacagcaaggcaacctatgcgaaaatgggcatcgaaggcgcagtgcgacggggagcagtcaaagaaaggaaaaacaaggcaagattagtcaagaatgaaggtatccgcctcgaagaagtgttgaccgtcgaccggaagatcccaaggttcgtgtttggatatcgttaaggtagttgggatgaggggttaggtttcaggcgcactgagcaagtatcaagttggggctttgcgatgaaccctcgagcgctcaacaagcgaaggggcgcccgccgggctgatgacgatgggtgcctgccaccggtgctccgaaccgaattgcctaaaatgacgaggccaaccgctggaggcaacgttgatatcaagagcgctggagatagaaaggctgagcgccaaaatacgggggacgggaagttgagaaggcggtagcttgttcgccaacggacaaggccaacaaattgaagggccaaagaggggcccaaagacgtgggcagcgcaacgcgtggcggatggggatgtggacaaggatgataagacctgtggaccacaggggaagtggatgcccaaattgctccctttagcttttgcttatcatggagcaacaagttgccagagcagagtttcagagttcagagttcagatgctgctcttcttcggccactgatcatcgagtcatttaaggcgttcgttggatagtagctctgctggctaaatgtccacacacacgcgcgactgatcaaaaccacgagacagcatcttgaatttcttgcacagatacgaatatacaagcgctgtggctaccttaccctacctgctggcctgcgattggatcgcaatgtcccagtgaacacccagatgcgcactcctgacccagaaccccgtttctgtgggggaaggaaggttagctgatggcgctcaatagggctgggctgtccatgatgttgcatcgatagctgcgtctgcacctgtcagtcgaaccgcgttttgggatctgcagtttgacagagacccttgccccgccttgccccccgttcgcaggtccgatcgggggcttcgttatggtgcttaccctaaacgggcagattgacgtctccaatgacgctctagaagatctacaagggtctagaagaaagctttatctcgatgcctgctgttgctgccatagtatcgtgagggtgactggcggcaaatgacgagtgtggtgttggctggatttgcaggtctacgtaattctcagactgcttccagagtcccagtgggaaaacgtgtcgtgaggtggtggcagatggtcgtagttaccagaggggctttcgcggcgtaagcgtctcatgatggctcagcaaatcggtccggagagtcagaggcccagacaccgggacggcagcaccgaatgtgatgcctattggtacaaatatacttcttcccctataaataagcacactgcgagcgaccgtattctttcatccttcgcagcatcctgggccacaattgtggtccaagaggacattggtcacctcatcagatccatgtcgcgactgtgagaacacacaagtctgttttaggccaagtttagggggactgtttgattgatatgctggcgcagagacatgacgtcacgataatatgttcgttgtgttatgctagagaaaataaagtgtgatggagtaatagttgatctgttggccatcaaggtgttgagggataacgctgaagcactgttttcaaggcgcagtaatgagtaaggcagcggggctggacatgtgagacagacgtcgacgcatgtatcgtaagttgaactttggagaagatcctgttttgctagtgatgagctgatcgcgctacatgacccgaggtgaatgctccggatatcatggtgtttccccatggaaatgtgcagtggaaatgcttaccaacaacaaatgcgcggaaaacggcatgcgccaactgaggggttcgattggacggccccggactcttggcagccagagacccacattccccacgaaatcaacctcggcagggaaggggtagcttggaactcggctcaaccatcagctgagccgaaccattcatcgccatgcattgaactcaaagtgctcccgtattgaccttgatgcatacgtttattagcagtgccgttgcctctgttcttttagagtttgtcgaccttttgccaattcaccaaatcaatcaagtcttgttgaaagtttaaagccaccagaaacatgtcggcccagatccccattgctgtatgatgaagcccccattgcatacgctccacctccgcatccagcaagcatatcactaacatccaggtgcaggtccgcgatcgcgttagcgacaaggccgcgaagacgttggacatcgttgccaagttcgttgatgaagagtgtattccgtatggttcacctcaccgctttccatattgaaaccacagccggtctaatgatgtcacctcagtgccgatactgtctttgaggcccaggttggcgttggtgaggcgagatggcaggctcaccccaagatcctcgaggacctcaaggagaaggcgaggtccctcggcctctggaacatgttcctgcccaagggtcactacaaggagtctccgggcttcaccaacctcgagtatggcttgatggccgagtggttgggcaagtctagagttgcctccgaggcggtcaactgtgctgctcctgataccggcaacatggaggtgttggccaagtatggcaatgatgcccaaaaggctcagtggctcaagcccttgatggacggtgtcatccgttcggctttcctcatgacagagcctcaggtcgcctcttcagatgctcggaatattgagctgaagatggtcagagacggtgatcactatgtcttgaacggctccgtaagtgccatcgtcttgctcaactacactgcgtaacactaacaacacaacacagaaatggtggtccagtggtgccggtgacccgcgctgcaagatctacatcgtcatgggcaagagtgaccccaacaacaaggacccatacaagcagcaatccgtcatccttgtgccatcagacacaaagggcatcactatccaccgcatgctttctgtctacggctacgacgatgcgccccatggccacggccacattaccttccacaatgtccgcgtcccggctaccaaccttgtgcttggagagggtcgtggcttcgagatcatccagggccgtctcggtcccggccgtatccaccacgccatgagaaccattggtgctgctgagcgtgccttggagtggatgcttatgcgtatcaacgacccgacaaagactcccttcggcaagcagcttcgtgagcatggcgttatcctcgagtgggttgccaagtcccgtctggagattgacgctgctcgcctggttgttctcaacgctgccatcaagatggacgagcaaggtcccaaggccgcgctgaaggagatcgcccaggccaaggttcttgttccccagactgccctgactgtcattgacagggccgtccagtccttcggtggagccggtgtcagtcaggacactcccttggccaacatgtgggctcagatccgcaccctcagactggcggatggaccagatgaggtgcatctgcagcagatgggcaggaacgagaaccgccgtggcaaggaggttgctgccaagattgctgctcaaaaagcaaaggctgaggagttgttgaagaagtacaacatcaccagatcggagattggctccaacatcaagcgctaattttttatgctataaaccctcttggattctggcgaatatttttggcatctgggaatgacattacattatcaatattttgtatctactgctccaccaacagaatgggatttttcagtgacttgttgatttctcgctgtaaacaatgggtgttttggggtgatcgcagtcgccgagcgccgtgactgtgcctctcgccaggggcaagggcttggggtgttgtggagcccgtgcgtcaatgctcggttgcccggtcgttgttacccaaaacggtagtctgttgttttttttctgccggaacctgtttcctgcaccacacacttgctcaattcacttgcggtccaaacaacccacagcccagcattgactctcgccccagtttggcagccaatttaaaccgaccaaccgctcccttcaccaattttgcccctcgtcgcctccagataccagcatctttgctacctcggacaacacaaatcctgcttttttggctcccccatctcgtgttgtttacgcaacctacctttcagctcggatcgctcggacagattcgattcgtcgattgcacctaccctccattccagtagcagcccgagcccttccgttcccgttgcttgcccaaccgaccgaccaaaccaaaaaccagttcttgtacgaccaaaacaaaccattacaccatacaaccatcagctggcaaaccagtcaaacaacatataacgatgccttccaacgtcctcgctgccaaggacgtcaacatgtcgcttcctaccaccaacaacaacaacacgacccagacctcgactgatacctgcggcaagcccgatactatgagcatggagtaccaccgtcaggtctttcagaacaagatggcggcacaggaggagtatgtcttccctcgatcattctactttctgtttgatcaagtcgctaacacgcaccctcccaggaaaacttacatttccccctcggataaccttatgtccccttgcacagccaagctgagtgccttccgcagcaagcaagtcggcaagtaagtacacacctcgctacctctgtcctatcttctgaccacaaatgctaaccgcactcccccaacagagtcaagcccaaatccctcttcgcccaggcgtcctctaagaagctcgacgccgcgggccagagcagcctgctgttcggcaacaagcccaagcccgccgctcctcctgccggcagcagctaggcattggacacggcgaaacatgaacaccctttttctttttctcttcgacatgaccgttctcctccgaccataacggaaaccattattttctgtttgtttggttacatcgcttctattttttcttttgtcagagtacacacactccctctacacaagaggggtgaagggggcaaattggtctatcgggggtttgggaggcattgggaaacatcaaaggcgtttgaggtttggcttgctagagagtttttgctttgacactttactttgccagactacccaaaagaaatcggggggaaaggaaggggagtttttttactggggaaagatgattactacatgatggattacacttttgcttttttagacacagacaaaacaattgatgggtggtgcattattgctgccgtatacattatctctgtctttttcttttttgttggtgattgtgttactggctggtcttgaccagagtgtttgttatcgagggtggcggtttgacgtttgacacatggtaccgggttcttctcatggcattttcatcaccccttccggatacagataatccacagctacaactctcaatctcaatttatagacacatcacatcaacagtacctatcttgttacttgtttcagcgctagaatcattctcatatttttctcgactaactaccaccaccaccaccaccaccacgaaacgaaactaagccttccacccactgacaatatataccacatcctcatcgcaaaccggatgactcaaccccaccctctgcggtatatgcctcgcgctggcgccccaaacgagcgcatacttgaacgtatccttcagcgtcctatgaatcctgtcacacacatcctcgatggtgctattactcctcacaatcaacgcctcgctaaagtcggggtcgttccccttcctcttggtgtaaatcctgaccaggttcagctccttccagcaccggtcaatcacatcctggatgccgaggtccagctcgcaagacatgacaaccgtgtggggttcccgggcgagcttgtcgaggaagtcgagggagacggagtcgatcttgttgtagacgtagaggcacttgatgtacttgcggtggttggccatgatgacgtcgatgaggtcgtcgacggtacagttctcgtctcggatgaggacttcgcagttgaggatcttgtagtcgcggaggatgttcatgatcattttttcgtcgattcctttggggggggattggaaggtgattttcatgccgccggcttttttgggtttgaggtagatgttactagggacggggggttagtgggggagggggaggaaatggggaggaaaggcgtacggaggttcacggttgagtctgatgcctacagcttccagctctgcttcgagaagggcgcgctgttcggctctcttggtggcgtcgaggaccatgaggatgagatcactggttttggcggcggagatgacttggcggccgcggcctttgccttcggaggcaccttcgatgataccgggtagatcgaggagttggatctcggcaccgccgtactcgaggacgccggggatggcggtgagggttgtgaaggcataggaggccacttcggatttggtcttggtgactttggagaggaaggtcgatttaccgacggaggggaagccgacgagggctattctggcgtcgccggacttgctgacgtcgaaaccggagccaccaccaccgccggcgcccgggccgggttcgaggagttgtgcgcggagacgggcgagtttactggggatggtgtaagtatgtaggggatgtgttgagggggaagggccactcacttaccccttcaagagacccaagtgatattctagggtgagtgttagatactgtacgaatatgagagtggtgaggtatgaatttaccagttgccttattctctagatatacctgttagtgaggtgttgggtgatagaccaggtggtatgtacaaactttgagtcttcctcatctcatcctcaatcctattttatttcacgattccgtcagccagtctgtgctcacgagacaactggatgaacatgatgataaatgagagactaactccttgatcttttccgtaatgttcaccatcttggcggttacgagacctttacagtgtctctactgtccctgtcgggagggtgagtggtataaaccgtaggttgatggcgacaagcaccaagttcatgtatcaagccgatattcagctataattcaagacagcagccaggacagaccccacgtttctcaggttggcagaatttctgaggggcaggaaggggcaagagtggcacactcaaatcttcaccgcctgcccactttgactagcttgcttttaaactggggtcagcaaggtgcctgggagcttgtcaattttccagacctaccgagtgacgcttggcgcgttgccagcagcatcactttcgaatcgcgcatttcaccacatcaaactttccagagctccagtccaagattcaaccatcgcattcatcgccagcgcaccaattttcactgcgactgaacatacgtacaacatagatcgttcaacacacgccattcacgacacaacagcatcattctctccaataacacaaccgcaaacatggccgaagtcgtcaacaggccagacacggccgtcaacctgcccgagatggcctccgaagacagccttgccctcaccaccacaaaaaacaccacagaagtcaccgcgcccgccgagaagaaggtcaaaaagatcattcgccgcaagaagcgaccagcgcgcgcccaagttgacccagccactgtcaagtcggaacccccagcacaaaccggcacgacattcaacatctggtataacaaatgggcgggcggcgacaaggaggactcggccatgagccaaacccacgccaagggaagatgcaacatcgccctcgactcggggtacaccaaagccgatggccatccaggcgccttcttctgcctatactttgcccgcggtgtctgccacaagggtcaggactgcgactaccttcaccgtcttcccggcccgtacgacatcttcccccaaaatgtcgactgtttcggccgcgacaagttctcggattaccgcgatgacatgggtggtgttgggtctttcagtcggcaaaaccgcacgatttacgtggggagaattcatgtgtcggatgatatcgaggagattgtcgcgcgccactttgctgagtggggaccgattgaaagaataagggtgctttccaacaggggcattgcgtttgtcacctaccgggacttggccaatgccgagttcgcaaaggaggctatggcgtggcagtcactggagggcaatgagatcttgaatttgaggtggtcgcttccagatcccaatcccatggcccagaagcgagaggcgaggaggatcgaggagcaggctgccgaggcgatcagaaaagctctgcctgctgagtttgtggctgaaattgaagggaaggacccagaggcgaggaagagaagaaagattgaaagcgggtatgggttggaggggtacgaagcgccggatgaggttcattttgccagggggcctaatgctgttaatccaaggggaagggaagggttcgagttggagcatgagcagaggctgatgctggaggcggcggaacaggagatgatgcaggaacaacggtatgatcagccaccaccacaacagcagcagcagggcggaatattctccagcagcactctcgccgcgcttcaaggcgcccaggtagcagttgcttcaaaaccagcacccaagacatctacagggccgttggtggcatacgacagcgactcggactaagccaactcaaccgactttgtagaatatcatcatggcgttccttttctcatagaaataccttggctacacaaaaggcataatgataccacatctgtctcacctaactattaaatatccttgaataaagcacctcgtgcctcccgaaccaaagatccataaccggtacattctgccctgctctttcgaccttggtcccccactcccgcttgatcatctccgtgatcaactcctgcaccgtctctccagcaagtatcttttgcgcttgatacggcccaaacatccctgccctgaccgctgctgagacgagtgctttgacatgcccaaataaaaagatatacgccgtctgctgcagactcagtccaacaacagaacatatcgccccaaacagcggcgcaagatgagcgctcgcgtccgggatctccttgctcgacccccttttgaccagcagcccaaaagccttgagatcacccctttgcgctgccgttatcactgacgaacccaggggggggagggattgcgaaaacgacctctcccatatccccagcagcgccctcccttgggctacactcgcccgacggccaacagtgcagattatgcttgcgtcctgggcgtcatctagctcgaccagattcgacagcgacgggtcccgatgcgccgagaggacaaacggcagggtggtggacgcgtaggagcttatcgacagcgggaggaacgctgcgaaggaggtgtgagggtggtaagggtttgacttgtggccgtgggcgaggtacgactccagcccggacgaaaaggcgaagctccccagtgggagggcggagtctgagaggaggaggtggaagtggtttgggaggtctaccaccagaaaattagtaaacctgtaattttttccccaagaatcaatcaggggttaaaaaaaggggggtgaaacaaactaggtgccaacagcggttgttccggtgatgatgatgatgatgagtcgtcgccctcaagccgggatcgggggtgtttgcaacgcttggctttggctgcggccagcttgcgctccagctcggcgatctcattgtcaaggtcatcatcggtgtctgactcacgatatgaagatatcgggtcctgaaataagtttatcgtcattttgtaacacttctggaattgtttagaacgagttgttcaagtgggaaacgcaaatcaattgtgatatcaaaaggtcgtgtaaatagactctcattgataagagccgcaattcgtcttatctaatgaaatccattatctcactctcgtgctttcctgatacttgcagcaacaaaatgttttgagcccggtagaatcggatgcaattgaggatgctcagtcggagtgcttgagacataagccattgatccagaaagggtgggtggagttaggaatttctgctattttccctaggtatctcacacgtacacggcagcaaccacggacaactgtatggtaaccagcgcaaaatgtcccaccctttctgtgtcgtgcgatgcctttgcaatcaccatcagtataaattggttcgttctgtaatgaagaaatgcgtgtgggaacatggacaagaagaaataattcgttattttacagcaccgggggtttatatatatacacaacctggaaggaggcacaatagatagaaagccttgaagtaccaccaggcgttggccattgatgagcattaggaccaagcctgtactgagccacatcgcgctggatatgggaatagacggactcgggcccaaatcgaccgacctctggtaatattttgcgcatcggcaaactttgcttgtcgcggacgatctcttgttctgctcctttccctttccttcacccccgccccagtgttttggtatgtcgtcatgaaaaaagacagcttttgacaagaatggggagaaagacaaaatgacaagaccacttgcaaccacaaaccaacccaaaccccaaaaccccacccagccaccgccatgattcaaaacatctatagtacagattcgcgccactttctctctttggacatcatcgccacatatattgaccgtcttctgaaaatgattaggtcgagaactggggggcatgcttctcttagtgttcggagagagatatcgtgagcgcggaatgggggtcaaaaagaacagaaaacgtccatcgtcccgtccataaaaggccatcattcaatgaccgttgcgctcgtgatcgacagaaaccccttgccgatgtcgttattggtcgtaggcgggccatggaagccaaccctttatagtaaaacagggggtgaagaaaggataacagattgcgagcatcatcaccggcaatggcatccggcaaactggtcagttgtcactgcccggcaggaactgggcgggaattaagttggatatgcgatctcgagcgtgaggggcgaagatacaaggcctgtaatatcttacattatccgcggacctgcggcaacatttagaaggggatgttgaccggggcagcctgggaggcggccatcatctcctgctcgtccatctcaggggcagcctcgatggcaatcgcaacgcccaccttcgcttgttgctgttgacaaagttagtgaaacgttcgcgatttgttatggtacaattacgtaccgtcatgtggtcaacgtcagcagagaaggtcatcatgagaggagccatgacgcgcttctcgagcacacagccaagtctgcccttcgagtcgatctgcgcccggaaagtcgacattctgaagtcgtacttggctccgaaagcagtaacgccctccttctggagaccgccacccaacatggggttagcaggagcaacactaagcgacatatcgacaccagcctgaaccttgtcagagaggcggcgccagtacgaggtattcagagcaccctgggcctgcaactgagcgctggcgatccagtcctcggccttgtaacgggcaacataactgacggccgttaccggaggttcgagtctcgactgacgttgccaaacagcttcgaggccgacggcaagtttgggagtgagcgactgcatgtaatgaccgataaggataccgctcaaaccgccctcgaggacggaggggttgagggccttgagtgaggccacaaagtcggcaccattgtattcgtgctcgagctggatggaatcaccctgtccggtgccgacctggaactgcgacttgctgacgtgtgtcgagtcggggccccatctccagttgaatcgtccagaaagagcgccagtctcatcaatgctgccctgggcgaaacactatccaccacatattagaaatgccagaagtaatagtcccgccaagtcacatacccggttggttccgtaaagagctgcaaatgtataggggttcagacgctcgcccagcgcaaactgatgtgatacttgaaaccttgagattgccagttaggatcatgtcttgtaacttcggccgccagcaaccatatccatcggcgcatcgcggtgacgctggtacatgttgaaatcatggttgccgttgtatagaaggaaacgtacagagggctcaggctgaaaggctttgtgagctcggcgcgaaggccggagaacatgtgctgctgggcaagaacatctcggttgacctctgcaagttggacacagtcagcgccacttcccaatgccaacgtctttttcttttagagtcacatacccttggagatgtcttctacctttccgggatttgacaagccgagctttgctctcctctcttggaaagcattgtaaacatctgagagaccggagaagacggggttattttgcaatgccgcaaatggcgagctgtagctggacgccattatgagagcaatcgcagcttgtgaggggctggtttcggctgattctatatcggaacggaagtttcctcggcgggaggagaggcagttggtagtgaaatcgccggggctggtccgaggggttctctcgatgtcgtggagtttgagcagcttgctggagactctcgtctggtttgctaagacctgagcttgacgaaggcaagagccaggccaaaaatttcgcggtgcagcaggcttgcccagtttgttggcccttgcgctgcattttttggtggggcttgctccatgtttgttagtggtcgccaaggaacgagcaaaactcgcagcacccaaatccaggtgacgacaccgaaccgcccgccacggccgggtccggagaaagtcacgaccgaattctgtacgaaaaactccgtacatagagaagtatccaggtactacactaagtaggtaggagcaagtctcttgcctagcatagcacccgataagatgcgataaagaaagccattgaaacatcaaaactatatgtcacatatgcctcttccagacggcaagactggagacttgaaattctatccgagtgaggtgtagctgtgtgttgaatgtcttatagttgcagtatatttaactcatgatctttgacgtgccacagtggccgttcccttgtttgacgggagggttgatcactaacagtgtaaggtaggcacataggtaatgcgcagtggcgcctcacccttggcccgttccctccagcggaagcccggattcttccaccttcgatcttaatagcgccccgtgggagcctcttgcacttgcttcacgtcggtcgtctctaagcggatagcagcgtcgcattcgccgcccttacactacacgcttccatttgctcacggcttctgattttgtttcatccgcttgtcgttcatcttgtcccccattctccatcccgttaacctccacgctgaaagtggagtccccataccaggcccaagtcccacgaacttcgctcctcatctgagatttgcccgccaatgcttatctgtggcccataagtcgcctgttacatcattcggtataaagaggcgacgccgaatccgagctttgggaagccctcttcttcatccacagctggtgtgacaaacatattcatccacacacggcccctcgtcgagttagacgtctttcttggcaaaatccatctcgacctacgacctacctgacttggcaaggttgaagataaaagaggggcatcaccagttgcagagatcacttcgtaatccgaggcgcagaatattaccctctcccgtgtacatcctactggacgctcgcaaaacgcggacaatcttgaacggtcaccatggatacactcctgtaagtcaatggtggagactcctagacagcacagctccgtcgagcctcgatcaatgaagggcatcagggacagcattgctaatgatgatagaactgccgaaatcgcggccaatgccccacgctaccgccgcaagagttcaactttcatcgatggcattcacgatgtcccaagcgaggtgggcaatttggccccagcccagttgtacagcaccatgtctggtcgtctcttccattcggggagaatcgccatcgtaatggttggccttccagctagaggaaagacgtatgttccctcggtgaaaccacatgcaccgtttcgtggctgacaagcagtatatcagtcacatctgtgtctccatggcacgctatctctcttggtatgttccccttctatgtggcaggacgcaatgtgaaactaacatacccataggcttggtgtcaagactcgcatattccaccttggtgactaccgccgagctacggttggccaaggaggccatgttccacaggactatttctaccccaatgcctcgccagcgtctgtcatgcttcgccagaaaatcctcaagaaatgcagggaggatatttacggctggctgaaccatgaaaatggccaggttgcgatttatgacgccgtgaatcccaccgcaagcggccgtcgtgcccttgccaaagaatttgccaagcatgatgttcagacactgtttatcgagtcttttgtggatgatcaagagatcctcaaagaaaacgcccgaaatgtcaagatttcgtctcccgatgtaagtacaaaaaacaatggtagctgcgccttgcgagcagacggaaatgctcacagtgtgcagttccacggcatggacccagatgaggccgccaaacgctatctcaaacgcatcgagacgaagattcccgtattcgaaaccatggcagaggaagagctcaactacgtcaagatgatcaacgctggccaggccttcttttacaacaacgtcagcttcaactacctctcgcaccgcatcgtcttctatctcaccaacctccacatcaaacaccgtaccaccttctttgtccgtgcaggtaccgctactgaggaggattcttacaaggccgatgcgccgctctccgccgagggcgaggcgtatgctcaagttatggccgagaggcttatgcggcatcgagagcaagagcgacaggcgattatcgatcagggcggccctgatgttcctataacgtccgtctcacgatttgcaacgtcgaccaggctcgcggacaattcagacaagccgagcatcttcgagaagttgggcgtacaaaagttacgacacagaagccaaatgtcacaaattaacccgggagtgtgtgagaagctttcggagagggcgatcagaaatttgtatcctgaagaggtggagaagcacgagttggatccgtatcatcatcggtatccccgcgctgaggtatgttttctttttctttttcttttcttgattatttatattgtcccctaaccccctttagtcctaccacgacctagccgtgcgcctcgaacccatcattcttgagcttgagcgtgagcaaaatgatcttttgatcatcgcccacgagtcggtcttgagggttctgtactcttacctaatgcactgctctactcgagacattcccaagcttaagttcccccgagatgaaattatcgagatcattcctgcagcatatcagaacgaggcaaagcgaattcacattccgggcctcgacccgcggatgatacctggcagcccagaggatataaggatcccggtgccgcctgggttcgatgactttgggaaacggcttagtccgattagtattccggccatgatgatggggactccgcctagtgccaccgaagtcacggtggggtttgccacgggggataggaaggggagcatcagtgtgagtaatactggtggactgagaagtgtcagcggtagtttcagtggaggggagagaccggtgacggagaagattgtgaataacactgcgaaggagatggtggaggacaaggttgaagacgaggattaaatggccggaagaacactgttttggtgattttatttattcagcggttacttgaataatgagtagtatgaatatcaaactgttagaatgttcatgaattgaacctgggccgcgacattaaccctaacccacgcggacaaaggcgatgacgttacccctctgcgcccaatgcaagcgattcggagggcagcttccggccagtttcaccacgagccttctatcatactcttcgatttccattatgggcggcaagacagcagttgtcacgggagctaccggcctgttggggaggcaggtgcttaaggcttttgcaaacaatgactggactgtcaaaggaactggcttctcccgcgctgatggcactgacatcttgaaggttgacttgaccaatgctgatgagctgaagaaggtcctcgacgatgtcaagtacgtatcacacagcaaacaaaagagatgtgactgactaacaataacgcagaccacaagtggtggttcactgtacgtcaagactagcatctcatctgatttgatagcacagctctcaaactaacccacatgttatcaaagccgctgccaacaggtttcccgacaaggttgacaaagaccccgagggaacacgagctctcaacgtcgaggcacctcgcacacttgctcggctctgcgcagagagaggcatcttgttgacttacatttccaccgactacgtgttccccggcaagcccggcgatgctccttatgagaacaacgccgagcctgccccgaccaacctgtatggacagaccaagctcgagggcgagcgggcagtcctccatgaattcaagatggccggaaaggaaggtctgggagtggtgttacgtgtacccgtcctctacggctcagctaagagcaacgctgaaagtgcggtgaatgtcttgatggattcagtactcaaagctcagcaggagggtgccaatatcaacatggatcattgggctctccgctacccaacaaacaccgaggacattggccgggtgctcaaaggtgagcattttctgagtttgcccccaacaaccccgacaatttttaaggaacggggaggctaatggtccctggtagacatcgctgccaagtatctagagaccagtgatcggaactcgctgccgaggattctccaattttcgagcgaggataagtacaccaagtatgagatttgtcagttatttgcagagatcaacggattgcccatcgaccggatcaagcccaacacggaagggaacgacccgaatgcaagtgtccagcggccttacgattgtcacctcagtaccaaggcattgaaagacttgggcattgacgtgtcgacccaggatttcgtgggatggtggagaagggagtttagggcttttagacactgatgattgggaggtgtgagacatggggagacacgcccgctgaatctcgatacttggacagctgccccttggcatgccaggcttgacagaaacgcggcgagcgggaggtgtgctcaggggttggtatgtgatggtgttatgacttgagaatcgagatagagccctgagcgacccttgcttcccaccctttgcaaccttcaagacagtgatcagtgagtggttcggcgaatccatactggataccgtatagcgtcatattgccgaaggccgtgacgaatgcaagtttgcgtggatttccgcgtttgaaggagccgtgcaaattccgcggaaaggcaggcacatgtttgtacccgtgaaaagctctgtatatcgagatgaagggagaggtggtttgccttgtgactacttaatcatttccggatcagatcccttccttctctctctttctgcttggatctcgtcccctaaaaacgaaaagattggctctgcagcctgcaccacatacatagcctggagacccttccgatcgatctcaggcaacccgacgacgtggttggcgtcggctatctccagcagcagccccggtacccctgtggcaggacccctgaaccgctgagtccccactgatcgcgacacctcggccgccaccggcccccccgaaacctggcaagcacagagtaacggaccgccaaggatccacgccacctgagcagacaggtgccaaggaagccggccatggcagccaccaaccagaccaacaccatccacttctcaccaagactcagaggcagcagacgccatgccctgacaggcaagacggggaatgtttgggcggccaggcttgcagtagacgatggctggctgcccgctagcacaactagcagcagcatggcaaccgagagcagcaccagcaccagcaccagcaccagtaccacaaacagctggggggtgagaaggggaaggggagggggcaggagacggtctcgctcgctctcgtccctgctggaggagatgcgggagatactgccattagctgttgagaagggacctggaagcagaggaactgcaagacggacgactggaactgccttcaacccatcgttcgagctcccgcctcttcagcctctcctgctgccgcagcccctgtcgttgagaaaggacggggggaatcgtgctcaacccagactcgtcggtgccgatgacgtgaataataagttcaggctggcggggcacacgccgcacgacaaccttaccgagaagcttgcttgcttgtcccgcccatcagctgcacctgccagcaccctcccaggcccggttaatggtaatggtaatagtaataagaagattgatgtccggagcaaaccactaccgtcaccaccgtcaccatcgtcccaaccgtcccaacaacttcaaccatcgtcacctttgtcagacatcaacatcaaccagcagcaacaccagcagcacgaaacacggcgcaggcacgagacgccgcagtttgtccgcggggagcacgaggtggcacggctggaagccgaaacgaacgggacccttgccgaacagcggaagtcagactgcgacgtccaacagcaggcgcaccagcacctgcagctatccgcggtaccaccgctcacgcccctttcagcaacgtcccccatgggattcagtccgatgctggacaagtttttttcctccgatcgtcgacgacgcaagtccaagacctcgcctcctacctctccggattccactccaaccacctcacagaaaaccgcttcgcccatctcacccaattcctccctttcccagtggtcgtttttttcatcaaaggacaaggagaaagacatcaccagccaaaccgctggcagccaatccccggctcagaaaatcatgcctcgacattacatcaaggcaggtggacagacgagcactggcgcacgagatgtaagtgggccaatgtgacatcacacttccggggaagggttcactaacaggttttatgcagtcgctcaccattttgtgtaagaacgactttgtggatgttgccattagtcgcgaaaccacagcacacgatgtactcgtggagctgaagtctctggagcagttggcagaattatcgtctggtgtcctgattgaacagtacaatgctttcggcctcgaaagaccgctgcggcgacaggagcgactgcgccatgtgatggacacttggggcccagactcgaaaaacacactcgccctgtctcatgatggcccaccacacggcttgaagctggatctcgaaggtgcgccccagactcgcgaggcaccaccgggcttttgcttgttcatgtactatcggggcccaggtccgaaattcaaatgggtgaagcggtatatcatactgtatgaggacgggagaatgattgcttcgaaatctagcaacccaaaacgtggcgacaaggacgttgtggctatatgccatctctcagattacgacatgtaccacccgacggaagctcagctgaggagacacctgaaaccaccaaaaagaaacgtcatcgccatgaagagccaggagagaatcaacacgtttgaaaacacggacaagtatgtgcagtatgtctctgccgaagacaaggagattatcagaaggtttcagagtcacgtacaggcctggaggaactggcacctggccaagagtctgctgagagagcccgagcccgaaaaaccaccacaaatcatgaccgtggcagccgagccaaggaggacggtgaaggaggttggattaggaaacgggcacaaaacaaggatatcagtggacgaatcgccttacaccattggagcgtttaaaccgctgattgatctcgaccggttcaacaagtcaatcgacgattttggcaaggattggacgctggttgacggcgccgagaggaatgatccatctgctgctgccgcttttcccgaaaactcgctgcttggcgcggcatatgaagagcgaaagcagcagctggagtccaagtcggcaacggtagccggaacagcaggtgctggtggtaggcgagcatttccccccaccccggcggcgggcgagagtggtgggagcggtagttgttttgtcgaccactcgaggactgtttcagctacagaccggcgaccgcaaagcccagattctgttcggtcgattcctagggacgccattcctagtactagcacggccgctagagggagaaacgagcaagttggttggtttgcttctgcggcggagcattcaagacagcaacgcagtcttattgagcagcagcaacaacaacagcagcagcagcagcagctatatcatcagcagtcgatgccacctcagattttgatacaacggcgccctagtacgagtgcaggatctcgaatgatgggcggtcttggacggtcagtgtctcagcggagatcacatggtaacagtttgggtagtggtggtggtgttggtcatccggtaccgcttcctcaacagcagcagtttaaccagccagcgtcgaacccacagccccgtcgaccgatgaggcagcagcctcaacccctccttgatttgacccccgaatttcaggaggcgccgcagtggtcgagggagaataaaggacgggcggtgaagcctcaggatgggagaccgttggttgatttggctaccgggccggcgttggtttcgggcgcggcgaagattgagcagccccccaaggcgttgattcatcggagcgagcagcaggctttgatgatgcagagacaacagcagcaacagcagcagcagctgggcatgaggcctgggactagtgctgggctgcaaaatagcatggtattgggaagaagggggacggtgaggagtagtggtggagggataaggccgggaactggtgatacgatgaggagtggaggcggctacccaccaggaggggactatggaaggcaaagggggatgtcgcttgctgggcagggcggtggtggtgggttcgtggataataatgggctgggaatgcagccagatccgagagtgatgcaatatgttttgcagcaacagaaggagttgcagaagcagcagcaggaggggactcggatggggaggttgagaaccacgagtggtgggagtcaacctcagtaattttggacttccaggtctacaggacatactacaactacgcatgatacccattgggattgatgacacggggaacagatacaggtctgttaacggacaggacagagggggtgggtgatgttttggttgattttgggagttattttagctttgaacaagccggtctttttgttttgtttttatttctctggtttaattcgagagttgggactttgtactagtcttttgctggttatctctctgacttggggtgtttttggtggttatctactgatgggatgttttatgtgttcacacgcgattacttcggtttttttctttgatgttctgttgttgtgtgtctgtcatgtgtttatgaaatttggtctgggaaaagcaaaaaaagtcaaacataattttgtttaatagcgggtggaaggggagaggaaaggaagaaagttatcaaggtgcaggtctgtctctgtgtagctcagaggttgtggggggggttgaatgaacaaccggaaagagatgttttttgtattgaccttgttttgtaattgttctgctgtgctttattgtgtgtgtgttcttggtcgtttggagtttcttcttgttgggttattgtcctttcagagtttggcagctttaaaagaggctatcaaatccatagcatggcttcttggacatcgtgtaaatgaaacctgcacatatacaaacatagaatacatagaatacatagacaaggacttagacaatcaacttcttacttcactgtttcagttattggagtgtcatccatgtgtttatatgattaggttaggtgtattgctttactattctgatttattattcttttttcatgtcaagagttgcaacccgagatggccttctatagctatgggaaggaaatcccaacgacgctcgctttttattgcagcccccttcttatgaagtcctcctccacagaaacccggcatttatttgctgcgcttgtaaatcttggccaagaaagcttcaaacacgctcttcttgagcccctcggcctcatcaatctggccgatccgctcccggatctcagtgacaaacttctcctcataatcctggtagcgctgctcaagcttgagatcgtcatacagcttcttgatgaccgtctctttggccttgtccttgcggccgtagttctcctcgaggatcttgcgctggtcgggggtgacaatggcaagagcctggtttacaagccaggagcacttgttgtccatgatatcggtgccgatcttgccaatgtgctcgggaagtccaaagttgtcgaggtagtcgtcctggatctggaagtactcacccagagggatgaggatggactcggcctgcttgaggttggcgggggtggcgatgtcgaggaggagcaaagagagagcgacggggaggtagaaggagtaataggccgtcttgtagatgacgatgaagcggtacttctccatggagaagttgtcgaggttgacgacgtcctcgggggcggtgaggaggtcgcagagctggcccatctcggtctggaaggtgacctcgtggaagagctcgaggaggtcgacgtagcgggggtggtcgcggaagtacttcttgaggagggtgtagatggccgcctcgagcatgaaagcgtcgttgatggcgaccatgccgacgccctcgtggcggtaccagcagggcttgccgcggcgggtgatggacgagtccatgatgtcgtccgagacgaggaagaaggcctggaggagctcggtcatccagccgagggtggccgacttgaagtactcatcttcggtgagggggcggccgaggaggagggagacggagtcggggaccgacatgccgcggttgcacttgccgccgacggcattgatctcgagggactgggaggaaaggcatgttagtcttgtttacttcggccagcttgatacatggaacgggaggcctaccttcttgtaccaagcgagctccttctcggggagattgtacgacttggcatgctcgagtagaacctcctcgagcttggggaagacggactcgaattcctggagggtggtcttttgcggcgcagccatcttgtctggggatctctgaagagacgaagtgttcaccgtcggtcagcttgggccgctattcggaaggttggagaagataggggttcgggggaagcaaggcagcgggagaggtgcggggggtgtgtttccttacatataaattacaagcgaaggggaaaggggcgggcagttgccgatttactgcctgtttgggtatcacgggagaacaataacagatgacaaggcgattctaccgatcaggtaccacaagtgacaaaggtggatatcaacaactgggccgttacgtactcggcggtttctccccaatttcacgacccctccttgcccccctttgttgtggggagctgcgattatggcgataagagaaccctgatggctcattcgagcaggcggtgagctgttttgctggctggctgtcgtgctggcggcgggaagtggggctggcagatttccaagggaccaggggacaggacagggggaaatgtcttggcgctgtctgtcgcggtggaccgaagacagacgcgttcctgttgggggtttcgtcattgacaactgcgccttgctgtcacccataggttgcgacgatatccacgattgcatttttggctttagatatttggccgccgttatgcttgattgacaaacgcctggttaaccgccgttttgggaccgatatcaaacatatctcccctccccatttggagctattgttttggtacatcctagccaagacaagaccatttaacaacaccctcgtcactggaggggttgcaccacaaccacaaagcaaccaccatgggcctctctgcaaaggatgctttgcaactacgagatacgctgcaaatagcagtggtaaaatgctccgaaagatgtctttaccacgctgccaaatggtatttggtccatcatggctacctttttaaacacttcattcaactaacactcggtgtacatagggcggccgaactcctcgatgcgcttcctcaaccatctgctgccgactttaaagcaacgcaagacttaccatcgtcttacattcatcctgctttcacaccaaatcatgatcctgccgaagcggctctcgaagccaaggagctcagccgttaccttctcgccaaatcgttattcgactgcaaggagttcgacagatgtgccgccgtattccttcccgagtcttcattggcagagatgttggggacaaaagtagacgatgccaccactacggaagggagcgaaaagcagaggccttcggttgttctaccttcggagagagctttacctcagatcagccagaaaagcttatttctcgcgctgtatgccaaaatgatctcgggcgagaagcgaaaggaggaggaatctgaaatgatcatggggccgcaagacttggggacgattacgaacaaacagctggccgtggtcagtcggttcctcacaaagtggttcgaccagcgaaagtcggagggaggcgatgttgcgcccagccagggcttcctcgagtatctctacggcatggttttggtgaaggagaagaacgacagggctgctttgcagtatttggttgaaagtgtgcaactatttccgtggaactggggtgcctggatggagatcaccaacctcatcaccagagttgaacagctgaacgaagtaacaccaaagctaccccagaacatcatgtctttcatctttcacgcccatgcttcgatcaacctttaccagcaaggcggtgagatcgccaatgctctgaacgacttgctggtcgtgttcccaacatcatcgttccttctaaccgacaaagcactgctatattatcactcgaaagatcttgtagcagccgagcaagaattcagtcagctacttggacttcatccccagaggatagatgccctggaccattattccaacattttatatgttttgaacctccgaccaaagctggcctttttggcccatctatgctctagcattgatacgtttcgtccagagtcttgcgtcgtcattggtaattactactccctactatcttgccacgacaaagcagtccactacttccgccgggcgctcatgttggaccgctcatgtctttccgcgtggacactcatggggcatgagtatgtagagttgaagaatactcacgcagccatcgaatcctaccgaagagcggtagacgtcaaccggagggactaccgcgcctggtacggccttggccaaacatatgaagtactcgaaatgcacgcgtatgcactatggtactacaagaaggccgctggtctgcgtccctgggacggcaagatgtggcaggcggtgggttcgtgcttgcaaaagatgggccgcgacaaagacggcatcaaggcgctcaagagagctctgcttgcggattcctactacgattcgtcagcaagtagctttggaagcacagggacgatcgatcggatgacgcagatggatcctgaggtcctgctgcaaatagcggcaatgtatgatcggatggaggaagaagaggaggccaaggcgtacatggagttgtgcgttgctcaggaggatggcggggttaccaatgatcaaggaccaggtctaggagattccatcggcgtccgcgctgatagccccggctcagatgatggcgaaggcggaggggaaagggtggcggctgctgaggggacaggggttacggtggcaacgagcaaggcccggatgtggttggcgaaatatgccatgagggtggaggactacgagacggcgaatcgtctcgcgacggagctttgccaggatggcgttgaggtggaggaagccaaggcgctgatacgggaagcgaggtcgaggatggaacagacgagtatgatggagagctagaggcagcagttgtcgcatcagaagttcctggagtttgtggaaggtttgaagatgagagacaacacgagatttgctcgtcgtgatcctcgacagcctgcgattgtgaggtctgggccgggtccgagaggcgcaaaccgagaggaagagggagaatggtattcgcaactggaggatgatctgagtatgaggaggacttcgtggcggtgagtctgtatgcgagtgtagatgtaagcatcattgtttccatcactatcgacggttggttgagccacacgatgagttcgataaacaacgcaattcgataccctgttttaatggcatagctttcctccagcttctgctctaggtacacctgtgcttcactatggtgatggtcacaaacatgaaactggtggctggcaaatgttggcgctcggtgtctccgcttgcgtgttggcagttgggtttccgttgccttcactccttttgttgcgattccgaccttcgcttaccccccagatcttcacaagacatgcggttctcgcgttgcgtacaagcttcgtctcggggtgagacatcctgcactgtcctacgcacagtcatgatgaccaagagaacatcatcaatgcttgcaaaccagctcaagacgggagtgggggtacaaggtgatatccaattctcccatgtagttgaattcggccaacctcaagcttagcatcgccgtcctcgtggggccttctaggaatacaaagcccctgcctcccggtgtcacatcccgcgattaaattcccggagccgccttggcgagaccagatttagtgtacgggtggcagggctgaactccagctctggaacatgttcttgttctgacttggtacgaggaagctttgcgtgaaatgaaaaccagcatctatgatcgatacttggggtttgagcaagcagttttttgcaatcactattctgtgtggctgtttcttatctacaacatgtaccacaacctaacaataccgacaaggctgcagtactttccgccgccggtgccgctcgccgagctccaaccctcccagcgtcggtttatcaaacatatctccaaatctggaccgcggaattgacttcttcacatggcgtgacgatgcgagttccgacctgtgtgccagccattaccagccgcctcgacctgtgagagctgaacacgaccatacctacccctcaaggcgtgcgtgggctgccatgtgcatacattcaatgttccatgcaaccaggcacaccaatggcggatgaggcgttcctggacctagtccgtctgcaccacggatagaaccgcccagtcaggggagactgggctctccaccttacatagttccccccaaccaccacgcagccacaccacacttgatccaaagttggaggtgtgtgtgtctcttatctctgtgctctgctgctgtcttggtgtgggcgtaccgcctaacctcccgagaagggggaagatctccgggtgttagctttcaggaacaccttcctgctcctctgggataggcagccttgcgagaagttgaaactgaaaagttggctgactttgcatacagtgtacgtccacagacagcctgcctccatgatcaaacaccagaagcttacgaatgtgatggcggttggtctgcactggggacgccccctttcacaccgcgatgcgagaacaattgcttttcttcggcagtcgagcggggaggggaaatggctgggttgtctgtgggtttgctcaagaagcctcggggatggtatataagtgtgtctgttacctcacctcgagtcgttgcgagtgctgttgagatttcttcttccgtacctctcctgctcggttgctccacgagtctagagtgaggccccctcaaaccattccggactctgaataattcgtactcgacgtggctgccaacttcttatgatctagcttttgctggtattcagggcttactttaaaatcttgtcaattctcatccaagcagaaaaaatattcttcccaaggaggtctcctgacttcttctctctctgacacccaaccccctaccacgtccgtccatccgccaccatgaggctcttcagcacaatgacgctggccctggcctggatcgtctccgccctcgccgagcccaaggtcaccttcatcaaccaagacaacaagcaccgcaccatcgtcttcacccccagcgtcccccacaaggaaatcaagcccctccgcgtccccgcccaccaagaggtcacccagcccttcccccacggctggatcggcaactggtggtccgtcaccgatggcaaaccttggatccccggcatgctgggcgaggtcaccttcaacggctacatgggcctgaccttctttgacgtctccgccatcgccaacgaccgcgacaccagcggcgtcaagatgatgtggcccaggaagtcggccagcgtcacctcgggctgcgacgtcttctcctgcgggaacgagtacacctaccccgacgaggtgcagaccaaggccaccgacgaggaccacctcatgtgcagtctgggtgacggtgtcagccctgtctaccctcgtggtgcgaaaaagtggaagaaggaggcgcggaggcagggggaggaggagaaggtcgtcgtagtcaagccctcctctaagcccaagccttccgcggtccccaccaccccagccaaggagcaagaacaacagggcttcagcagcggcggtgaaaacacctacaacggcgacaacgacaacctttaccgataccgccgccaccgctattaccgccccggcaacctcggcgagtaggtcgacatcctcgacgacgccggcgagcacattgacgccaacaagatcaagtgggacaagatgaactaggacgccatcaagtgggaggacgtggactggggcaccctcgacttcaccgtcaacaactacttggactggcacctcctcgaggcgcccaggcgtccgagataccagaggtggacagggctgctttataacccccgtcctgggtgggggaggtaggctcctgttgatgttaagggggatgagtgaaatgttgatgaaaactcagagctatgacttatgtctttatgaaggaaatcgtggggaaaacaacggatacgaaatgaaagagttggattatgttctcatgattttgatggccattatttattagaggtcaggaagttacgaagtgtgatacccccgtcatttcaccttgacgagcgagggaggaaatacagacggtttgccgggatggagtcatgaatgatgctttatgataccaacgggatgattaacaacgtatgagattgtcttttcagaagggaaaggagtttgggatcacaacaaggtcggattgtggtagggttggtcgaggacaggagaaggggggggttggcgttggcgtactggatatagtttggttttttggaccaggctcagacgttatacatattaatttcgaggaatacaaaacacaataacatagaaaaataatttactagatttttaaactgtgatgcttcttcttgtcaatgttggctattctatacgatgcttataaaaacaattctttacatatcttctcacgagcacagaaccgcaaaagctggccacaaatagtgtgatttgttgaaacggaaatcagtgacaacctccacgcttttttcacagctcactcccagcagccctttttaccagcatccatatctgatctggaagagtgtgagtagatgtcgctacacacccagacattacacctagcatctccataaaaaataagtgtttaatgaataccttacactacctaacagaaattggctgtaaccattggctctttagttggaatcctcgtcattcccgaccactaaccacctaaaagcatcggtcttgtcatatctgactgatccataagctcaatgaaaagcaaagcaatgacgcaaaaaagaacgatattgaccactacggccgacaccccgcggtagtaaggaacgaggcaaacccacgcaaccattcggcctttggtatgcccatgtccaagaggctgtcgtgtagggcgtaagatgcgcatatctatttcctcctttccgtctgattggcgtgccgagaacaaagaggtgaaaaacaagaaatccattattgcccagttccagtcaaccccccataatcttttttgcctttgtgccaagttcttgtctgttgttaaagggtcccagcccgtcccggactgtcccagaccatcctgtcccgtcggttgcccacctatgctcatgtcataacgcgaaaagaaagaaaagaaagagagaaaaccaggcatgatctcatataaccacagtgctcccgcgccgatccgtcagactcctctcccattcccaaccaaactgcacgtttgccaagccatattaaaaccgaaatgaatacagaaccacccgccaaaaaaatagaaaagcaaacaaaaaaaccaatacaacataaaacttgctcaagcaaaggtaggtgccgtataaatcagagtgcccatcaccatagctccgccaatagccgcaatccctacgcgctctgcgagacggaacaaccgaactttctttgtcggcctctcaaacggacgaagaacttggatagaggactcaacagtctggccacgaacctctgtagcagcctcctcgaggccatcggccttgaggacctcagtacccgccgtctctggcacaccgccccacttcaagtcgtcctctgtttctaccgacatatcctcagcctttctcttgcgctttacagagtcagaattcgccttcggcttctctgcctcgacaagcgactgaggctcatcagcggtctggatcgtaaactgcacattgaccttctgagattcaagatcgctggtcttcgacgccacgttctcagcgttttggtccacgggcttctcagtctcgggctccttagtcttcttagtctcaggctccttagtcttctcttgctccttgtaggcgtttggctgatttccgcggcgtgcagagctcgacagtaggcgatcaagactatcagaacagatcgactgtgttacggtgctgttgaacgaggtttccatgggaggcaatctagaaaagacctgttgatctaagcctgatagatctctcgtgtgcatctcgttgtcaaaccgggggttggtgggcattgcattgcagagagcatataccgacgacgctgggcgagcggcagtctgagtctccaaagcagccttgttgaaggtctggccagaggtcttgttgaaatatgccttgttcccttctcgtgcagaccagaagtctcctttgcctgatttcagacacagagactcaaaatctcccttgaaagaagccggccacgagttaggctgggtagtcttccgaagttcaggaagaggggggccttggtgcatagactgcgccacaccgggacggtcattcaagagcttttcaattgcaatgggattggtactcttagcacaagcttcatcctttttcgagctgacaggaatgacgggcgatgcggtgtctgaagccgggtggtccagagtgtcgtcttgctcatcagacactacaggtgcagtgtgatggttatggacaagggtcggtctgcccatcatcggggagagtggaaggggagatgctggctgatcacagtcgaagatatctaggtcgccaataacacctgctttaatgtcaacatttgaatcggtaggcttgatggaatagcaaagtaaagacatactctgatgctcagaggcagactcattgtcatcatcctcagagtagttcaccatatcctcgtcgagaacgcttgacccgtcgctttgatcatccatgtcatgatcgctaccgctgtcatcgtcatcatcgctcgagtattcaccttccatgaaattttcaggatagttgacgttgctttcggcgtcactcaactcgctggtgttgtcctgatccaaactgtcgaggctatggtcgctactatagttcgaatccatgtcagaatcgaggacggtttgctcaattgcctccaaagattgggcagtctggccaagcgccgaggcgaactcggtcaaacgagaagtagcagcccccaagggcgaggtactctggatgggaacacgcctcgctggctcagaaatgctcaggatgtcaaggtggtcacccccgacatcctttgtaaccgcagcaccagatgatccatactcggcatctctatcctctcggaacataagaggggacaacggaggtgaggagagatcgatgaaggcggggctgctattgttgaaagagcctgcgttcagtttggaggtccaggtatggctctggctggaggcctcaggctccgtaagatcgatcacctcgactccagggacaaatttgggcggaagcgaatgtagtgaggtcgaagctgtctggggattcattgtcgcggagtggctagaataaatgctgctgtcgctagaataatcatcaacatcagagctgacttcggagtcgtccgggacctgaaatgttctcgagccacattcgtcgccgacgctgaaggtctcagtcagtgccgacgaggcaaatgaggatgggacgtactgtttagtgggctcgttgaacgagacaccaaacttgaccgaaacaggcatgaatctcgaagtgccacgatcgactggaagaccgaaggtgagcctgtcgccgtctttgagctctctgggctctttctcaagcttctcgcgctcgttgagataggttccgtgcagagaacccttgtcccggacctggactttctacatgggtaatcagtaagcatacgatggcagaagctgaaacgtcaccacgaatcccgtaccttctcgtcgatatcaacgctaatttcagcgtggtcccgtgacataacagcgctgtcaaaccaagcgttgttttcggcaggaacgaaccctttggcagagaccttggaggcacgaccgatggcaatcgtgttgttcaaggctgtcagggtgatttgtcgccgagagtaggtggtggctgcggctgtgctgctttctgaactctcaagcgtgagatcgatttgagctgtatgaagacagagtgtttagttggttgaattgaagaagaaaaaggaaaagaaaacaggtgacagacctagactctcggcacgtgaattggccgccatcttgctctttgccttgacggaatggcgtatgtgggtgggtaaggtggccagagtttaaacgggagttgagagagcaagcttttggctgcagaacagtcgaagtcaattctgccagcgagcaagcctggcggtgatgataagaggagggcgagaccggggagctcggaaagtcaggtgcagtcgcacgaagaggaggggaaatcgaatgagagaatggttgaagcaaccggagtgaagcggtccccctcccacgtcagacaaagctcgggcctatgactggcgggttggatggtttgttagctggctgactcttgtgtgatgactaggttggggtgctcttccaaggttgctggctgagaagagagcgagaggcggcagataacgaggccaaacaatgggagtcgagtgaaatagaatgggggacagctggagagtcgcgcagcggtcctcaggtttgtttacggttcaaagaatcaaacaggtatcgtggataggtagcctggaggcaagtgtgaaaggaagaagaaatggaagggacagaagcgggcagtttaggttcaggcagccccggagagtaggaaggtgctcgtgatctactatgggagccttcccgggcggggcaatacgctgagcttccccaatcaggcggacagacacatccgataagtgaaaggctgtcttatcgcgcgatggcttgggcaatttggaagggtgaaatgggggtgaatcattcgtatgtggctgaactaagcttggaggtggaggactggataggccggtctgtcgttgacttcgctggctccgggtttgccatgtccgagttgagctccgtagaattatctcaggtttggtggtaagcaagctttcactggatacctgggaccaccttctttgaagagatggtgatgtcgagggtgcttccggcgaagtgctgaatgcggggcagcttggaacgggactgaggtgacagcattcaccagctgccattggtaaggacgaaggctgcctgtttgctacgggaccacgccgcagcccggattcgcaagcacttgctcacgtttaggtcgttggccgatgctgggttcatgccacaatgttgatggaggcctttcgataacttgacaactttcaacctcgaagacagactacgagtttcgagggacattcacctgcacagtttcaaatgactgctagtgagagacatcaagataacaacagaccttgcttttggtagggatataagtccctggaacggccatgaatgccttgaccgagtctatccaagtacggagagcattttccaatttcataaaaaggcttaatgtctcattcgagcatgaaccttggggtggtatttgcagcatgatagtcccacaagtcaccctttaacactgattcaaagtctgtgtataagtggtgtcgccgtcatggctgatcgctgagactggggtcccctgtaaactgcccctccatccaagttcaaatcacgtgccaggctttgagggtgggcgagtgggtctcgctgtttcgtggcccagtgggtggcacaggggagctggacgctgctgggtacgtaagtcgatatggaacagtcgacttcttgcgagtcaaagatacgccgcatcaccaaccaacagatcttcacatatatgcaccctcacatataaaacctgagcgagcaggcgagaacttgcacctcaacacaaacaaccatccccagattctcgagccgactcccactcgagcctactgcgtgcgatagataccgttcagtgaccgccacttcaccgccgagaccaaacctcccccgattcccaaagacacccaacatccacatcaacaccaccgctgttggcgcacagcgatatcaccaacatgacggtcgacacacaaacgctggccacccccggcggtatttccgaccctggcctcatcaagtatgccatgccccccgccccgcgcgcgctccctctcaggcccagttgtcttggctcttcttttcgttcgttaggcactaacctccgaatgtaggctggtcaacaagcttcaagatgtcttcaccaccgttggtgtcaacaaccctatcgatctcccacaaatagtcgtcgtaggcagtcagtcgagcggcaagagttccgtattagaaaatatcgtcggtcgtgacttgtatgtgccccccctgacagccccctattctcgctcttggcatggttgagctgacggtattcttcgatgcagtctccctcgtggttccggtatcgtcactcgtcgaccgcttgtactgcagcttatcaaccggcctgcgacggctgactctaatggcgtcgatgagaagcttgccggtagcaccgacaaggccgccaacacggacgagtggggcgagttcctgcacatccccggccaaaagttctacgacttcaacaagatccgcgaggagatcaaccgagagaccgaggccaaggtgggtcggaatgccggcatctcacctgcccccatcaaccttcgcatctattcgcccaatgtcctgaaccttaccctggtcgatttgcccggcctgacaagagtgcccgtcggtgatcagccgcgagatatcgagagacagattcgtgacatgatcctcaagtttattcagaagtcaaacgccattatcctggccgtctcgcctgccaacgtcgatttggccaactcggatggtctcaagttggcgagggaggtggaccccgagggtcagagaacgatcggtgtgctcaccaaggttgatttgatggacgagggaactgatgtggtggatattcttgcgggccgcatcattcccttgagacttggctacgtccccgtcgtgaaccgtggtcaaagggatattgacaacaagaagcccatcaacgccgccctcgacgctgaaaaggcctttttcgacaaccacaaggcttatcgtaacaagagctcttactgcggcacaccctatctcgcccgcaagctcaaccttattcttatgatgcacatcaagcaaacgcttccagagattaagagccgtatctcaaactctcttcaaaagtacacacaggagctcgagtcccttggcccatcgatgctgggcaacagcgccaacattgtgctgaacattatcaccgagtttaccaacgaatggcgaacggttttggacggcaacaatacggagctttcgagcaatgagctgtcaggcggtgccagaatcagctttgtcttccatgagctttactcgaacggtatcaaggcggttgacccctttgaccatgtcaaggatgtcgacattcgcaccattctctacaactcgtctggctcctccccagcactctttgtcggcactacagcatttgagcttattgtgaagcaacagatcaagcggttggaagagccaagcttgaagtgtgcttcgctggtctatgacgagcttgtgcgcattcttacgaacctgcttagcaagcagctctaccgccgctacccaggactgaaggagaagatccacgccgtagttatctcgttcttcaagaaggccatggagccgaccaacaagctggtgaaggacttggtcgccatggaagcgtgttacgtcaatacgggacaccctgacttcctgaacggccaccgcgtaagtgtcgcttatcttgttgatatatgacgttcgtactgaccatgattgtgaaggctatggcgattgtcaacgaaaagcacaacccttccaggcctgttcaggtggaccccaagacgggcaagcctctggcgaacacgcccagagccgccagcccaacacttgtggcctcggcggatggtgattccaacaacagcggtttctttggcagcttctttgccgccaagaacaagaagaaggcggccgccatggagcccccaccgcccactctcaaggcctctggcactttgtcagagcgggagaacatcgaggtcgaagtcatcagtacgtaccatcattcctgtgaatcaaataaatggaccgggctaacaaaggctgtacagagctgctgatttcctcatacttcaacattgtcaagcgcaccatgatcgacatggtgccaaaggctatcatgctgaaccttgtcagcttcacaaaggaagaaatgcagaaagagcttctcgagaacatgtaccggcagagcgagcttgacgacctcctcaaggagagcgactacacgattcggaggcggaaggagtgccagcaaatggtggaaagtcttgggcgggccagtgagattgttagccaggttcaatgaggtatttgagtagcagactttgaccgcacgaaggttgggcatggaggattaatgtcttgtttgcttattttttagagggactcgattctcctttatcgataccatggttgagcgtcgggtagccagaatcagaaatgttgcatgtttatctgtgccatccacacaggttgtgtgacaccgcttgtatcatgccacaggaccttgttctccggcacatgtcaccaactcaaacgaggcccggcaatgctcgggttttaggggccgatatttacgggacagggtcatcatccgaccacctccgcacatcggttcgggaaagagggtagtaaaatgtaggtaatagaagcattttccccactttgtcgtgttgaatcaatgaaagtcgtcatcgcgggttgccccgatggggcggggggttgatatgcatataaaataaagcttgtttggcgcctcgggaacggggtggtttgggggtatgtgaacagtccaacatcagaatctatcgttcccaactacaacaccacgtacgttttttgacgagtctttcgacagcaacaaacatggttcttaccacagcgtcggtttttccttccaagggtgggcatcagttcatgccttggccttcccggcgcagtgtggttcatagcaccaaggggattgttgcttgctctcagcctttggcggcgaggtgcgggttggagattttgagaaagggggggaatgctgctgtgtgttttgtttctcgtttaccagcttttatctatgggctgaatagctgattgttggataggatgctgctgtggcggtcgctgcggggattaacatgaccgagccatgccagacgggcattggaggggatatgttttgtctgttttatgacgccaaaacgaaaaaggtgtcggcgctgaacggctcggggagggcaggcgggaaatgcacgcttgagacaatcagagggagtttggggttgggtggagcggatgaggaggggaagattccgatgagtagtgtccatgctgttactgtgcctggggcggcggcggggtgggttgatactgttgagaggtttgggagtggaaagctgagtttggaggagattttgggaccggcgatacagctgggggaggaggggttcccggttcatgagcagacggctaccattgtgagttttttttctggatatgtccgagcgtggcagagttggtgctgacaagtgggcggtgtagtgggctcaaggagagcaatcgcttcgagatgcctctcccaactttagggagatgttaaaggctgatccaaacgcccctgatggtgtcagagctcccaaagcaggggacatcatcaagcttcccaacctggccaaaacattccgtgccctcgccgcagaaggcaaaaaggggttctataccggccgtattgcagaagaaatcgtcaaagtcaccacctccctcggtggccacctcaccctggaagacctggagcaccatctaaccaccggctccgagcccgtcgagcccatctcactcaagttcaccggccaaggcgccggcaaggcagaaaacgccggtgtagaagtatgggaacacccccccaacggccaaggcatcgtcgccctcatggccttgggaattctccaacaactcgaactctcgggtaagatcccaacctgggcagaaaaagaccacaacaccgccccctacctccacgccatcattgaatctctccgcatcgccttctccgacgcaaactggttccttgccgaccccaacgtcagcgacgtccccaccgctggtctgttgtctccagagtacctctccgaaagagccaaattattctcgcccaccaagtccacacccgagctcatcccccatggctctcccgccctccgatcctcagacacggtttactttgccgtctccgacagcgaaggcaacgcaatctcctttatcaactccaactacggcggtttcggcacgggcatcatccccgccgggtgtggtttcaccctccaaaaccggggcgcgaacttttctctcgatcccaagcatcctaacgttcttgctccgaggaagaggccgtatcataccattattcccggtttggtgaccaacatcaacgatgggagcttgcacagtgtttttggagtcatgggcgggttcatgcagccgcagggacatgtccagacgctgctggggcagatcgttgggggactgaacccccagcaggcgttggatgcgccgagggtttgtatcggggcggggatgcccgagaatggaaaggtatatgatatgcgggtgtatgtcgaggaggggatgcccgaggagacgatcaggggcttggaggagctgggacatcaggttaccgttgtcagggcgacgccgggggacaagtggcagtctaggtcgctgtttgggcgtgggcagattattcggtggacggtggatagtgtagaggagaacaggggagtttggtcggcgggtagtgacatgaggggtgatgggggtgcttatcctgcttagaaatgatacactgcatacttggggcgagagacctagatgctggagtatttcgaaagggagatatattacagtctagggtattcatacatgtctttttctcctttttttctttctttctgctttgctttgtaatcgtgacagtgttcactccttcttggcctcctcctcagcagcctcagcttccacagccaaaaccttcttctcctccagcagcttcgccagctcgccgctctggtgcatggaaacgattatgtcgcagccgccgacgaactccttgtcgatgtagagctggggaatggtgggccagtcgctgtactccttgattcctattttatttcacccaatttttgttcagcatccctctcccccgactttctggattcacctttttgaaaatggatgaaaaacctaccctgcctcagctcattgtcttccaaaacgttaaacgccgcaaacttggctgggtccaccccctgcatgcccagcacctggatcgacgccctcgagaagccgcactggggcgtctcgggggtgcccttcatgaagaggaccacgggcgccgaggagacggccttgtcgatcgcttgtcttgtctggtccgagaggaaacgggtttgtatcgaggtgaggaaggaggtgcgggctgctgcaggggcggcaaaggccgggcggaggagttgcttttttggcagagttgttagtatttttggggcacgaataggaggccaaagggggcataccctcgagaggatcgttctggcaaacatgttggctgtgtttggtgtggttgtgctgctgctgggaggctgctactggagtgatatccgcttgcgccgggtatcagtgctgggacattttttggatggcgagccgacggcaacccatgatgtaagcggtttcgctcggtaataagaggcttaagggttagggttttgatcaggccaaagtaccttgatgggtagcggccggtaggggattacttggcttgtgattggtcgacagggggtgaattgaccggactgggacgcaatgaattggccttggtttttcagtttctggcaccgaattacgtttttgtcaacagcttcgagagagatttcatactgagtttcatccatcaaggacagttgagttatttgttaaagacagaaaaccggcaacatggtctttgacctggtatcgtcgcttatgcgcatgccatacgtgtaagtgacccctgatttggtgatatcattcgaggcgtgagattgacacatgaaagacccccatccttcttcgcacgcttcttactccaccaatttctccccattcctatccctgatacggactacaccaacaagaccgtcattgtcaccggaggcaatggcggccttggtctcgaggctgtccgccacttcgcccggctcggagcgagagtgattattgcctgccgcaacgctgacagcggtcagcaagccagaaatgacatccagcgcgccaattaccctggcacagttgaggtatggccgcttgatctctgctcttttgacagcgtcaagtccttctgcgtcaaggccaacacggtattggacagactggatgttctcctgctcaatgcaggcatcatggccaaggagctacagacgcccgaagaaggtggtggttatgagagtacaatcttgaccaatgtcatctcgacttttttggtggcatttatgttgatgccgttgctgaagcagacggccgagcagcaagcggacaaggctgtggtgacagtcgtttccagtgaggctcactttttggtaagacttgcatctgtctatacgtatactttgtgacaagaactgaccggcgatgcagactacattcaaggagcgccttgagcccaacatatttggatgcttccgaaatggcgactttgatccgtatgagaactatagcactagtaagctcctcgaccttttgctggctcgagagctcgccaacagactggacgcctcttctccagcggggaacagcaaggttattgtcaacagtgtcaacccagggttgtgcaggtctggattgtttagcaaggtccctctcatcgtcaacctcttcattggattcctctcgctcatctttgcacgatcgtcagagcaaggatcgagaacattgctggctgctgccgctggaggacgagagacccatggcaagtatatggatgccgccaaggtggctcagcccagttcgtttgtgatgtcagatgagggcaagagagcccagaaacgggtctgggaagagttggtcaacattctggacggtgttgagaagggggtcagtaagaatatctgacccctgcagcgctggtggagagaggtgctgcttgggggagctaccccgcaaacccacccccgcgatctaccccagaaacagccccgtcagctgctggagcctcggtaacattgcttgaatgtgacagggataatgaggcatgttggttcctttcaaggtgtttaaactggacatatgtatcagcggatttccttctttgtatctattttctcgattatatacatgtactctatagaattcagtaattcattattttctctttggttcctaatcgcaacttcaagatggtaggcccgcctcctctccaaggcatcaaggtgcttgaattcgccggcctggctccaggtatgttctcccacacccgccccccgcccccccagttctcgacaacagatgaactaacacccatctcaggtccctttgccggcctacttctctccgactcaggcgcctcgatcctccgcatcgacaggccctcttcctcgccctctccattaccaacccctgacctcctaacccgccgcaaaaagtccattgccgtggatctcaagttccccctcggcatcgaactcgtcaagtccctagcagcaaaagctgacatcctcattgacccgttccgccccggtgtcctggaaaagctcggtctaggcccttccgtcttatgctctctaaatccaagattaatctacgcccgcatgaccggcttccgccgcgatgggaaatgggccaaaatggcaggccatgacatcaactacctcgctgtttcagggtcgttatctttgctaggaaggaagaacagtccgccaacaccaccggtcaacattctgggtgattttgctggcgggggagccacgctgttccaggggatactcctcgcgttgctgtcgagggccactacggggaagggacaggtcgtggaggcaaatatggtcgacggggcgtcgtatctggctactttcccccggttcgcgctgcacaccatgactgggtcgctgccgaggggggagaacttgttggatagtggatgcccttactatgattgctacgagacaagagacgggaggtggatggcggttggggcgctggagccgcagtttttcggggatttgatcagggggttggggctggaggggcaagggtgggaggagaggaggtatgataggggtaattggggggagtttaggggtttgttggagaggagattcaaggagaggacgagggaggagtgggagagggtgtttgaggggacggatgcgtgttgtacgccggtgttggagtatggtgagatggagagggaaaaggagaagagggggggcgatcagagaccgatggtcacgttgagggagacgccacttttgggggtggtgaaaggaaaggatggagatgctgtcacgcatggacaaggggagggagtgaaaggagatgggtacagaggggagcctctggcgcctggggagggtggcgaggaactcttggaagagtggctgggttggaagaagggaagggaatttgatgtagcgggtggagggttggtggtgaaggaaaaggcaaggctgtaacggtttgtacgtccctgtcaggattctgcggttccacctagaaagatagccaacaacagggcagatcataatcaggactgcggcaaggttgagttggaggaagtttccaagcacgcgaagaactcctgagtggcaatacttgggggctgctttgagcgtggtcttccgggaatgctgttttccagcagccagcgtggaccggctttccgtacaatgggcttgcaacaatcctcggtagcttctcttggtgtgagactaaagttcaactcacattcagtggatgtgcttttaagtttctcaggtctcgtcccttccagaaccatcaagccacagcccaggtcatgcccccgcactgcactgagttaatatttatttctctcatcaatttcaaactgggaagaaggcggccaaatcaaccaccgtcgacttaccttacctgtcactggctagtacttcaacttcctatcagccgactcatcatgcacgacaacagcaccattcccattgcaacaacacgtccatcgaccttccctcacttcccccgtcttccatgtaagctacgagagaaaatatgggagatggccattcgaccggattctccggcggtacaccgcttctctctccaccatcaggacgccgtcaaagagctaacaaccagggacaaagtgattttacattacggcgattccaacctcgatatctcagggctctacgataagcccagagggaatgtgtatgggcattatagactctgcgcccctcgaactaccacgacatctaactcctactcgtggagtaagaacagcatgtcggcatacatgtgggacgctggactgtggggggagcaagtgccgaatctaggcggatagcgatcagagtatggaaagtcggggttgaggctgatattctggaggagatacgcttacacagaaaagcgggccgtcctttgaaatcccctgaacagcaggtcagagaaatctacaagggacattatccttccggttccacggctccgatgatacaatatgacgacgacaacgtgggttcaacaccgcggagtaacaaacccaccgctccgctcattgtccgggcatcatgagacttgttttggatagacattccattttcagggtcgcctttgggcgatggcgtctcttcatatgtttatctcctgctcagtcagcaattgttccctggagcttcgggtggttgtcggctctggcctagtaatatcgccattgattttgatcccagatgaaataatactcgttcgaaatggcccttcaatcatgaggatgaacttgagggcgagcccacaactatcggggtcgcaaagaccctcaacattgtgcctcgactgatacggatgtgttactttaatggagaccgatatacggagactccattcatctggctgattgaccgcgggcgtggagcagccaaatatcgccagcgtctcgatcatagtacaatgagcaaggaggatggctcgtcatcatcatccctgtctccacagtcccagtactgtacgtacgaaacggaagaatgggcaaaaggtgccgtcttctatgatggccagcacaggtacatggaagcaaacagttacggcccgtcaactggcacgcttatcgactccttctccttcaacgaaggcggcgtaggttacactgatgagtggttttagacagccgattgctccatccaatgtgcgccgacctgtcgcggtgcttgtcgagtgtcaagattgagcaaatgttgctggcttagatatacgcaattgagacttggctggcagggaaagtgtggttttggtactgggcaaatcatagctcaggtcaaaaaatgagatcgttataatggtttgatggtcaatcaatgcaatggacttcttttaactgtggtgacagcaatgttgctggttgaataaaagagttagaagctcatctccatcacgctcgccccgaactttgctcctcctccctcaaatccctcaccagcttcctccccggcccctccaagctctccacctcatgcgcctcatgcctctccttctccttcaccccggcagcaacccactccctcacgccctccagcccattgatcctctccatataccccttcgccctctcccccaggaacctttcccccgcccccaagtaactcccaagccgcaacaccaccggcgcgaaaaaagcatccaccgccccaaactcccctcccgcaaggaaaggccccccaaactttgctagcccttcctcccaaacctcgttgatcctcctcaggtccttcaccaacccctcgttaaacgcctcgtctgacagctccacacgaatggaaacattcatccccatctcctgccttatgctcccaaacccggcgtgcatctccgccactgctgaccgtgcccaggcgcgtgcgggtagggagtcggggtagattctgctgttgggaaactgctcgtggaggaactcgacgatggcgagggattcccacaggatgattggatcagagaagccggaaggggggtggtggtagtgcaagcaggggacgtggcagacgggggagaaggacttccactggggctggcggtagccggagccgggggccagcgggtggaggtgctcctcgaaggggagggagagctccttcatcaggagccaggggcggagggaccaggaggagtagtttttgttggtgatgtggaggtggtaggaggacattttgggtgatgatgggtgaggtggttgaagacaagtggcgggtgatgaaaaaagtgggttgttgaagaggtgtggtatcgtaagggtgttgttagtgtgaggttgtccaaaagggtaggtagtggaaaggagagatggatgagtcagtatacgcaaggggtgggggttgactaaatgaaatagacaagtgactcgaccatactccaaggctgaaaatgctgtaaatatatctaactggagagaagaacaaaaaaaacatcgtacccgcagagctaccccgtataggaagctcacatctccacgccctatcaatgaccggtcctccccacccacctgctaccttgctgcaagtattatccccaagggcgcataacaccaccacaacaattcctccataccatcgttatccaccatggtgtgactcactcgaaccataaagatacgacactttgggaataacttctattttcgcccagcaaagaacaactgaaaggaatcataggctaagcagcggcagaaccctccttctccttggccttctgggccttcttcgcctctatctgtctctgcttttccagcttcttcaattggttctttgtgagtttcccatcaccgccctcggcaccctcagcaccttctagctttggtaccacaatatcggccttgggtactttggggttgcccatccaggtgagaggtctgatgtcggtgaattgcttgacagctgcatcgtcgaccttggctctcctctcctggaacgccgcgacgaaagtctggagctccttgatgcaaagcgccttgagctcacccgtgaggagctcgcccttagagtaggcgacccggatcttctcaagttcttcgtcatcctcgaggaagaagcggaggtactggtaggcaacgtctacgtctgtgtcacctcccactgcgcggtgctcctcgacagacaccttgccaccactgaaggcgtatttgttaaccttgttcttgatctggttgggagtgtcggtcatgaagatggcgctggaatcaatcgaggcagactacattgtgtgagcaataacgagacgtattcagaggaaaacacactcaccatcttggtgcctggcccctggagggctggcaagaacaaagaatggatcaaggacggcttcgcaaaccgcaccccctggtaggtaagtctggcggcaacatcacgggtcgctgtaacgcttagttaaatatttactcttgatcatggaacactggatatcacaaacctctgaaatatgggtcctgatcaacggcacatggactggggaatgcgttagatcgatatcacaccgagttgaaagaaggtcctcacatcaagcatgggatgccgacggtcttcttttcgtcctcaccgaaaatgtgagggaagctgttggcaaaggcagcagcaccctgaatacttccaaagtgaatcttgccaatgttggaggagtcgttgaagccgaaaatggcacgcgcttggttgagcgtgatgtgcttcgctaaccgcgtgatttggcgatagaatgcgccgccaacgtagtcgtactggtagtttgttagaccacgtaggcaacagaggcctgggatatccgtacatcagagaaaatgaatgtcttgtttgggtcaaagcccatgctgataatgtcccgaatattgctatcgcagtacccttgaacttcctcaattgtgcgcttctccgagaacaggtacttttcgtcgtccgtcaacatgattacaagctagaaagatccttatcagtagctggttatacagaagaaatcctacaagaccacctacaggaacgtcaaaggtatcctgaagccctgtgatcccgtgttagtcaaccttccacgctcgccaagccgttctcctgaatctccatacattttgtaaacataaagggcgtgcagtgtccaacatggatggagtcgctcgagggcccacgtccagtgtaaagaaagaatggctcattgcgctcgtatcggtcgagaataagctcgaagtcgcgatgcgaaaagacgatgcctctgcggaggaaatggtgtggcttcttgcccgttacgcgctcgaacctggcgaggagctcctcgtcaatcttcttggtgccaaactcctcaatcagcttgtcgtagttgattgccttgatctggccgtctgcgccgacctccccttgaacgttccaggggtcaactgtctgcttggacccttgggcagcggcttcggccgggacttcggggacttgggactcattgagagccacggcattggcggtttcggccatggtatcgatgtcgaacagtgttgagaaaagaaagaagccggtaaacaagtaaaaaagtaggtaaaaaaggatagaggtgagtcaaaaagtcagaagagatcagaatgcgcctgccggaccgccgctgagtcgtcctatcatgccgtgtccaattcaccacccattatggtgggggaggggcacttggaaccaggggtgtatgactccacccacccacttccagaaggcggagaagagcggcagaagagcgttgcctgccgggaaatttcgaggattggatgagaagctgcagggcccgtctgagtccagtgtcagcagctctggttgggcaggcggatcctgagagattctgcgctgatgcctgtaacttaaaactacgacaatgttggcggcaccatgggtgtgtcgaagctgcgtgcgatcgctcaggcgaatcggcttttcgcagcagtttctacggagggctagcacaggtaaagtaacgttgattgccgttatggttttctgctaacagcgcgagtagactccttcaagcttcccccagctctcctcgaccgcgcaagatttcttaccgccgaacacgatcaattgacggcacaactagctgataactttgacgagaaaattgcaaagcgtgcaggcgaagttcacaggatcgcagaggccttcaagaagttcgagcatgccaaggcttctctccgggagctggaggggctcttgaagtcagacgatgctgaaatgcgggagatggcgcaagaggacctcgcggctaccaatgagcagctggctgagtcgagtcggaatctgtccgtggctttgactcccaagcatcctttcgccgacatgccgtgtctcattgaagtcgtccctgggccaggaggaaccgaaggtcgcttctttgccgactcggtattcaagatgtaccaagcatattgcgccaataaaggcttccgcacaaaggttgtacagtacttggccgccgacagtaccggcgaaaagggaggtgatggggagacagcccttcaggaagctgtacttgaggtgatggaggagggagcgtatgcccacttccgtggtgaagcgggcatgcatcgggttcagcgtgtcccggcaacggagaagagtggaaggactcatacgagtgctgtagccgtctgggtgctgccgtctttcgctgagaacgccacagcctctgatggtgactgggacaacccggagagtgacttctacatcgacccggccgaggtgaaatctgaaaagatgcgagccagcggagcaggaggacagcacgtcaacaaaaccgagtctgctattcggttgacgcacattcccacgggcatcaccgtcagcatgcaggattctcgttcacaacacaccaatcgagccgatgcctggaggttacttcgatcaagaattgcacagaaaaggcgtgaggccagagaagaggccgctagggcactaagaagcagcgtgttgtcatcagcgcagcttacacggggcgataaaatcagaacctacaactatggccaggacaggtgtaccgaccatagggccgggcttgacgtccacaatctaccagatgtgctcaggggtggtgacaccctgggtaaggtgattgatgccgtccatggctggctcgccgagaaggatatccaggccttgctggcagatgaggaagccgctgctgctgccgcgaacgctcctggtaaagggaagaaagggaaataaataacacatacccccactattttagagtgtacttgtagttgtatgatattattgacgatagaaatgtgttcaaatattcttgactatagttggaagtcggggggtgtcaggatttcatgaattgaatgctgaccaatcagcgttgatatatcacctcttaccttcctaatacggacgcgtactcttgaggagggaaggcatgatggacaagtctaccttccataacattgttttgccagagaagacgtagacccaagaaattacatctactctctacattgcggtccctgttgcttctctatagaggagcggcgtctcatttttgttgtgtgagtgtatccaccacctctcagcaacaccttgctcagaggtgttgacctggaacggtcaatcccgtccaagaagatgacagacaatacacctctgaagaatcaagcactttatgatgggaggtcatcagtcatcttgttctttgttttgcaagccgtctttcgagcaatagctccttccgatcttcctgcttcagcctgggctgttgttcgatgcctcatatgacggtagcgataccttgttaatgctcaacagaagtttccgcctacttctttttgacatggcgagttttaggagagctgtgtgcctgccagggaagtgctgggagcaatggagacagttggcaatcccatctttccacctcccatgtgtttcctggcctggtagcgtctatttaatttcccctgacccttcagatgtaccacccccagcgttgtctcacaattagtttacaattcgacccaagtctcaagtctcttcttttaaagcttcgcaagctcggcaacaaaaacgagtcgaagatgcgcctcatccctgtgttgggcttcctccttacggcagtcgaagggctccgcacaggaaggggtagtcctctcctgcgtccgggcatctcgaaacacatcaacaaggtcggcaaatcgactgctgctgtgtttcctgaccctcaagacaagccgtttcccaagcacaattttctgaacgccaacagcacgagtgagttatctccgagttcgaaagtcgagccacgttgacattgactcggtgtaaatagaatttgccgtcaatggcaccgccattcccgatgtcgactttgacgttggcgagtcgtacgctggctccccaatgagcaaagcaacctcttcttttggttcttcccctcgccaaacaaagcagcgaataaggagattctgatctggctgaatggtggtgtatgttgatatcatttgtcgcttcattgttcagcttttactaacaactcctccagcctggctgctcctctttcgagggtcttctgcaagaacacggtcccttcctttggccaccagggactataaaacccgtgcggaatccttggagctggcacatcctaaccagcatcgtgtatgttgaccagccgggaggcacagggttttcgacgggtgttccaaccatcaccaatgaggaagagctcgctgctcagtttctaggatggtggaagaatttcgtcgacaccttcggcatgcagggctacaaggtgtacatttctggagagtcctatgcgtaagtcctcttccaatttcacggcccttatagccagggcaacatcttctaacaccaaacagcggaatgtactgcccttacattgccaacgccatgctcaacacaaacgacaccacctaccaccaattatccggcatgtacctgggggacgctgtcatcggcgacaacacccaactctaccaaagcatccccatgctccgcttcgttgaataccacagctctcttttccccttcaacaacaccttcctcgacaagatcaggactactgacgccgagtgcggctactcctccctcctggacaaccacctcgtctaccctcctatttcccacctgccctctgccctcccagaagtatcggaaaacggcaccgttacagaggaatgcacctctctctggtggtggatcctagaagccgccctccgccttaacccctgcttcgacatgtaccacatcaccgcctcctgcccccgcgtgtctgatgttctcgggttcctggcagggatcgattacgtcctcgaggggaagaagagatactttgaccgcggcgacgtaaaagccgccatccacgcaccgaggaatgtcacttgggaggtgtgcggtgagaaccagattttcgcccagcgaagaggacggctccggcccgtccatcatctacgctttgccgagtgttatcgacaagacccaaaacgtcatcatcgcccacgggcagctggacatggtcctgccatcaaacggctcccttctcgcgatccagaacatgacgtggggagggaaactcgggagggttgactgcatgaattgcacgacacctttacggttgggcatctgtattactctgatcaggcatcgaatgagatgggcgaggggacggcgcctcagagttggagtgatcacaagccggaggagggcttgtaggtaaagagccccagatgggaagtcacctttctaaaatagacgctcagctacaaacccatagagaagaaatgcaatgcgttccacaccacaacccctctcgaaaaaaaaccatcttgatttgatagccaactaacaactactactaggcagttacataaggtagggaaataggccgtaaagactgtgccaaagagaatcccgatagcctcatgtttttccgttcttttttggccttcctttcccttttttgtccttccttgtgatgcgatactcctccccctcgcccaaaaccgctgttctcacacacattatcctacaaaagagtggaaccaggaccaagtccctccgtttccacctcattcagcccagacacatttccatcccctcctcccagcagtagacccgccttgttcggcgtccaccagtccaatgacaaaaccaaaaaaaatcgaggatattcctatacgccatgctttccgcccgccaaccgatgaaatgataaaaaccaaaaaccaaaaccagcgaaaatagagtagggtggtgttacaacagtgttagaggcaggtactgtcagcatagcagctggcttgccttcatctccgcgtatgtgttggagatggatcactttcgagtgtatgatagatatgccgcccccaaagtcgaatcggccctgtaagaggtgtcgttggaggaaccaagaaaatgtagcccagatggatagggaacggtgaagagtatgagaaatataagaccggccgaaccgcctccacctcacctaatgaatgtttatgcgcacatgtcctggtagtcatcactttcatagccgctctttgatatcgtcaacttttcagcgataacgatcttcaagcagcagccatactccgctctctcgcggcccgcctcagctctagcacaccaatgatccctgtctgcctcaacctctccagaatcatcttcatgccctctctgctcttccccaattgatcctgcgtctttgttgaagccagcgtttcaatgctcctctggatacccctcgctcccagcctggcgaagaacccgccctcctgggcagtggtagacaggttctgatgcgacaacttgtcccggagcttctctcccaacctggatctgaacacaaccttggtttccacctcggtgttgtccagagttctcgtcttgggaatgctgtacatttgtctttcgactaccgacagcacgccgacgaagttgaggttgcgagactcggtggacatccagccttcgcgcatgtccaccacggaagtctcgaggatgtacgaggcctgggaggcggtcccgcctgtgagggtggtagggaggagcttcatgacggcggggggcatgcgggacttcttgaggtggatgcgggttgtgtggaggcggccggtggcagggtcgatgtgggagtcgatggtgtcggtgctgaggacatgagaggcaaaggggttgagctggggggagcagtagcggaggaagaaagcgagcgagacggcggggaagggatgggcgtaggtgtggttggtggtgtgggtgaggaccattttggctgattttggtgatgattgtttatttcacgatggttatggggtatcttgaagctggagtagtaagtttggaggagtgacggtggtagttggtggtgggcggcggagagtcgaggagctaggatcctggaagtacgtgggggaggcgaaagacgggaacgggttgatcggccggtatggtgtcgtcgctcgcgcagtacagacgaaagggtaaaaagcagtagtgcaaagagcacgtgtgcaggaaagcggatttacttcatgaaggaagtgttagacacggcgagatgtgattgtcgagacaagcacaccctcgagaatgggaaagacggagaagctttttttcttggcttctgcgaaaaagttcccggtcgctcgggggtgccccaagttgatgaagatgaggaggccacaataaagcaggtgggtggtgacgcagggaaaccggatgaagggagttcaattgccagaaagacgcggggagttggccagttcaaaaagaagcgggtgtccagggagtacaagagagggggacgcaactgtgacgatgatcatcggctcattctcccagattcttgctcgtctttttcagtggatttccagaagccttttgagcacagcatcattatggcaccactaccatcggagaccgccctgtgtaactttgaaggtaaagtgcaaccggcgtttcagccacaggatatgacgttcgcaccgaattcactacaaaaacagcatttcggacatatactcaaactctttgataaaagtcaaaacagccctgacctcacacatgataatagtcaatagagagtgcctcaatctgctgttattgtgtgaggtttcgattgttgctgtcagccacatgcatcacttgccagcgggctggctcgtaaccccactttttgcctgaaaatccaggccgactttctgcttgcggagcccagacttcggaacattcctctcgcggctgacctattaatcatctgaccgttggccaactttaattaaccgaaccccgagctctcgacttcttcacctccaccagcccttttgctccaacaatcaacgacgacgggtgcaacacatcgccaaaaccttttgcagattgaccatcgcaacagtcgctttcctcgcgaatatcttcctctcgcatctggaagaattttgttgcgtctttgatcatcacgcgggattggcgcaacggtgaaacaaggaccaagcagcggcgacatcgaaaagggcggcgcgtcagaggaacgaacgtccatctaaccgatccatcacaggaatccatcgccatcacatttccatcgcgccatcaccagtctgcttgcaggagcatctcctttgcttgctagcgttgagtggggtctgtttttttgcttcttttcgtttggctgacagagcgttggggacaagtgttggcaagtgatcaagaaggggtgctgttttttaggagggaggagtcgcacacgaatccatcactgcttttcagctcaattgaatagagtgctattttcgcagcgctgggtctttgtacttttcctttttttaatcgtccattcacgaggcgctttctgtctcccccggaaagcatatcagaattgattcccattcaacctgttgagttgaggaaagaagaagaacaaaaaggcaaaacgtcgtcacctggtttagggaatcaagaattcaagttcgcttcgctttacccattcctagtgtgcgagcaggtttagcagagaagagagcgccgacacgactctaattgacagctacattttcgaccatcaaccagacccaagatggcgtcttcagtattcttcaagttcaagtcgcaaaaagagccaacacgagtggcctttgatggaacaggcatttctgttttcgagctcaagcgcgagatcattcttcgcgctggcctcggtgacggcacagattttgacctggccatctatgctgatgaaaatggaaaagaaggtaagcagctaggttcagcttcacattcaaggtgtgcgagctaacaagatggcagtctatgacgatgacacctccatcattccccggtccaccactgtcatcgcccggcgcatgcccccgaagaatcccggaagaggcggcgctgctcgatatgtctctggaaagatgcccatccacgcgaagaattcgtcacgcagggagcaaacagcaaagccagcggccaagacccagtccaacactctagcgcaactaagcagcgccatgacagaagaggagaagatggctgccgtcttccaggcccaaaccgagcacttcacctcgagagaagaggaaatggctactcaacagtatgtcgccaagggtggccccaaaaagcccgccaatgttcccgaccacgacccaccccaaggctatatctgctaccgatgtggtgagaaaggccactggattcagctttgcccaaccaacgacaatcccgatttcgacaaccgccctcgcgtaaagcgtaccactggcattcccaagtctttcctcaagacagtcgacaaggcaactgcgcttggtcagaatgctgatggagatgactccaagacaccatccggcatcatggtcaatgctgatggagagtacgtgattgcagagcctgacaaggtgtcatgggaaaggttccaggccaaggccaagtcgaacaacgcggcatcaaaggcagctatggaaggggagaaagaggtccaagagagaggcttggaatgctccatcgacaagaagatgttcatagagccaatgaagactccgtgttgtagtaagacgtattgcaatgactgcatcaccaacgctctcattgagagcgacttcgtctgccctgcctgcaatgcagagggtgtcttgattgatgatctcaagacagatgaggaagcagtcgagaagctcaagcaattgcttgccgacagggatagtaaagccaaggagggttccaagagcccaaaaagccccagcgaagcatcaaccaaatccacccaggccaccggtgtcgaaccaacaaacatcaagaagtctgcttctccttcgccggcccctgctaacccggctgcgccaccacagcaaactgcccagcagcaaaccacgacatccaccccctcggtccgaagcgccacctcgacacctgtccacagcgagccaagccagcaaacatccaagaagcggcccgctgaagatgccctcgagaaccccaagatccccaaggcgcccaaggccatgcagccaactcaacagaagccaccagtaaaccccatgatgggcggcaacaacatgatgaacggcatgaaccccatggccggcggcatgatgcccggtatgaacatgcccggcataaacccgatgatgttccccggcatgaaccccatgagcctgaacatgatgggcggctttgggggcatgcccggcagctttggtggaccaggcggcatgcccaacatgagcatgaatgggatgaacatgatgaacccgatgatgaacacgatgatgaacccgatgatgaacgggttccagggaatgcctaacaataacaacaacaacaataacaacttcaacccacggcacaacaactggggtgggtcgagtggtggtgggtttcaagggcatcaacagcaacaacaacaacaacaacagcagcagcagcagcataaccagcacccgccacagcagcagcagcagaggccaccgcagcagatgatgggtatgggtatgggcatgaacggcggcggcatgatgaagaacttttcccaccaaccggctgatgacgaggacgcctacttccggaagccagtcaacccgcaccgccaccagaaccgccagaaaagggtcaggccgagtgattaccgggagctttgagcaggctgaggtttttttttttttttgtaacgataatgattttcatcatgggggtggtgaggccgggcgggggtgtatatacatcatcacaaacaagcgaacataaggatgtgtgtgaaacgtgggaagctatctggcttttggagcggggaccgggttttcaagaggagcaagttgcattactcttctcattggcgttttttcctctttcttttttctcactctcttgattcttcttgtaatcttctatatctggggctgtagtttgggggggatgttttcgggattggggttggttgtgacatgaataatcaccacaaaacaacaccacatggagcaaatgtggcttggtatggcggggttgtgaattatccttgctttttttccttcttttttccacagcaacgtacagcacacacacacacaacaaaataaaacaagcgggaaacaggaaagcggtgggatgtccaaaacgagccgggatagggaaggttggaaggggggttattcaacaaggcaaagggacataggatggatgggtggattggtatggatggatgggatgctggagtaggggcaatgggaaagcgaagggaaattaggaaataaccgggaaattcggattgataaactgagtgttatttgtgtatatataccacacacttgacacacacacacacacacacacacacacactttctctcttgccttttgtttcattcttcttgttactggttggtgattgtttttttcaagtcttgtgctgacattctgggaatacaaaattgaaattcttaaaaatcatgttccgtgccttatcccagtgaagcttcctcttatcacatgaaaacttgagctagatattcaaacaaaaatcaacaaacatggaaaaggaccaaaactgcattggaaagcaaaccacatattttcgctcgctatatgctctaattcttcgctaccctcagcatcccaatacagcagattagctaaaaaagccgccccgtttcaaaaagataaaacagttcgaatcctttcctttggtggtggaggcttcaatttataccgtggtcatcttctcaccttccaagcccttggaagacctgatctgtacagtcgccacaaatatcgccgacctgcgtcagaaagaccagctgcacctatcgctacgacttcccgaaagcttaaatctaaaacacccgcctcgaactgtgcaagccggtcctcggcgatttccagccaggttaaccccccgcattgaaatgggagttctacgtccactgcctgcccgtacggccactggccagtccgactcttcaatatgtgccgctgccagggaccaccccgcgctgctgatgtacaatcagggtatcctttctcggttagacccatcaaagcagtgataactatcttcctctctcgttctttagaatactaatcaatgtttgagcatgcttggtatccgcctgtatcctatgacgggggaacaaaaggcttgaccagcatctcactgaacttctccagcttctcctttcctcgaacctcctccaccagaagtggcatttttaccacgttgaactcgtcgtaaagctcctcaatctgatcgaggtacttcttttgcatgcgccgtctggccgtacattgctcgcaatcggaaccgggcttcgggaacagaagctgattgaccacaatacagtgggtatcaatctggtagctagccagttcttgaatcatacgctccgtctcgtagagagacaagaactctggaatgcagacgcagacgaaggtggtgaggcgctcgtccttgaattgctggttgacttctgaaatggtggcgcgaagggcttcgagcttttccatcatctcaccgaggttctgaccgttgggaagggcaccgttggcgcccagaagtccgttcaggactcctccaaactgactagagagctgcgagatcttcttcagggccttctccagaacagaagggaactggaggaaacggagtgtgtggccggttggggcggtgtcgaagatgatagtctcgtaggagagtgacttgacctgcttcaggacttcggcaaaggacatggcttcatcgataccgggaatctgataagaagtacggtattagccagactggttgatatatcactgacaaacactcttataacttaccgagagggcaaggtcctgcatcataccccccataccccccaaaccttcagcgccctcaccctcagcctgtccagcaagcaagtcttgcatgcttccatttggatcaatctccatggcgaagagattctcgaaaccatctaccttgcgggcgtccttgccgaacttttggctgaaagcgtcgctcaggttgtgggcgggatcggtcgagatgagaagcacagagcgcctgaccttggccagctggatggcaagactgcacgaggttgtcgtcttgcccacaccaccctttccacctacgaagatccatctgaggctgcgttggtcgaggatcgactggagcgtgggctccatagcatcgtcgtcggcgttgatgactgcggtcgacatcttggcgattgtctactgagtgtaggtagcggcgggaattctggagagattgcggaattacggtcgttcaagaagagagagagaaagaaggcaagctgtgcaagtggtggtcaagattggtccaagttgtcgcgtcccaaggggctttggaaacagctggaaacccaccgtcgggtgtggacgtcgctgggtctggcctgccagcccgcaacgtcactggcttcgtggcggggcaagctcgacctcgacaggggggggggttcatttggtggggtaatgtcttggcatctgatgggaggcatcttgtcttgaagttcggaaggaagaaatggagaagcagctcagcttcatgcatcgctacgacgcaaactgtttttttggccccaagctgaagctgacgaacttccacaacaggtacacagctgaatctgtttgtttactaaagctaccacctttgttgattagcgtgatcatctcgccgccctcaggcagatcaatagttgacggacagaagagcggtgacttttttgtttcgcctgagccgcatttatcatcagtgttgtggttcgagctcacggtgaggcgaggataccaccgttgtgtacaacgtcctgtctgtcctcacctggaggcaataaaggaaacaatgcaacactttatagccccgtgcaaagtatccaagccaggtaggtatccaactggtggcatccaagcaggcggacagcggcagataccgacgcttgtgtccggtggcagcggggctgagaagctctctggagtggatgttgagcattggtgcacccatgtggccatcgcatcagcccccaagaaagcgcaagcaaatccattccaggggtattagtagtgtaatgcttcttgtcgatccttttctatatggtgactttcaagtttataaatatcctctacctatcctctctccattgtttctttgtctctctctatacatagctcactcatcacaacaacaacccctcctcttatcgcttctgataagcccattccccctgctacaccaccccaccacccactcactcagcttgtagcccacctctcagtgtaagtcattgcctgcctactaccccctcgtgataccctcacttttcccccctcccccctccctctcctcacatccaatctaaccaccacccccctcaaagcgcaaaaatgaccgaatcaacaactaccaaagaccgcataacctgccacatcctcgacacaaccctcggccaacccgcccgctccgtccgcgtctccctctccctcctctccacctccaccgcctcccccggccccctgaaccctccaccagtcttcgagtccaccaccgacgaggacggccgcatcaagacctggctcccctactcctccgccacctcctcgggcgaggtccccgtctacaccctcgaagacgtcttcggctccatcaggggcccctcccgctgggtcctcaagttcgacaccgagtcctactttggcgggcccgacaagaccttcttccccgaggtcaacgtcgtgttcaacgtggccgagggggagaggtatcatgtcccgctgttgctggcgccgtatagctattccacttaccgggggagctaaattccctctttgttggagggggaatgatatgagtgagagggagtaaaggttgtgggggaaagcatctttttgtcagcagcatcattttatgtctgggcatatatggggcataacagcaaagtgtgagagcgtcgttcgtggttgcatatctctgggtttatgtagggcgaaattccaaggaaagcattttgccatctcactgatgagatcgaaatatttccgggttgtgcttttggccaccacataaacgatcaagcttcacgtatgagcactgggcaaaagcaccgggcaaagtatggttccaaatcaatgagtactgagatgatgttcaattaatgattctccaatacggagtattgcgaaaagccatgggtactaggtaggtaattagtagaccacccagcaagtctctgcctcgagcagaaggccaggtgataatctgcccatatcacccactagaaacacgacatacagtctgcatgctgtcgcttccccttcgtctgtttcttctgcggcgtgtgcttcttctttgtcgaattacgcccagcttttcccatgttttgttgattcccgtggtgctgctcatgcggctcccttccatgtaaatgcatatgctcaaaataattgttaccggaactcctcgctcgtaaaagaaatgctgcccccgaagaggtatcccttgccttcccccccatatcgaaagaccaattgcgaattttccgtcgaactccccggcttctgctgttctatctgtgcaagagcctgttgatgagactgctcctgcgacgatgtcggcgtccgtctctaggatccctggctgcgtctcttggatcctgtttcacttggcgggttggtgagtgtggaggcgagcctgtgccgtcggaggtagtgacactatggccatcccgagacgtcggtcggataccagcgggttgctcagcactgggtcgaatagacccaagagccatgcggcctagagtagccagagctccttcgtcagaagagccgctgactttgcggtcatacaggctaagagatcgaccatatggtcgctcagtctgaacttggaaggacatcctgtgcctgatgagtgccctgcccacattcacatcgtcttccgttatgcatgcatcaggaccaatcttggcgtcagggtgaggaagggtggtgttcctatctgtgggcatcttgttagcgagtctgaacaatacaaggacttgggtatttgataacttacttccacagaatgtatcggggaaccccgtgtccctgattcgtgtggaggtttgtgatgggcttctgggaggcgtagccatatcttcggatatcgttgagaagctcgtcgaaggagactttctgaatcttggtctacgcatcgtgaagaacgtcttagttggtgtttatgtattcaagcaaagagtgtgctgatgacgatgcctagccgccactgtgggactgtgttactgtgtggtgcgaaggtccggatatagcgggccggacggaagtgaatgagttgatgggccaagaaggaccctaggggtgttgaacaatgaagatcaacaagcaataggaaggggaaaataaaaaattaaatatgagacaaatgaggggatacaccaggcattcccggagacagagagtagagaaaaggaaaaataaagacgacttcggtcgaggagagcagatcctcaaaaggggagggggcgaaggtgcgagtatgtggccgtcgagggtttatcaagtgaccagcacaaagaatagggcagtgaaagcggtgcgaaacgttgaccgacataaaagggccgccacttgacgaccgttgagaatggcattgttatatgacatgggaaatcagacgaggccttgccttgtacggatttccacggaaaagacggaactgagcctaacttggcccgcagtccagaccagcaacagattgtcaaggctgacaacatttggtgcttctgggaaggttttcggtctcgggtagaggaagcgaaagtcaacgagtggttatgaggccacttaggctcacctaggttgaggttattttgtggggcagccccgcgaaggtgagcagaacaggcgcgcggcaggtcgagagacgccggccaagtgcgatcaatcgattgttgtttcgatcttggccaaacaaaggccagcctcaataggcggatgacgtttgttctggaatggttggtgattggtcgaaggcttcttctttgagaattcggagaggatgacaaaggggtgcaaggtaaagatagaaaccacatggatggaaagaaaggaacaggaggcgagagatatcatgccgggggaacatgcagcttttgaaagcctattcccatcaagtcggaccatgactctgcgggggcaatcaagcgtcagccactgggcagcagtcctgcttgctgagaagggcaggcacggacagcggagagtgaatttcgcctcgagcaggcacatcacggctagaacggatcaccgtgaggtgcggatgccatgcccgaaagaggggactggaatacctgcagtcatgacgattggctgcgatggatactcggcagtatgcaacacgcacgaccggactctgtagcctctgagttagaatggtgacagatatcatctactacctcgcttcttgggaacaactagccaatactggagtgccagcgagctcgtgttttcaaataccccacgctgtgaaatgttggggaagaagtcagtgagcagtttgaggccagtgtcatcacccaactccgagagcgaggcccgtcaacgcccggccctgcaagcggccatgccggtcatgaatccccaagcgccgtaccagtgtgggaggaactgcacgtcacacaaaagttgatcgtaggccgcattggggcccgatgacgaccgagctcgagacctgtaccatacagcaagatgttcaccgccgtgacctggtcctgttcggcctagcatgcatgttgtgaatggcctcaacagctgtgaagtctgcatgtctcagagctggacctcaaaggtgggtggttccgtaaagtaattcgttccgggaggtcatccgggctgttcgatcggcggtgctccgcactttagctgccccgctgtcttggcacaccgagacattgcgatcggatgcgggatgattgctgcgatgcttatctaactgatgaagtattgagactgcgagaaggccatgaaggtcatgaaggcgtctgaaatatcgatatcacattcctgtccttggattttcgcaggatctcgagatggtgtgggtgtagggtagcggcgtacttccgccgacctccgaacataatcctccggcccgtgagagcttcacggaacgctccgaggctgggttcgatatcggatgaggtaaatgagtggggccttgtcggtctgtccgatgcgcaagcgcaaagtatcaaaagctggctgatccttgtaaggcgagattggcggtatatgcgtggaagactccgtgaaatggtccatatttcttcgagagagaagggaacacagagttgagaagttgctggctggagagccatccaacagtcaaccgaagatttcccgtatcaaagtgtaagtgaacggggcgcactggccaccttgtggtccggcatcccctgtcaaactcacccctacgctaaatcttaaggcgatgtggcagatttggtaaggcgaagctggcagctctctccaggtggccttccagcagtccgttctccaaattgcctgtacaccacgcgacaattcagcagacgaccgaattgcccaacgacatttttttccctttcctcgccggcacgcacgcaaccatcaatcaattgatcttaactcttttttaattcatttttcacccacacacaaaccgccacaatgtccgaccaagtgcaagaaatcctcgacgtccctcgcgagttcctcaaggacggcatccagttcatccacaaggcccagaagcgtctgtctatgccttgtctcttagccggggtgtcaccatgctaactattgaacagccgaccagaaggagttcctcaagatctcgcaagccgttggcgtcggtttcctcagtacgtccggtctagttacagctaccaataccgaatacagttgactaacagttatgcagtcatgggcgccgtcggctacttcgtcaagctcatccacgttccccttaacaacatcctcgtcggtggcgcgtaaatctgctttttcgaacgggagatgattggccgggagaagggaaggacacgaacgacagagacgagataccaataaaccgaatcaccggggaccgggatcgagtccagtgcaacgatacgtaatcaagacgcgatgcattcacggcgggagcagtcatgataccacacatgattggggacatgcgagatagggacagggcgggcgcaaagatatccatacatatttcatcaggtgtttcggcgggcgatggcggcggaacaaaacactcaataaaacctttctggtcattaatgattttgctctagctaaggatgcaatgtaggggcgcaattgtacaaaagtttctcaatgcaagatcgaaacagggatctatcatggtttcgcgaaccccatgacagcataccggaagctgccattggcataccctcgcctcatggcacggaatgcttgcaaaaaggcaatgccatctctgccttggctgaaagcaaacgcccacaaggacgggttctggatcaacgaccaagaaatatccctacaccaatgtgttagcaaccaacctcctcgagactattctgttcaggaaacttaccatgtcttcttcacctcctgactgatatccttcggtccccccacaaactccagcccgacctccttcgcaaactgcacatatccattcaccgtgcacattggcggcagcagcatcccatcctcaatcggcttaatatccgcatcaaactgctcctgcgtcaagccctcatccttgaaccaatccgccagcaccagtttcccgcctggtttcaacacatcaaacgcattcctgaaaaagagatccttcttggggaagtgagagagcgcttctgagatccagacaatgtcgaacttgtcgtccgggccggtgaagtagctcccgagggtttcggcgtcgagctcgatgaagcggacttttccggggccgagggggatgtactccccgtctgggtactgcttgctgctgctatcggagagctttttggcgctttggacctgcttgctggagatggtgatgcccgtcacgtgggcggctagctcgcgggcgaggaagcgggaggtgccgcctattccgcagcctacgtcgagtatcttgaggggtggtgaggttggggcgggggaggtgtggatttgtgaggtttctaggaggaggcggatgaggttgatttgggcttcttcttttgggaggtcgggggaggaggggggccagtatccgtggtggatgtgttcgcccctgggggggtttgttagtgagtgtcgtgacaatgtaagtaaggtatttataagctggagatgtaccagaggttcaagtagtagtcgcttgctaggtcgtagtgaagcttgatacggtctttgagctcctgcatggttgtgtgggcaagtccgagaggggtgtcatattgcttgctgagaggggtcgtctcctgctcacttgattttccctcaccagtgatgttggttggcttctgggtttcgggagcggcactcatggtgatggcttggcgcagtgaagctgtgtaagtcaattggtgaaccaaaagatcgggatacggattcaagacgtcaactgttgcagaaaggcgggaaagtaaacaatcgaggccggagaggttcacggattaaagttcaatcaaaagccacgtcgcatgtcttcacccaataaatcaacgtcatgacgccctgagttcgcatcccgtttccgggacatgtgcaagcaagcaagacaatgtaggcaagtggagcagatgtcgtggtcgtcattggcccacccagattccggattacattgtccatggtcccaagtggctttcttcagattgccttggttggtgtcttattctgctcaagctctcgagatgattcaaagaaaagggttcgtacttgtcctccccagcgaagcaaaacttgtccttcaaccgcccgagtacaggaaagaacaagaggacaaaaatacaaaagtaaattgactcgagcgcgattcgaacgcgcgcctctttcgagactagaatgcacctgccatgctgataggaagatattgagatatcttgagtctagcgccttagaccgctcggccatcgagccatgttattgatgaatgtcggtgatggagtttcgccatatgatgagcctattgttgaaccatcttttttatcacattttcatcttcatccatataagcggaatccgatcttgttagcaaacaaatccgaaggcaacggagcgagcttgattttcggctgacaacaccccgcaccgttccggagcagcttagcccgactgcttgggcaagattagcagtcacagggcgaagcaccgcaagtaaaacgtctctcttgaataagtcaagaatccttagctgagtatttatttgtggaagtgcttaggctttgtgcaggccttttgcggtgtatctctcttgcttcacggtctgtgattctagcttgatgagaggttccttctggaacttcacaccagtgcgtatctacgatgatgcgaaaggctacaagaacatttgcattttcatcgacttttcaggattgctagtaagataatgtcatccagtgcaagagagaacccaaacaggatgactcggccgggacgcgcctcgtgagctcggaagagcaacctattatatggtcccgattcttgttacccgtagtggtgaagacggagcacccaggtaagtcgctcgagatacggctaaggaacttactcctcggccttacatttgaccaaactgtccagcaaggattgacagtcgacatgccggagacatcacaatggtcacagcacacagagcgaggagctctcacagccaccgcaacccttgctggacgcagcactcatacggccgataatctcagagtaggctatgcgtttactactatcggccgctcgttgagcagagctaacaatgcccccctattctgattgctcctggcctcggacttggagcgttcaatgatccacgaggctggtgacaaaacaaaggcgatggcgatgcggttgtccaatttctggatgaactcttcatcgtgccaggtaggccttgagaagatcactaggtatataaggtgtgaagctcccaggtcaaatcccctttctgtccatcatcaccaccacagtctcaacatcacctccagaccagctcacacatcacacactattccactcttaaacaaccaaccaacctttcaaaatgcagttaacaaccctcttcatgaccctctccgctgctgccggcctcgcccttgccgcccctacttctggcaccaaccttgacacctgccagcgtatccagtccgatctccagggaatgaacgttacctaccgccccgatatgatccacctccaccgctcgagcaatgcctctttcaacgtccccgccaacgcccgtggtccctgctctcttattgcggcctttccggccgactattcgattagagactcctcggttgagcaaggcgacaaccccattgctgtcaacgtcaccgacgttgatggtcctaaccccgactccctcgttggtaccgttcgcttcccttctgccttgcctggtccgacgactaaggaggcagtcaagatcaccatcaacagttttgcctgcagggagaagatgacttaccattttgaggccgccgagttgggttcggttcagttcaagaacacggcggatgctgggctcttcattgaatatagctgctaagcaaccacttattgtgatgaggacgttggtgatttggggtttgtgggtaatcgggaatatggcgtgcatcctttttaccagctttgggggccacatttaaatggaagctcagcggcatgggggtatctcaggggggttagagattcagacgctccctgttctttgatagacagcaatgggattttattagtgaactttgaaacatgaggacattgtcagatgatagtgatttgtagaatgagggtcgcatatttgtgaactgtccaagcgtacctatgcactctttagttaattccctcccaggtctcggggcgcaatcacaagggtttcccttttttcaggcacccaggccagaagaaaaaagtgatgtattgatggtggtctggaaaaactaccaaatggagcaaaacggccacgaaaacccacaaatcacttaaaccacacaactacatcctatggggcctaagctttaggagcaaggtggcctgacctgactgaacgcttacggggggnnnnnnnnnnnnnnnnnnnnnnnnnnnnnnnnnnnnnnnnnnnnnnnnnnnnnnnnnnnnnnnnnnnnnnnnnnnnnnnnnnnnnnnnnnnnnnnnnnnnnnnnnnnnnnnnnnnnnnnnnnnnnnnnnnnnnnnnnnnnnnnnnnnnnnttacaattaaccttcaatttaaatataataatttccaaagtcattatactgtcatcagtaggaaatctaagtattctgaatttagcctgtgaggagcacaaaggcggtgatgtccttgctcaaccttcggatgaactctccatcatgccagttagaccttagaggatatgtctataagataccggttctcccctaaaacaagtctcatctctatttcacatcatcacagcctcaagcctctcttaccttacacttttaactgcgacctcggccggcgcctacactcaaattgaaagtcggaccaccttcttgcacccttcaagatgcatttctcaaccctcttcatcaccctgtcagccgctgccggcctctccccttgcggcccccacctctcataccgaccaatccacttgccagcgtgtgaagtcggaatcgtacaaggtccacatcgccacccactccaatgaacccgtggaacccgaagtcttgactttctccctccccgacggtacccacggcacctgctctctcatcgccgacttcccggccggctatccgattatcgactctggcgttgaggatggccgtagcccccttcccatcaatgtggttgatttccactctaacgaacacggcgtcaaagttagccccgtcgtcggtacattccggattccttccgccctgcccgacaagaagaccacaaaagcggtcaaattgaccatcgccagttttccttgcgagtgaataaggctgtttataatcgagattgcggccataggtctggtcgccttcgagctgaatgacaagagcgggctgtttgttgagtatggttgttaagcaatcgatggctgggagcgggaggttttggtgattcggggtaaacctttgtacctcttcgttttttcttcactttggaacccaccgttttgattgacgctcgacaacatggaggtgttgcatggataattagacttagacgccccttcttcgatagacaggaatgcgatctcttttttgatcatctttgattgtgtatcgttgaatgactctgaggtacctaggtataaccaaattctaccgacagacccatgaagctgctattactctactttgcttagttgaccccttcccaacccttaggaacgccatgctcagggggtccttcgtacggttccctatcgaaggcatgcgctgccaaagcagccttcaagaacccgaatttctgcacataaatgcagtcgtggaagttgaagttgcattggttatatgttagattaatattagtgttattagttctctaattacctcgtccagtatcaaacttcttacatccagcatacctacagtcgctgcacctaaccgcatgtcggattaaaccttcgcgctcaatattgtctggataatcttctttgagaaaccggtatgcctctttcctaggagcctgttatataccgtactattagtatacctctctagatcagttacttacaaggagagaggattcccacatcattcccacgatggttgatgagccatctctccttattcggccgttaaaagtaatactttgcgtttaatcgaatgtcttcggcgctcttggttgcttcgtgatccaggccggcctgcattgtcttgcttcgtgattctgaatgactattagccccaagaccgagaaagaaatatcaccattcctactcacgtttctcactgaatctctgagccttatcggcacgttcttctgcaaaccgttggttgactgtctgcttcccagcctcctctgccgcctcatcttccgcagaaatcaacttattccactgtttatacacgactaaacataagtcagtgaaattttttttgtttcacctcatggacttacccaaagccttggcaatagcctgcctagtcggcctcccacccttgctcctctcctcagcatcacaaccctcccacttgccatccaagtctggatatccagctcgtgctgaccgcgtacatggcggatcagtccagatgtggaggagaaactcttggcggttgggcagaggatcccatctttcaaactcaatccggcaaaagacctctcccggaaggatcttgacgccctttcggtcattgtctgtaacgatattagcgatcaggagtccctctggtcggacctggtggccgtggtatgactgatagtcgcgctgaaaactctggtcaacactctgggagacatgatcgaagccgggccatactcaaggatcacttacgctgctctggagagaagcccatgcttggtagggttcagcaagtaaatcagttcccatcacaatacgtatatcgaataaccgtccaaagcaagagatataacccgatctccaacgagtctattattgggcccgctcgaaccatgatgttggcgccgggcttcatactccgaggcatgaaaccgtcaagttctttttgagaagccttcgagcgggagagtaatcatggagaacctgcgcctcatcaaatactcactgcctgcctaggtcaagatcatgtttgctatgtgacgcgatcctgtcctgtcttttttctacttcttctcttcatactcacctcacaactcgcatcagtatacttcccaataacgccactcaaagagaccataaccgcccggccagcgacgatcaatctttgcaactacctcaaggaaaccaagcccgtcggctcctgatgaaagtcagttcgtctctaaattaaataccaccaagatcagccccccgaaccttttcagtttgaacaaataaacccgcgttacaacccattgatacgctcctcagccttgccgtaaacaaattaacaaactgacattccaatccgcagtttgctgtgtagtaactaaagagagttttgtttgtggccccccctcgatctggcagggacccccctctggccacctaaacctctaaccctgagaagaaaattcaaaaatccaacacttgctccgacttttccaagatggattcgatttcgctcgcatcgctttcctaaggccctacatatatattctaaatttttactttcttttttttaaaaaaaaaaagaaaaaaaaatgtaatttatagttattttcaggctattttacattaaaatttttttcttatttatatttttgaaagagtagtaaaaattatatatctttcttctctaactaaaaagggggaactcgggggttgccaagactcaataaatagactgacaaaagcagcaaaaacatacaacagcagggattccccagtggtcacccacctgagtactaatctgccgatcaactgtttgactaggggagagcggacgggatcccgtattttcagttgtctatggtcgtatgtgatagttttaggtgaatttgtggtttatgtttgaagctctgctattggcaagaaaatcaagagctttgtgagagaaaagaagggagcagcaagctctgtgtgatgtgatgaatagacgggagctttggatgagctgccccgcttttattgcccctccacccctcgagacaaatccaactgctctctagacgagctttgggagggttggtgagatgtagttcaggagaggatactccggtcttttattttccaccttacgggtaggcagtggccaagatttggatccggtggcaggtttttaacgttggtttttttttgaggaaggttttgttttaggaaggtcagatatcttgcgataaaggcgatctccatcacctgatttgcctctttccatctctcaactttcaaaagcctcgtggtcgagtgagattttcacactgcaattgaggctcaactcacctttacatctcacaatcccataacaacaccacatcaatttgacaaaacacgacagcagcacacaatcacaccatcaaaaatggcccccccttccggccccccctcggtagtaacaaacaacctctcctacctcttccaagaccactccaccggcctctcaggcataaccctctccctcccccccagatcccgcaccctcttgatcggcgccaacggcgcaggcaaaaccaccctcctccgcctcttggcgggaaaacgcctagcgccagcaggcacaatcaccatcggcggcaacgaccccttcaaagtcggcctcgagggcgtgacctacctcggcctggaatgggtcctcaacgccatcgtccgcaccgacatcggcgtcgacgagctcctccgctccgtcggcggggaccaataccccgaccgtcgtgacgagctcgtcgccgttctcgacatcgataccaggtggaggatgcacgccgtttccgacggcgagcgccgcagggtccagctcgccatgggcctagtccggccgtggacgatcctgttattggatgaaatcaccgtcgacctggacgtctggtcccggagtcagtttttgagctttttgaaaaaggagacggaggagagggagtgcacggttgtgtatgcgacgcacatattggataatttggcggggtggccgacgcatttggtgcatatgcatcttgggacggtggtggagtgggggacgacggaggagatgttggagagtaaactggggggagaaaaagagacgggaaacagtcggctaggggagttggtgttaaggtggttgaaggaggacttggatagaagggggccgagagaccagttgaggagggggccggaggggttgagttataattcggggaatttggggattggggggtatgggttagagagtaagagcaagttggaggagaagagatgagaaaatatcagaaaagatgtaagaggggtgaagatgagaaggattcaacatatagagggatagatgtggtggcgaatatggtttaacataatacccgagtggatttaacatgggtttcactgtgcggaaagcttacttgatgtagagtagaatggcatatccatttaacatgttagaagacagtcatgtgtgctattgactcatatcaacaactggatgactgaaagcaaccaataccgcccaaaaaaccatatccactcagaagaccgtatgttcgagaagtgaaaccataccaggtccaacctacaaagcaaagacagtgtttttcatgtcataatactctttacattattaccacacagtacaactctaatttacctctcttgatgcctcgtttatacccccccggcaatccttcacaaccttgacatccctcagttgttgtttctgctgaccatcaactacggcctcccaacccaaaaactccagaaaatatgcaaatgtcccccaagtttggtccgtccagccattaccatgagattgaaaaaaaaaaaggtaatgttgagatgaaatgcaaggaaaaaatgacccaaagaaaatcatcatcccagcttcttgacttcgtcgtggtcgtgcttcgtccgagcttcgtttgttcaaaaatatgaacagcaaaagtacaccaacgaaccagcacaacaaaccaaaccaaaccatcgtccagtctcgggtgaaatcaacgctcgcctgctcgcccgctctcacagaatgccaacagtaaccttacacatccaccccctaattccgtcaatgcccccccacacccccccacctcaacctcaacccatccgtccacctagcataaagcaaatcacccagcgccttacaatgctccatcccctgcaccgccggcctccccggaaactttgcctccaacgccgccatcgccatcttctccttatcccgttccctattctctttcgcctctctctctctctcccgtgcttccttatccggcgacccccctccccttcccccattaacgatccccagcgcgttctccgccccaccaatattactctccctcctcctcctatgagacgcgagatgtgggttatcctgtgaaatcatcaacttcgtcggtgagctcgacaaccctggtggtggctgcaaggctgctggctttgttctttggtctttgacgactgttcctccttggggggtgccctcgctgagggtttgtttatgttgttgctgttgttggtattgctgctgctgctgctgctgctgttgttgttgttgttgttgttgttgatgatggtgttgttgttggggtagttgcgggacaaaagcattgcttagctttgtgtcttgagatactgtcgacatgatgcttcggaggaggtgataggacccctcagggtcgacagcatctagatgggccaaagcgtcagataacctcgccagtgcctccctttttgctgagcctgctgtctgggcgtggagttcgtctagacagggttctagagccttgttgtagagccttctccctaaaaaggcttctttgctgtgcggttctaccggggcttggtacgagtacgaggttggtggtctgttctcgctgttgtcatagatgaacgagtcactgggggaggaaccgccatgatgtgaagggttggtcgatgtgtcagatggtaccctccggaataaacgcatagtcgagcccgagttaccaaacgacatgtctggttgtaatggccgcttagccgcaacagacgcacggggcgagccgttggaaacctggcggttggcttgctggctttgacggagggactggcggcggactgtcgacttccggacggtacttggggtggtgggctggaggggcccatctttgacgtcgagcttatgcatggcgtcctctatcccgtgaacgacagacggttttctagacctgaccgtaccgcgtttttgttgtgggacgactgatttgaccgtgtcaaacacccactcgtctgccccatccttgggcgagagagtttgcagcgtctcttgatagtacactggcatcttcacacgctccgtcttggcatcggcaacttgcttgcggtatatgagctcctggagagcttccactttgccggctgaacggatgaaccgatgcttaagcagttcctttgcggtgggccggagatgcggtgctttgacgagacattgtgcgatgaagtccttgaactccttgctaaacttcccttcgagcctcggggggtcctgcttagggatctggaagagaactttcatgggatgtgtctgagcatggggtggctcgccagtcgcaaactcaatcgccgtgatgcccaaggaccagatatccgccttgaaatcatagccattctgctggatgacttcaggggccatccaaaagggagtgccgacgaaggtgttgcgctgcgacttcatatgcgtcagctgggcggcaacaccaaagtcggcaagcttgacttttccagtctctgacagcaagacattggcagccttgatgtcacgatgaatcttgccctctgcgtggaggtattccagaccaaggagcagttctcggcaaatgatggcaatatggacttctggaaacacgcccggtttgagctgcaatgtaactgttagaacggggcatcgccaagaggcacgattaagtaaagtgcatgcataccaaatccaggcaggaccctcctcccagatattccatcacaatccacagcttgtgtccacggagaaagctggccttgtactgggtgacatgagcactggcacaggtgctgagcacggatatttcttgctgaatttcatggatatcatcgtcactagactcgagatcgatctgtgcgcaacacaatgacattaataccacagaacgcccgagacatgtttgaccgacgaggaaaatgacaaaaaaccaccatacatgtttgatcgcaactgtctcccctgtcttcttctcaatggccttgtagaccacgccaaaactaccgcctgcgtcacagtcagtttcccacgttccagggcagggcaacagcgcaatgcgcactcacggccgagctcctccagcacctggtagtggtctgcgacgccttcgtctgccattgcgcctcagcccacacacgggatggtggagtattcgtagggttgggtctgcccttggtcgcaaatcgatcggggtgattagataggcgcgaggcggggattcaaggttattaaagcaaccgagcgcaacctgggtcttggattgttgtcgcctttccaaaccgaacctcgatggtcctagagaagtccttgggaaaaaggagaagggatgggttgggacgggagagaccggaggcggagaaagcgagggagggaggagggagttcggacggttttctttcttgtcgatgggatcctgggctggacaagaggaaacagcgcccgcgttgggcctgtgtcagccgttcgctattaaacccctggatctggtgttctcagttggcggcttggttgtccgggtgctgcgtttggcgggcacgggccattgtttacttaaagatctagcgggaggtagggcggaccctggacgagtttcggagtgccgcccggatctgcagcggcgttggcgttgttgttgttgttggtcgagatacgaagactgatgagaagatgctgtacccgtccagtagcagggcggatggggccagaatcatggtgttttttgagtgaatactccacggctgggaatagaaaagtggacgacgggtcgagacagttcttgaagaaccggcgtttctttctactgcgcagcttgcagcgtcctgcattccacaggctgcagctcgaggaacagcgcgctaagggccaatcaccggcaccctcaaccaaatgcccggcacttgggcggcatgctaccgaaaagccttgctcaggtggggtggtggccggttgccccacgcaacgacacagctggagagggagcttgggccttgctttcgaccgcccttggggggctctcaccagccgtctccatttgctgagagatccttgttccgccctgaacaaaatgcccgcccggctgttacccttcatctgcgtttgctattacaactgaactccaggagcacctacatagtgggggaaactaaggcctgggatcccttcgcctgtattccattctttcctgcccgtcgtcgtcgtcactttggttgtggtcgcgtggtgaagttgctgctgtgaagttccttgtttctgttgtccactggtcctggtctggcgtctgccctgtcttggccttggatggcgccgctcctcgacatctccacagctgcttcccagcctccaggcgagttcgattcttaggccggtgccgtcattaacattcattcattcattcattcattcattttggcgcgcaacaacctcctcttgtgtacctgcatttgtatacatacgacgacctgtgcgagcaccgcaactcgagcactcgaacgaccgcggcaccattgtttgcgccgagtcgcagcagcgacgacaatcgacatcaaatcactgtacaggggcactaaccgaccgctgcgttattgtacctgccactgtcactgccgccttggacgactcgattgaagattcgcaaaaatggtgcctgcgccattaccattaccgacgcgcttcccgtgctgggtcagggcggtttattcttggggaggagaggttcgtgcgatgcaatgcaatgcgattgttgacttttcttttcttttcttttttttcgcggctcggggactcagctaacggcattgttttgttcttttgttctagagcaagcgagatcttgggtttattgagggagatttaattgaatgtctgaatgccggcgatggctcgtggtggacaggtcgtctatttcgcgacagaagagcggtcggactgtttccttctaattttgtcgaagtattgccagagacgtttcgcccaacgacgaggtcaaccagccccttgccaaacggtaatacaccaagtccaaagcatacgccacaaaaatccaggacgtttcggaaaccattcgaggcttatgcaaaagcgccgcattatacgacggcaaaggtcccagaaacgttcagagatggctacaagaaagaagatgccattccagtcgcccgatcccgcgatacatcggtcaactcgatggacaatacctccccagtccgcccatctactagaaggcaacgagagatttcgcccgcacccccttcgaattccagttataatcaccgagcaccctctcccgctccaactcaccaccaaaattatgggtcaagaagcccttcacctatgccggaatatcaccatggtggttctagggcaccatctcccgcccctcctcaacaccacaactacatctccagatctccgtcaccggcaccaccgcaggatgtgggatacaacccgcgcgctatttcacccgcgccaccacatcatggtaactatgacatgagggccgcttcgccagctcccccacaccacgggggttatgatatgagggcggcatcaccagcgccgccgcatcacggtggctatgatatgcgggcagcttccccagcaccactgcaacacaatgcctatggcatgagggcagcatcgccagctcctccccaacatggtggctacggcatgagagcagcgtctccagcacctccgcaacatcatgcctacgattcaagggcgccatctccagcgcccccacaagatgatggatttgaccccagagcaccatcgcccactccttcatacatcccttacaggcctcccgaggcgagacaacagagctctttccaccagagtgtggattcgacaatgccatccgggccacctctctcccaccgccaccatgtacatcatatgagcttagagaggcacaactctccagcacctcctcagcatgggagacagcacacgtaccatctaagtctcgaccgaaacattgataggtcagattcgcctcctccaccaccaccgcctccccaccgaaccaaggtcacgcggcaggagtctcagttctctcaggatgaaggttactttacgggcatttccagggagcagtcagcactatcgagaggaaattccaatgcttcatatggacagggcaacgtttcacgacatcactctaacgtgtcctacgaaccaccacaacaatcaggttttcacacgccgaggacgcttacaaccccttgcccgccctctcctggtatcgatggccttacaccatcaccgctgagagaagcgatggatgatgtgatggagcagttggatgctctcggtgctggttccactgtcagtgccggccgtgagccatctccagaaccgcctgtgttggacccttggtcccctgcttcgtttgatatggtgcatgcgcgttcaagaaaggagcggaagcggacctcgcagctacggcccaatacatcaatggggataccagctcatattgacgaggggtatgaaacaaacagcggtacggccgactcgtctgtggaaccaacgccactcgaaagctctcaagaaccacatctcccgcagctcagcaactatgtcgagcgcatggaatccagactcagaaccatgcaccagcataatgctagcgttactgaagaggacgaagcccctccaccgccacctaagagcagcgtgtatgacaggccaaagtcttccatgggtatggatgccccaccggagcaaaagttgaggcacaagaagtcgggctatgaaggcgtgggccggaatatcctcaacaggacctttaccaccaaaaccaattcaacaaatagctcatcgaacacgcagagtaccgatcggagcttgatgagcggtgtgtcagctggaggaatcagcgcaacgagcgccggcagccttgcacgcaagaatcggagtagggcccacagcgcgcttggtttgcgggagcttctaaacgacgctgatagcggtcggcctgagacgcccttttcaggagtgacttatcacagtagccacgcgtctgaccaccagaatcagcaacgccgctccaagtcacagttgggcttcaccgaggatcccatgcctgcgcttcccggtcttggaggtctggtaacacccaagccgaagaagcagaatttcatcaagcgcattctggagtctgccaagacgggagtggccagcacgcgaggaagcatcgccgctgctggagctagcacctccaacctttcatcctcgaatcgctctacacctgccctaacgtcaatgtcttctgccgcgttgctccctagcaagatgccaccccccagagacatgggcatgggtggcggcgttgattgggtgcaggtccgtcgtgatattaaccggtcgaattcgctgagcttcaacgaaaaggtggagagaaaagaaagatgtcagatgttggattatccagcgcttgatccagtcgacgagctgtacagcagtatcgacggtgatgagggggctgatgggatgccggttgctgagccgaccaactatcatgccattaacttgagccaggtggacaagaactcgcggttcctgacaaatcttgcgccgacgaccacggccatcaccttggcgacaacattcgtctgccgtccctatcggagtgatgtccagagactgcgagccatctttacttgggttgctgagcatatctgctgggaagaggattttgagggcgaggttgatactagacaggtcattcagtcccgacgtgggtgtgccgaggagtatgccgtgctggtgttggaaatgtgcgccgccgtcggccttggctgcgaggttgttcgcggctacctcaaaactccgggagagattccagaagtcaacatcatgcccagatccaaccactggtggaacgctgtcctggtcgataatgagtggcgcttcatggactgctgccttgccagtccatcgaaccctaagcgggccttgtactcgagccacggctcatcatccgccgacccttggtggttcctcgtccgcccatccgagctttgctggacgcacatcccagagcaccacgcccagcagcacctgtgcccacccgtggcccacgagacgctcctcaatctcccctgcgcttgcccgcctttcttcaagaacgatctgcaaatggtggactacaacacctcccttgtccgcatcgaagatctcgagatggtccacgttaagtttaatgtgcctcctgatgtcgaagtcgccgccgaggttgaggtccgggcttactcccgagatatggacggcgacctttttgagtctggcgatgtagtaaagaagcgagctctcgcccaggcagactggcatggcagcgtgaagcggtacacggtcaaggctctcctccccggcgacgaaggaaccggtgtcctgaaaatctatgccggcaagcgtgggttgatgcacagcatcaaggacatcccccatcccttggcttttgccctgccagtcatccacacgggcgaaaacccaccctacgaattcgtcacccgccaccccaccccccacgcgcaaagacacgacatttacgttgtccaaccccagtgccagcggttagcactgaacaacacgtttgtcttcgccatccgtcaacatcccagctcggcagccatcacgcccgtgtcccccgccgaggaaaacagaaggggaggcgcgagcccgataccgtttatgcggcctggtagtgccatgagcatgactagtagtgcggctgggtccatgccgtcgacgactacatccaacagcagcgggggcagtagcaagccggcgaaactggcgattcaaaccccaggaggaaaaatcttgaggttgatgagaaaggaggagaggagaggggtgggaatcgcgggcaagatcatgtcgcccagctcgtcggggttgcacaacgaggaaggggtggatgcgggggatggggggttgtgggagacgattatcaaatgtagcgagcggggcgtctggagggggttggtgcttgctgatcggacggctaggtggtgtgttttcgcggagtgggtttgcgagggttaagcctttctttcttctgtccacatgatatatacggctccggtttgcgggggcataatatgggttgtttgatgaagtgtgtttggatttgttgttggaatatacacgggtggaagacgtgggtgttatacaaagaagccaaaaagcagggtttgtttgactattttttgtttggaacatataacatataccaaggttgtgggaaggggttgtgtggtataagcaaaggggatattttttttggtttctttttcgcttcacacattatatcattatttttgtttgagagagtgaagggggggggggaagctaaagcctgggaaatgtgggaatttgcatataaggatggcgttgtatcattaggcgatttttaaactttttcgacttttggttggtggctgcaggagaaagagatatatgtgtatctcgggtgtgcagatactgtttgttgtagtgtgtatgtttgggggagagaaaattatggtgtttgtatcttgtgtttagttatataccatgaaagtaattgactgattttgacactcgcccatgttgagagtaggtgtcagatagatgtctaatgattcagcaatgagattttctcataccagatacagttttgaaccaggaagatcttccagagagtagtcatcatcaatctgaatgagtatccagactggtggacaaaaaagggagtggaaatatgaagttgggactgctgccaagacttgttgatggagtttatatgcactctcccaaaacagcaaaaacatacaacaccaaagaatccccagtggtcacccacctgagtactagtttggctgtcagctgtttgactcaggcagagcggacgggatgccgtattttcagctgcatatagtcgtatgtgcctttgtcgagcagaaaatgatattatatgtatctcagagtccgattacgcccacaaaagccacacccatagacaagagcaaataatgataccctatatatatgtacaaataatacagtcatctaccatctgtttaaccactttaatcagctcccccacctcggcaaataaaacctcacattctcatacaccaaaaacgtcacccacgtcgccggcaaaaccctcacaacaccaggcataaccccccgataaaacccccttatcccctcctccctccaaagctgcctcaccacgccctttatccccctgccaaacctctcctctgcctcgtagccctgtaacctgctcctcagtacctgaagcgggtaggtaacccccccagcaaccaacttggcaatcgtactcaggacaacagtcgcctcattgctcatatccccttctttcctctccttatgccgtgccgagtacatcttcttgagcgggtcatagacagcaaactgcaccgccccgtgactaacagccaacatccccacccccaaccctctataaaacccctttatcccctccgtctgaaacaaatcggcagccccggcgagcatgtgagggtaggcaccctttgtccccgcgtcagaggagaccatccgtgtcttgagcacccagatcgggttggtgataatctgagttagcgccccggccgccaacgaggcaacaaaaaagtctggtggtgacaggccccccacattttgctgggagggggaggatgacgatgatttgagatacaagatccccctctcaacattattcttgaaaaagaaaaacgacgcccagctcgtggcattcccgatcaagttgggtgttaaccccctataaagactcgcgagcggtttcgggttggagctgagcgtgcggatcaaagagactgttgttggtgggggggtattagggctgtgtgacgagcggtggactaatttcaccagtcagtacaccttgtcatataaatttgagacgaggagaaataaaaaaataaaataaaaaaaatactctgcattcgtgtcttgactatatcaagcgggtgcacaatcagggtggccatggtgccggccgacaagccggccaccgtctcgacgagcgcgggggaggagagcctcccaccgccgctgcgctcatcttgtggtggtttcgtcatttaatacctggggtgaaaatgtctagctacatgacatcgtaaacaaacggctccgtgtaaacaaaaatcaaacggtgcgcatgtgtaggcgcaaaagcgagtgttgtttatcaagagtcgcggaaaaaaagctatgacgcaagggttcctgctgttcgtcccaaaaaaaagtttccgggatcctcggccgagcatggccgactgaaaccgggatttaagaagcatttttcggcgccgtttggccggcgacggtgatagctacgccaagacttgaaatccacgttagcttgacaaagaggaagaaaaagaaagagcaaaatgaacagtcatgagtagattcatgatgcaggagttgtgtctgctattataatgtacaatcacggttatggtatcacttgctcgccctcgttcgctctgctgatgacgaactacccccaacccataatcccgctttatccctcctgatgctccttgcccgttgcgcttttcccagcgcggcgccatcattttgagttgttgtactgatacactcggtccatcactgttccctttccatatctcgaggtatttatcgtcgctacttaagaaaggggagagaggaggctgcagagatagttagatgctgaggttcaaagatcgggtgtcaggacaaagcgtcggcggagacataccggaccatggatggccgagggtcgctgcgggtgtagcctgtgaagtgtcagttgtcatgtttttgctagataaccagacaaggtgacataccaagatagaggatgaaggggagatagccactgctacagtcagtatttcgctcgctaaagctgtccggctcgtccaacatactagtgaagggcaacgcgcgagatctcaatgagcttgccaatgcgctcctgttgcgtggttagccagctgcttcattccctcgtaaccctgccggtcaggtctgcgtaccttggactcctctgaaagacggaacattttggcggtttgtgattgtcctgatatgggaatctggggtatgtggtcgtcgtggggttgcaagatggagcagtctctcaatcaatgatgatgttccagtggcagaatcggtttttgggcggtcacttcctggacaaagcttggcgcggctgaccccatgtcgccctgcaagctgacccctgcaagtcaaccgccggacccacccaccttctccagaaaactcgcgacttctcaacgcaccgcgcttctttggtggaaaggtagctgcgagaggcgtctttttacaattgacgaaaccaccacccagttgccatccagcaagccccctttctccacgacaggtgtagataatcccaaaatgtcaaaacactggtatgtcttcccacgaacacataacatttcccacagatatagcaagcaaacatttccaccatgtcgatcatcaggagattcaacatggctaaattcctcctttttagggagcaaaacaaagatgccaccgtctacgtcggcaacatagacgagcgctttacccaagagctcctcacagagctcatgacccaagtcggccccgtccgccaggtccatatgcccctcgaccgcgtcacccgcaaccaccaaggctacggcttcatcgagttcgacacccccgaatccgccgagtacgccgccaagtgtctgaatggcatccgtgttcacggcaagcccctccgcgtcaataaggcgtccgccgacaagcaaaagacggtcgacattggcgccgagctttttatcaacaacctcgacccccaagtcgacgaaaagatcctctacgacaccttcagcaccttcggtcagatcctccgccagcccaacattgtgcgcgacgacaacaacatctccaaggggtatggtttcgtcagctttgactcgttcgaggcctccgacgccgcgctggcgaacatgaacgggcaatatctcttgagcaaggctatcagtgtagactatgcgtacaagaaggacggcaagggcgagcgccacggtgatgaggcggaaagaagactggccgccgaaggcaagaagcacaacatagtgcccgagcaacaggttctcccgccagccttccatatgaatgcccccatcgccgccacaacacccgtcacaccagtcgccgccgtcccgcccatgatcgacccctccatggccgccattcctccaccagtcggcatggtgcccccagttgtccctcccctcgggccgggaggcatgccgccagttccagtcgcggcgtacggcgggcccttaccaactggaccagcagccatgggcggtcgcggtggtcctcccccaattccctacggcggcggtatgccaccagctatgccaagcggaggcggtggtcgtatgagcaacctcccgcccccaccatctggtctcccggcgcgtccaccccccagccaggccgggtttggcggtccagtgcccttccacccaccaccggggtttgctccgccccctcctgttggtccaggtcagcaaatgtacccccctcctgttggcttcaacggcccgactccacctcagggattcatgccaccaccgggaggtgccccccctccgggctttggtggtccacctcctaatggctacccacgtcgagggtaggacgatcgagtgtggggtgatgggaggccaggaaatgtatcaccctcccgatgactgcaacggtccggctccttcgcaagggtgcatgccgccatcgggaggtgctccgcctcctggatatggtgctccccctcctgatgggtagaatcattgagggcagaaccatcgaggcagaaccatcatgggcgagatcccggggggtaaaactgtcgatgagaattttgggcgtttattctatgggaattgaacgaaaaaaaaaacagtagagaaaggaaccgtggtgaagccttgataccccgttcacataagtaggtagtgtatttttagagaagcagagaacagtgtacataatatgatgagaatacatgatgcaagaacacgaatggtgaggatctggaacacaaggtagaaggcaatggcggtagtgtcagataattctattgatacaaactacacttcctacagcaaccaaaaattgacccccttttaccttttagtgagttgggccattttgccccctatttgacctacgattaaaccgcaaagaacccgctgtcatccggggaaaatcaaataaatcaacgcccctttcttttcactaacccccaaactcaaaaccagcaaccaacctactactcaataatattaacctcaccctccaccccattctccttcttcttctcctcggccccattcgccccattcctctccttctcctccgcctccttcctctccctctcctccctcctctgccgctcaacaacctcccactccttcctcacctcctccctcctctcccgctccctcaccgcctcgaccaaaaacgcctcctcaatcgcctgcctccgcttaaacaccctcagccacctcgtcccccacctcctgaccaacccgtcctcttccccacgagcattactctcaagcatctcatccttcgtcccgccagcccaagcccccaagctgtcctcaatagccctaaacagctccctcatgttcctcacctcgttatccctcgtctcgtcatccaccatctcatccggctggctggccttgacaaccagctgcctcacccggccggtaaccttgatgacagtgttgaagaccaattcgtacatgtgagcccacgcgagcgcctcaccgcgcgtcttgccagcctggacgttcagagcccagttgatcaccgtcagcggggtcaggatggagtagttcaggagcttctccacgatgctcagcgcaacaccggggtgcacgctccaatacgtcatcaccgcctcgatgatctgcgtcctcgacgcgtcgctcgccgcgccagcgtccgccaaccggtccttggtgcgctctatcgctgccaggacgtgggagagcgacttgctgcctacgtagagcacgcaagtgacaaagacgtccgtgctggccaccaaggcgtcgaggtcgcggtcgatggcctgagactgaatccgctggataacggcgtcgatttcctcgtcgggggccttgcgtttgaggagcgcggcgatttcacggccttcggcggcaaagggggtgtctaattgctgtgttagtcactgacactcgaaatgataaagaaaagggggaaaaaccaaccatcgttggcaaacttgaaatcgggcacatccttctccttctcgggcccaatcaacttctgatacggctccggaagcgtattcttgatcctctgcgcaaaactcaaccgaatctccttgtcgatcgagccaacaataaacgccttgcgcgggtgcaagccgctcagctcaacatcgtccacccactcggtccacttccacgtgaaaccaaagttggacaaatgatgcgagaaccagtccatgaaccggtacgccagctccagatccatccgcggcgcgtttctgtaaaggtaacgaatggcacggcccaagctgggcgctatagcagcaggcgccagcttgcaagcctccgtaagcacagagtggtagtaaaccaacttgtgctctgggttaggcaagaggaaaagctgggtaaacacggcatcaacagccacatcttcgggcttccaggtagactttgacttctcgatatcccgaagcctatcgaacggcgtgcctctcagagcaaaagtcctcggcgcaaagtagcaatccacctcaataagctgtcttgctgtggcgttgcgattaaagtgcaaaacattgatagtatcaagcagtgcatctctgatgagcgacgacgccaggctggtaggagggggcaccgactcgacttcttgctgcccataaacagagatatacacctctgggaacaacggcctcggccctctgaccaccgtcttgggaataacgatattcggcaaaacgtgcttcttcgcactggccagcttggccaccgtctcaacctcgccgacagggaactgccacggtctcggcaagcagctcaacgcccaaccctgagccgcctcagcctgcagctgcgcctgcaaaagcgaaatcaaactctgcgactgcgccgggttttcctccccagcctcgggatgataaggctcaatcacggcctgcagcggatgcggctcgctcgcaatgatggccgtattctccagcaaatccgccgctttctgctgccactcctgctgcacctgctccggcgacccagcagccatcacatacggaagcgtcaagagaatgatcttgacaatctctgtgccgatcgtatcctcactgctcgccgtctgcaacccaaccgcccgttcaaaaagctcccccaacacaccaaaaaccccttccccttccaacacgccctgcagacaccccaccagcttcaggtacagcttcacatccctccaccccccctcccgaagcttgtcctcgatcaacctcgccgctttttcgagtaaaagatccatcgcctcgggcttgttggtgttgaccaccatcaacacgcccgccaaaaagggggttttgagaggctgctccacgcacaactggaggaccaagtcggtgaagttgcctctgagcaagacgtcatcgtcccagttgtcggtgaacaggttcgcaatctgggaaatctcatcgtggcgctcgatcatggggttctcggcaatggcgatgagctgcttgcggaggcggacgtgggggggcgcgtcgtagcggcggcgggagttgttgccgcggtagtggttgtcgtcttcattgtcatctaacccagattgtgtcagtcagtggtgatgatgatgatgatgatgatgatgatgatgaaaaagggacaaacatacctctataacgacgtttccggttatacccaccgccgccaccacctctacctcctcctcctcctcctctcctgtcgtagtcggccatggtttggatttgctattgcgcaactgatgggatgcgatgctgctgttcctctcccgttggatagttttattttctttttcccggtttggtgttgtcgtcgcaagagaaatctacctctcgcaatttttgatagatttcactctcaaaccagatgattctgccaatccaagcccgagagcgcaattgatgattggttttgattggcgcaaatccggaaactcttgtttcctttcgttgctctctctgaaacaataaaagttgagaaggaagacagcagcaacaaaaggctgacaaggttcaagttgccagtgccaagcgcgacagaggaaagcgtgaaataagtggggactggactggagagaaagtttttgtggggccacccaccgggggaaggagctagtgatgcaagtgatcccggtcggtagggagtggtggttgccttgaaaatgaggctttacaggctggtataagtcacgggtgtttgttggagcaaaattcacgacgacgacgttgtttgtctgttattatgcagtgtttggcttttctctctacactttgaataacctcagtaacactggaacatagtaattcatcgttctcacccatctccatagttggtagaagattacctcactttatcaatccatacatgagtgtcaagacctcatcaattcaaagccatgccatgaaaatattttgaatctgaaagtaaacgaaaaccttgataaaagcacaagaacaaccacagaatccaacaacatcgccttcttcatgtaggcctgtctcaaacctgctctgataatcttttccgtttttctcatctctcccaggcaaaaacgcccaccccatgccatccaggtgctccccgccacatgatatctttaccgtccgtcccaactccttctcactctcatcccaaaccaaaagttgaattgcgctgaactcgatggccgtctcgtgctacccattccaaaactaccattgctcctgtttgagagtctcaaaccaagatagccagtgcaggcaggccagcccactaggttcttcagctgggagtacatgacaagacaaatcatataattccattcgctcccactcatcatgaatcattcgccttcctactaacaacatcaaaaacagggacgatggggcgaggacagggaggccgcacagataacaaaacaacgcaagtgattccagcggagaatacagtggaaataccacccaaggaacaagaataaaagaagcctttctccagatatttggggcacgaaataaagcaaaagccatctaggtcatgcagaaacggaatctaaaaaacgtggcccggttggtgttttttccctcagcacgccccctctcccctctccctcccttcctgctatagccttattgcgcgctgttgtcttcagaggacgaatgctcgtgggcataccagccgccccaaactcctgctatttccgcgctctatcctgccacttctcgacactactttgggatcgatggaaccttccggaatcgagtctcgtcgtctcgttaaattccatcaacactcatggctcctcggggtatctcatggcatttcctcgtcatagatcatgaacgggaagcgacccaaagccgctgtctccttgctgggccgtatacgatactttgctgtcaaagtacagctcgaagtgtccacacacgatcagctctcacggtcgcgaatcgacacagaacttttttccgtctcgctggccagcttttcagtccagtttggccatcatttccgatttgttcatgggaacgaagttgtcgatgtcgagcccttgggccgcaaggatggacctcatgtgaggtggcacaagcttgtggttgaggtgaggggcgatcgacagctctgcagaaaacgattctgttagcaagtttggttcaaaatcaacacagagtctggtgacacgtaccatggcgggtgaagtcaaagagcggaggaaggtccttgagctggcccgtctggtgcctcgaatcgggaaagcgggtgttgggatccctgaggtcatcaaagaagggctgcaccatcgcgtcgatggccgacagacgctcggtgggtgtgtactccagcaacttgctaatcaggtcgatggcgggttggtcggccttgcggaacaccttgttgaaaggatggggcttgatctgaggaaacttgtgctccatgtagttcgggttcatagttcgaatttgctcgcgggtgggtgtccccagcaccttgataatttcgacgagctgatcgatacccgattcaccggggaagagaggctgaccaagcatcagttctgccatgacgcagcctgttgaccaaacgtctgttcacgtcagttagcaacaatcttccattgttgacaagtccactcaccaatcttggttgtatagttggtagcaccaaagatcaattcaggtgcgcggtagtatctggagcaaatgtaagacacgtttggttcgttttccaccagaatcttggcactgccgaaatcacagagcttcaagatgccggtgctagggtcgaggagaaggttttggggcttgatgtcgcgatggcagatgccttgagagtgaatgtatgcaagagcccggaaaagctggtagatgtacagcttcacctcaaggatgggcatagtagtcttcattttgttgaagaaacgggaggcgcggtacacggtttctggcacgaactcctggaccaagttgaggtaaacctcatccttctattggggatgtaagcaatctgttttccaatgaggtattactaaaggacttacgcgctcgccattagagtagtaaaaggccttgagctgcacgatgttggggtgtctcacgatccgcatgatttgcagctcacggttctacaacatgttagccattaatcatacaacccagccatagcacacaaccaaccttgaatcttttgtcctgcaagacacgcttgatggctgcatcttcgttcgagggagacaacttagtttgaaagacgacaccaaaggaaccgttgccaacaatcttgcactgggtgtaagtcaagtctctcgtctcgcccgtgatgccatcctgcactttctcacggatcacttctcccatccgcagattgttgaacgctgccggacgattcgacgccatggtgaagatctcaaagccacgtcggggttggtgtggaggatcgtactatactcgggtcactggcggggaaaaaggtcgccgacaggtatggttgctttaaaacgcgctagggaggtcttatatcacacgcaaggttaaatgttggtaaagcggttactactgtacggagatggtgatgtctattaaacgcgtaagcacacgtcgcagcatcatggttggcaagtgttgggaacagccaggagtattgggttgtcatggcagttgaggggcagaggagacagggaccggcttacaagatgggttggtcgaaacctcgaggggcatctgacgccagggattggcagttacaagacgaacttgtgtaaactcgcagttttgcagagcaaagtttcgtgaccggtgatgccgactgtttgggagcgtggcttgtgtttcgacggaaggaatctacccgtcgatggaaagaggggaggaaatcgggacccgatgcaacggggggaatcgcgcagacgggcttgggtcgttagggacttgggtcaggtcgaactaggtatcgggttgtttcttgacggctgttagacggagcgctcgagatcaaaaaagaacagccacgcgaagctggcgacaaactgcacgagatgacgaggttgatggttgatgcggaggtggagacagaatactaaggcgttgaaggaagaggacgacaacaggagagggttacgggaaggtaggttgaatttcagaggtcaatggacgtgaggttttggaggggcgggcgcactagctaagtgaaatgacggcggggaacgacagggcactgcggtggcgaccaagcacaagggtagcctagcgtgtcctgctgcagtgcgcccgggccaggtcaagtggctccgagggggacccaagacgacgcaaggactcgaagctttccaaggtgctcttggtcgaagcggcagcagcagtgtcgagtgaagaaagctgcaactttgcaaatgcccgagacaatgggacatccaacactatcaaagaaaagaaaagacaaaacaaaaaaaaagaaaagaataaaagaacaaacagggggagcctgaagcagacagctgcttcagtcgaccacacatcatcgtatgcaactttctctcttgcacgtctagtgaggtcagatggcctacggcttggcgcgctgcaccatggacgcagccaaccagaggaggcctaatgaggggttggggcaagggaaacggcagggttgcaaaggcaggtgagccttttaggacctctcggtgaaagggcccaaggttggaagaggatgaaacgggacaactgtaaaaagtaaaagtgaaggtatttacacttacagtgcgctcggtctgcgaccagagtcttctgcagcgtgcggatgcgagggaccggtggtcggttggaggaattggcagcggaaagtgtggtgctgtgttcggtggtgaggggttcgctccgggccgtcgtcacttgtggctttagctccaaagtcgagggagtcggccggcagggcggttgcgctggtctggtggatgggatttatttgggcgttgtgcggttggccagatactgggagaccttggtgtcttgtaaggcggtgcaagccgcaagcctccagacctaggaagatggatctaaaaacagatctggctgtgtgaaatggaaatacagagtccagactgtgggcacctcagtcgtagaggaaagaaaataaaaggaggtgatccaaatcgatgcaactcggggaaatgacaggataaaggtggtctggtctggcttggtggccgtgtctgctgctctgcttggttggtaataaagtagggtaaggtagcctgacgcaggacacgccgtaagttggacgtaaggtctgtaggaaggtaccgtgtgatgtggaaaaaaaaagggaagggaaaaagggttcgaggtacgggtcaaaaagctttccaggtgcaggatactgcacagtagcctgagaatgggatgtgttgtgacgtgacctctcaggttggcagacagaaaccgcagcgggcaccggaaatagcctcaggcacgccggtgactggaagacgaatgggagtgtgctctcgccggccgagtcccaggaacacaatagcctgcctgacgttgattcggagcggcggatggtggagctcttcgttgtccgcttcctgtttcccaaaatacgatagcggtcccgtctccttcttcgcttctatggtgtttggcttccacttgttgaacgagcatgtatgtgtgtgtgtatgcgcggtaaggtaccgggatgaaagacgccgcgtatttaccggaatttcggttttcctatgcacctcaacgggtccccgggttgcttttatccaggagagcagcccctctggtgtcgctggcgtggttccaatggcacgggatgggccaagggaggaggagatgaggccgggagacgccgatcaaatcagaaaaagcgtaaactggaacagaatcaacagacacaatgtgatgcggccgcttctggccttttgttcaccagatcccgccagactggggccgttgctcatgtgcccatttttgagacggaaagccggcgctaaacacactcggcaggcgaagtttaaaatagagaagttaataaggtatgagctcaatcaccgaatcaacacaaatcgtcattttgtttctagtggctgactacttttcaaaaagatagccctgcctgtctgaaaggtgtatgagtgccagattggacacaggcagagacagacagggtgggttcttctagatgccccctctcccaatgtccagatcagattcgaggtggggcttcgcagtgctttgttctctgacaaccacagttcgtcacgaacccgccgccacggttgagggccgagtggattgtgtctgttgaaggagtccccgagatgtgagacagacagcgggagagaggcaatacctggtgttctgtcgtctcacaatcaacccggggtcttggggtgtgcagtaccagttgagccagctcgcccgtttgggcactgttacacctacgctaatattcctgagtcggtgtctctggtcgtcatagtaaacagagggagccgttggagagtcatggtgccagtgagtgagcggtctctctgggttaatttactgcgtaattcaaattgcagaagcactcccggtattaagagcatcgcctaagaggactgacggcttctcgcataaatccgatgcgtgtaaagcgaactcctcattattgcctccgccgccagacgaggggatcaacgtgtcgctcagtcactgctggttatcacgacttctttatgcgagcaagcttgtcaggcagatcgaggacggtccaggtcgatgacacgccttcttgggcccatttagctgcagctgtcatagaatagcttcctgaggatagacaggcgacccgagtaacacggcacccgagttgaaacgccgatatgacgggtggaagacttgccaattgggactggtgcatatggcttgtgcggggcaaacatgatgaagctcaccaccacaagcaacagggcagtgtggatggaggggcacataatagctatgtacaccgctgtagacagtgagtccgaaataggattatagaagcagcaatttagagccctcagggcaacaaactggccagaaacgaaaagtcgaagcctacgccaactgacgttgagctgttgtcgagatatatctggcctttgctttcctcccctggtggtgcaaaagtagaggcagagaggggttgacgaagcttgtcgtttcgtgcccatacagatcccaaacaggtaatacacaatgatacaacacgcactgccagatcaagtgttccgtgctccgaaagcgcagtgatacagcactaataagatatttcagcgtcgaatataccgagatctaggcaccgcagtgcgtttctcaaacagtcaatattgcttgtcggcgtcgagcttccactcttgaaacccttgttcggtttggcagcaggctccgattgggcggtatcgtgagccgatattcacatgcatccatgctctagagaggtccaatcgtttggtgtctagtcttgcatggttatgatgatgcctgacgccgattccatcgttgcggttgtgtccagccgtgttgcggtctctgtccgttgctggctttccggcgctcttccaatgcgacctgcgcaggagggaggtggatcagcaaagcgccttttgggtgcaaacgaggtcccatgaccggttgaatcgcgctaatcatttggctcgaccaggtagatcgtggctggccgtctgttggcagacaccaacttttttttgatcatctgcagagcagaaaaaagatagggggggcaactgggacggatgggatagtacggagtagcactgggacttgttgaccctgtggctagctccgggtcaaagtgacaaccgccgtccactgacatcccatggcatcaagacgcaattgccaatccaggggttccaggtttgttagtcgcctgccagattcgatttggatatcggccaggtaccgtatgtgtatgtacgcagacgtgccagggccataaacccccgagacctcttgtgagattctcggtgcggtcgtgaaaccggcgggcagttcgatcgtgtagtttttcgtgatgtcaggcaccatttgtggcgcgattgctcgttacacgcccttgggcacagcaaagcatggcaaaaagctagtcaggtcgtccggagaatgactcccccctctctgacatttcgatgagatgctagaggcctagagcagctatacatgatcacctgacggaggacagcgcgccttttgtaactctgctgttccgtacccgtaccctggccagctggcgttcctcggaaatcacccaagcttcagcggctgactcccggcgtgatgggttcgtgagatagcgcccgtctgtgccagcgctgggcgtgggaagtgaggcccaaacggcgggccagattcatccgccagaggaaaggtgacttgccaattatagcaagcagatgccaccgttcagcaacgcttcggtattcgccgtgctgagggggttcgtgagcatcttttggcacttgcggcactctgaagacggagctgtcaaatcgattgcatggaagcgaggaaaattacccgtcgacgatgttgttgctgtctgagccatgtgatttcaagctgctgtggtttaattactgtcgactgacggctgctgcatgttggccttgatgaggcagcacgacgagctagcgacggttggtggtggtcggtgagccgatctccaagctagccagaccgagatcgcatcatcctggtaaggcagggacgcactgaccagctctggtctgagccaaccttggtgctgatcatgatatggtctgtgcttgccctcagtcactgtgtatgccaagctatggaatatcgatacaggaaccagagccagctgtctgccagatgttgaagttgctcttcccaaaaggtgatgaaggtgggagctcggagggtctgcatgatgcagcaatcctctggtctgtatttgttgggccatcgctgaactgattgtaccgttaccatgatcccaattcccaacaaggccacgggcgcccggcttgtttgaaaccgagctcttagaagttgcttcggcatggtggtttatgatttgatctttcagaccaggagcttgggctaacttgctggagccatcagatgcccgagtggagaatgatgagattccatcttccgggccgatagaaccaacagcattcattggggacagcacaagaaaagctcaaaagagattccagatcgcggggtagcttcccatggcttgttctctgctgtgccataactcaatgcttcccaggggcgcatgggaatatttccgagctcatccacgattcaacaaccgaagggatcacatcactgggaaaccggtgcggtatttcctacctccccggtctcgaacgactcttatctcttccaagactccctcattgtcttgttgattcgccgccggcagcctgtccaaaccggtaaactgcttctgagacccgcatacatcttgggtggtccgcttctgtcgacgtgcagccgacatcctgccacaccttgactcagctgcttgatgctcctcgatgaactgtcaaatattccctgaaaaacaaagtcatatcacgcaccagcatctgcatgaaaggcgatcaaattggcgttgcaggttcgagttcagcctcttggccgcctcatcacttggaatgtgataaaagaagaaacccaagaaagaatctgggcccttctgagccctgccctgtggttgagactggtcttttgagagcatgtttctgctattgtgcaacctcagtcaccgtgcatgtcgctgagctgcgggatgacggcgttgtaggtcccagacgtcccggcagtccatagagctcagctgcaagacaagccccggtatgcagacgtttctttctaggggagctctcgcggactcgggcatggacatgagtgatgttgcatgcagcgaaacaggcccttgattgatccgtctcaaggcatctgcagcgtcaagcagccagtggccatcacccgttgacgacgtccatgggagcatttgtcatgatgttgtctcggggttctcgttttgaaggtctaaatatactcggcacttgatgcccgagaagggccgagtgatgtggcttgtttctcctggtttcccgtgtctttgccatgtctctgacgggaccctaggttgtaactgctcctctttctcacaacgtactgcacgccttgaaatctgatatcaggacataaccttaaccaccacatttgccatggccatcaagctctcagtaatttagaaggccatgcttgatcttttggggaaacaagcatatctagacatcgttttcagcacatatcatcatcctcatacgtagatagctaccatctaacaatgttattgacaccagcttggaggatataaaatgtggcaaaagagatcaacgtcttcaatcagcagctcttttccaagtaaatgaaccccccctatctcctaaccccatgatatcgagcaagcaacggagataatagatcaccatcccattacggatatacagcaacccgtaaaataagtagccccttccttcagatgttgccacagccgatacaacgcccacagccaaataatcactcagcaaagcttcatctctcatgagtgcaacatagctacttcaatgtcagacccactatcggccactcgaagaccactcaccaaagctcaacacctaaatcagagaggtagcgcgatgtcgagaaacaaggtggttgaaaaaacgtcgaataatggtagaaatgtcgtagaaaagtcgaagaaggtaacaaagaagttgaagaaagtcaaaaacaagtaacaataatctaccaggagtcttcaaattgaacccccccacccccccccccaataaaaaaaaggggggctcaacatgaccaaaaccacagatcccttcttgacccgtcatcattcccatcagacttaaccaactgtctcgtccatagaatgcagtgggaagtgtacctacttaattaagtattatgagacgtggagtatcggcgctgacagaacagcacttgcctggatgtcaatgacggttgttgatttatcccactttaacgatctttcaaacagcgttcgacctcccaaccgctcaaaagctcatatcgaaatcagagacctcaaaagccaatagcataaatccccaagcaacctataggtatgactaccacccgtgcctcgaaccaaaaacagatagatcataatccacattatacctaaacccgttgcgcctctgccatctcccccaaaatccagccatacccttccttaaacctcttcgctccgcttcccaccatctgcaactcagcgtcccccccgcattcttccccacccctcctctcccattcaaagcgccaaattataagcatactcatcctccatattctgactcacccacaaaacaaccgtgctaacccccaccagcgcattggcaaccacattctcaacccccatccccaacgccggcatccccacccccggcacgacaaacttgagcacaaaaaccgtaaccccgcccgccatcccgcccgccagcgccgcgaaacccagaaacagcaccaccctcgccttccacgccacccccgacccggaataagagaaactatccgacgccagccgggatttctcgaccgagttgatgatcagcatccccagggaggaaaagacgaacggcagccagtcgacaaagttgacgtgtaggggggaggcgttgcggggcgaggccgaccagacggccgagtcgaggaggatgtagaatgctagggagaactttgacacacagacattcgagtaagagaagtgttgggtaagaggaggagtgagaggaaggaggggggaaacgtacgagaccgccggccaggtacacgccagcgttacgggcttggacgctggagagccatgctggcttgctaaagcggaagaggcgctcttcggaggacatgatgatggtattttatgtgatgtgtttccccttgctcggagttgaatagttcggggctgttagaggtagagctcgtaaatgttgcaaccgtagctcagtgacgactggccccggtttcggtatcgcaatcgagttgatcagcggtatcgctatctgtcacaagattggaatacttctcgtattctcagccgcaatcaatcgcgatatcaaaacctgtcgtcgttgtcgccgcgaatcgcagtgttgtgggtgtggaagcttatgaacgtagacggcaggcgtgcaacgcaagcaggcacgcatgacgtttggagttggtcccaagcggaaggctgggggaacctgacatgacccaccaaccaaccagaccaatcccttcttggcaaaggctgaaactagcacgtgattacccctaccctcaccaacacttttcacaactacttcgcagcccacaaaacagttgatggatactcttcacaattatcactaaccgtcaaatatctgcttcctctgcaaaccagaaacccagtgaataccatgcatgccacgctctctgctgccatcgctccaactacaacacctccacctccctcacacatctcttctacaaccccctattatacacttccatcaacccttcatgtccattccatccatgcatcttctgtcttcagaaatggcctagacaaagcaatgcctacatccatccatccccaacccgcaagaaaaacaggctcgccatgtgtatatggtacaaaaagtaaaatatggccttcccttggaaaaaagaaagcagcgattggttgatcgcgataaaccgaagagaactttaaacgccccaatgagagagaaaacccccagacaagacaacaagcttttccaccaattgtgaggtcatgggtgatgacagaaaaaaagaagccaccagaacgccgttaattgctttcgttgtgtccccatttgttaaaaaaaaagaattatcggctccttaagccagcaggagcgcagtgtgttcccttgggaaactagtcatcacgcccctgcagctctagatctcaatggtcttcagtgtcgtctcttccacctcaacaacggtggcctgcttgctgcttcgtttgctgccaggcgctgatgacgtgccatttgtctgagaaggctcagtgatggtgacctcgggaggagggctgacctcgccatttgcagcaagggcagctaacctcggggcactttctttgttctcctctccgctgtgtcttggggtgtcgacctcaaccaacttctccggcaccttgatactgttcgtcgccgatgtcaagggaacctcctcggccactctcgccaatgggctcgcctttccaacacctggccgaattgggctgggcatgggagaaatctggctcaacctctggagcgaccgaccacgaggctcagcgttggaatcagccgcgttggcatagggcgaagtgggcgcactggttgcaccccttggaggagccatcgacctgcgcttgttggcggtacgaccatacttctggtcacacctccacctcaaaatgtcgaaataaccgggctcaacgcgggcactcttaaactcgcgcagcttaagctcgcccgaatcatcatcgatgaaccatctgccgctgccaagatcgtccgcaacagtagccactaaatgagcccacgacttcgcgactacgtacttggtgtcgtagtcgcgaccaaacagaataacctggccccaggtacccttgggtccaggcgccaagtcaacagccaagttgtttccaccccaatcgcgaacaagaggaatccacgcggggtgcgcatacaccttctggatggcaccggcggggacactgtcctgacgagcgagcagttcttgtctccagttgccattctggggcgaaacgggggccgagctggacgaggccgccgaagtcgaagcgtggctgcttcctcccagaatcttggaaggcacagcgggcctggggaatgtcgcctcgagcaggaattcttggttgacctttacccagttctcccactcctgaacaatctcttcgcagtccaaaagcatggacccaaaaatgatgcccgtggggttgccgcctctttcttggccatcgtggatcatcagggactcgcggacgtcctgaggaagggagcagtcgagctggtgctcgagatcgttcaaatcgttgttagtggcgccttcgcagagctgatcccaaagttccatgtagtgctcctcggcccaggcgtcgatccgattccacgagttgtggatcggtggcgcgggcggctggccatcctggaaagactgcatcggaatcgacccggtggggctctgcatgtcgaaagcatcgggtgggacggatgcccgcgtgttgatggacctcatgccgggcgaatatggcctcccactggggctcatcggaagaccgggagtgttgggggcataggcggcatcaaagtgcgccgaagggcgggtggattcgtcgtggtaaggggaggaaatgtcgttgcgagaatcggaggcggttgctatcgaagtgaggccattacggccatggagaggaacatggcgccctgtcctttgcggagagtcaaatgaggaatctgcataatcagttagtatgagtcggtgaagggattgactgggaattgcgctgacgtcggtcatagctggtgatatcgtgccacatagagcggaagaaactgccgaatctgtagtcagggcattagcattcgccagttgtcactattcagagtgtgcacacatacgaagccatctgggcaatagcgagaaaggggaaattcgtaaaggggttttgtcggtgtggtgtgttaaagcagggacaagaccggaatgcgagcgagggaggacagcgcgatgcgactgctggcggttgagaacgaaatccgcgtctaaaacgattggatgcgcgtcgacgtagagttgtcgcagcaggaagcgtcctcagcgacaatgtcgtcgacacttttgtatgttcccccttttagtcaagcgatcgtgttggtgtttggttccgggtcgcggcggcgtagcgcttgtgttgcttgtgctgtgttcagtgttcagtgttcactgttctttctgtgctgcgagtgtcggtcaaaaaccgagtgtctcctattttggtcgggcagactaaaacgtgccccggcgcagacggtacgtactggctactggctgtcacgtcatgcccagttaaggggaacccgtcaaccgaaaatcaacaacgaaggcgctcgagctaaaatggacctgcaaacgagtggtgcgtgtccgagagagagagagacgttgcccgatgatgtaggtgtcggactgcgtgcggtaggaagagaaggagcgggcaagcagcaagaaaacaagaagtggtttgcaatttcactctcggtgcaacgatcaatgatgttccaagctttgctccgtgcatggaaggagaggaaagttgaccaatgtaagcgcttcaaaacggtgagggtggaaggatgcctttcccgcagcccattaaatggaaaggggccatttgccccaccactgcctcctgccttacccaccctcggggttcaccgtgtaagggccgtgctgtttgattggctcatttcgctccagacaccacgccgggcgtgcaatgcaagatcagggacaggccatggcatcgtggcatgaaagatttcgccagagcgagcactcacctgccgaacggaatgtcacccttttttttattttatttttttgaacgctgctaatttcaagctttttgcgaccgtgtttgggggaacttctcacgcttctttcaggagtcaacggttcggttctgttttaccagtccgtttcatttcgatatgccagtgggttctcccaaggaactagccgacgttctggccccttataaacaactccttgctaccccgtagcacactccgttaaacatacataactcaccctccaaatatatccaagcaaaaggactctttgtgtgccgtgtaccggtatctctgcatctgcaactctcgatctccctctcatgcagcacagaacagagcgggtggcttacaccaggacctcccactggatgcgccaacactccttatcagacgacaacaacaacacccacctgctgtttcagcctctgtgtcttgccgttacgaatccacgttggctagctatcccgactaaaatcttctcgtgatattcatagtccaacctgcataagcacactgcaactagacactagcaaccgcaaaagaccccgccgtattcagctgaacagcgatctgatctctttcgcctcatctcaccagccgaccagcacgcacttacactaagactgacactgacaacaccacagcatctgcagcacaacaaacacacaggcacagaatccatcatcggatggaccacatggccagcaacaccggccgggccccaaagcaagcaaccatatcaatcaaccacgttcactgcccgccgctgacaaccactaatctcgaccctaccccgcatcttcctcactgctgatcccccttcttccacaagcgtgacaagcaaaaaaacaagcttcacaacctgtcgatagttacctgattaactggccgtgtgtgtgactacaggaataccctgtggcaataagctcttccatgtcccgaataaattgcaccgcccacaggctgtcgtactttttatacaaggtgcatgtgaggtgtaagtgatgcccaatggcgatcttcctttcattcggaaacaaccaagacatccagataggaaaccccaaatcaccgggtaccaaacttttttggtacagaggtagcattatgatgctatcacttttaatgtcacgcccctcagactatcttgctacgagtgcacatttttacggacgttcggaccttgttgtccggccggccagcgttgaacaccaaccccatattttgtcatccatcaccagatccaaaaagatctacagcccaggtcccgaggcagaccacataaatagaaaagttcgccttccacacagcccgatgctcagatcgccacatctaactgttgagggccagtggtattcactcagactgccagaacgcacatgattcaatgcgccatcaggtaccgtagcaacctgttgtcgaccccatcaccaagtaaacaagacatagcacttacagctgttgagccttccttatgctgtctatggtgcaccatcagccaactcaacaaagtccacttcagcccggctcaaccatcaaacatagctccaaataatcacatttcaaacacatcttcatttcatgcctagtacaatgatgttgatacgctacataaacaaatacgtttcaacccacaccttaatggtcccccccccctaccttctggtctatcgtccgcggcgctgccatcaaactgtttctttttttcgttcaagtttccatcactgcctacccatcttgaagctgattacttgacgcaagtcttgtcctccagttcacaaactcatccgttaaaattcttccatgacccgtctcttcgaccttgaacaactcgacaacctttgacttcgcatcgaatcgaatcctccacactcctgactgttgagggtcggccttgattacttgttggatccctattgacatcaccagtcagttgaaatgtcaccaaaaacaaaaaaacaagagagagccttaaaagataactaacggcctttagagataattcaaaggcttattaattttctttcaaggccttttactatattatgggaagggtaagtagataggtagggaggggggcagtaagaaaataagggcgctctgtgaaggttctttcaacaacaaagatggacaacttacaatccaatatctccgacgcaaaattgacgcacacccacggcatccacggccactgcccgccatccctctccctcctcaccctctcatcaatctccttcgtctcatactcttcgcacgaaaccaacatccccttcttatccctccaaccaacaacaatcttcggcacccccagcaaaaacgactgtgcccaaaacttcatcagcttcttgttgaattggaacttatccctcgggctctggatgactttggacgtcttcagctcaacccagttgatcttagcccccggctcctttggcttcatatcccatatagcatccacctcccccccaaaacagagaaccttcccccctatctctgacctcacaacagagcaatactgttccttgttgctcaccacctcgtcgcccctattctcaatcacctccctggacgtctccgcccacggccgcggtatcgtagccagcgtctcaaacttgtaaccccaaaacgtcatttcttcctgtgatattggacctttccaccctgaattctgcttggctttcttttcggcagcaaaaacccagttctcttcgatgaagatgcagtcttggaagagcgtggcgttcatttcgaagccgtcgtcgtcgtcatacggatagggagcgatcaggaatttggtcatcatgcctcgccacgtgacgaacttggcgtcgatgggctggttggtttgctgctcgtagtgggcgatggctgtgaggaggctgtcgaggtgctcgtcttggctgtcgtgcttgtcgaaattgtcgaagccggcggagaggttggcggggagggcggggggttgaggtgggtagtaccatttgatagaggagtcgtcgaggcggaggttgtggttcttgtcgtaggagaagcaggtgaattcctggtcgagaagttagtatgtttatagtgtgaaggggtgagtggtcgtcggtcttactctgggtctcttaacgggtgcttgtgtggtggctgctgtgaggcggatgacatcgatggggaatcgagctacattgctgttttgtgccattttggggagaggtgtttgatgagtggctggtcaaactagggatatgtcgtgctactgatgtcatctacaacccagcaccttaaaatgatagtgttaaaaattgttaacttgagagaaagcctctcaagatgcaaacgggtttgagggcgggatgaatgagtgtaaatccgagatagcttggctgctggccccagcccaaggaaacagcaatccactgtaccttgcaggcatatcagggaatagcttacagcttgaaggttggtatacagcaagccaaatcacgaaataattgtaccgaatgactgttcaagaatagagattctatggattcaaactcatgacattattacagggcatctattaaacaaagcgatctaatggcagataccaagtaccttgttgaacaggtacccctcgcgagtggatccccgcctgcattcccgcagctgggggaggtgcattgcttgacaggggccagacggcagcagagaataccaacgaccatcaacaagagctccgacgacttcacacatcaccatactcaggaactcggaggcgccggcctcaccacgcagctcgacttgaccccatcaccagagaatgatccgataatgaagaacgctcgaactcggtagccagcagcctaggatcctcgaattacacaatggccaaccgttatggccagtcgtaccgcaacggcggcaactatggaggtggtgggggaggaggcgcgtaggtgccggnnnnnnnnnnnnnnnnnnnnnnnnnnnnnnnnnnnnnnnnnnnnnnnnnnnnnnnnnnnnnnnnnnnnnnnnnnnnnnnnnnnnnnnnnnnnnnnnnnnnnnnnnnnnnnnnnnnnnnnnnnnnnnnnnnnnnnnnnnnnnnnnnnnnnngcaatgtcagtcgccaggacgaagagtacgaccatacggggagggatatggcagcgaccggttcgcgccgccaccaccacgtcaggcggtgaaccaaagcgcagctctaaactcaaattcagactcggtccagtctcgctcccgtacaaccacctccgccctcactccgcaatgggccaccaccacgatctgcccagcgtaacgaacgcgccatgcagcgatccgccccagagaccaacgccgagcgcgagatggggagggtgctcgagctgatcaagcaggaatggccagccatgctggagaacgactgcatccccgtacagtggcgctacagctgctcgacaccagctcggtcggccgcgcccacgaatatcgcaattttcgccaaacgcaccagtatctgcaagactcgctcaagaagattgtccacgagtaccaccagggcttcaacagctccatcggaaccttccacaagattcagggcagcatccaggcctcgcagaaaaaggtgcgctccttgaaggagtctctagccacatcaaaaacggctctatgtgcgacagacccggaactgaaaaagctacacgcgacatctcgcatgtatgacgatgtgctacagacattaaacgagctagatgatttgcggacggtgccggatcagttggaagccagaatatccgagaagcgcttcctcacggccgtcgaagtgttgcaaaatgcgttgcgcaaactaacgaaaccagaattggacgggattggggcgctgagtgacttgcgcagctatcttgccaaccaggagacggcactgatggaaatcttggtcgaggaactgcacgaacatctctacttgaaatccccctactgccaggagcggtggcagaatctcaccaaacaccatggagctatgaacgaggcattccaggatacttccaaccttgccccatttcatatcattttcgagtccatcgattgggaccggtctgtgactgaggatccccaaaagaatcccgaggccgatactttctactatattacgctcttggttgaatctttgaacagattgggcaggttagaaactgccgtcgatatgctgaagcaacgactgcctgttgagctctttgctgttgtcaacgagacgatcaacgatatcgaccagaagcatcctagctcattacgtggtggatcgaacggctctaacgggttacatatatatggccagcgggagacccagatgagggcagatgtcatctatgacctgctctggactctctatggcaaattcgaggcgatcgccgaaggccaccgtgtgttccacgagtcgatcaagtccctcatccgacgtgagggagccggcaacaatattgctcttctgggaagtttcaaggaactgtggaatctctaccagaacgaaatccgctcgctgttacacaactatgtcactaccgacgctgatgtgtaccagttccgctcgtcaccgagaccaggcggtggtttgaatggccatatggacgccagggaacacctcttcaagttctcggaagcggacgccaagtcggcggagatgacggccgagtatgaagcactggataatattattcagaatgctgtccctggtttgacttccaattctggaaaaaacagcaagaagtccacattggttgtgccacggtcggatgctgcggcgacaaggaagagcttgggggctgggtatggcagagagcagagcagtgggacatacaagtcgcttgttgagccgagtgtcttcaacatgagcctactgttgccaccgacgcttgtcttcttgcagcgtctgaaaagcatcgtgccccctggatctgacctggcgacgagcacgttgacgtcttttctggacaacttccttgtcaacgtattccagcctcaacttgatgagactcttggcaagctcagtgataccgtctttggggaggcggatgctttcttgcaagactcggaatgggcccatctcgccaagagacctattttcaaagggacaaccgccttctttacggtcatcacagccttctgccgcatgctggggacgatcccacatgatcaggctctcagttcactgatcatcactcagatgttgagatactacgaccgctgcttcaactggtacaaagctctcgtcaccaaaacccaagaagaagcatccacttccgaagagctccgtgcctcggcagtcatggcactggaacctagtgagatccacgacacggtgatgagcctctggaaggcagagacgtcgggagcaacagaagagttcgaggagcttctccgaaaagaagcgggcttgttgattgctaaagcgaacgaacaaaagctggaggcaagcgatatcatccaggacagggatacgatctcgtcgctgtgcctgctgtacacgagcatgaagtggctcacggttaaggttatgggcctgcggcacatcacgaagaacgagaacgacacgtcgaccaagccgtcggcggcgacgctgccgaagccggagaagaagaggtggacgttgctgaatgaccctaataaggccacggcggaggaggggccggtgtacctgcctatgacgcaggagacggtgcagtatgttttttgtccctcctcttcgtccctcctctttgtttggctcagtatactaacattttgatctagatccttcgacagcatcctaacttcctacgaggaactcgcctccatagccctccgcacccttcacatggaggtccgctgtcggatcgtccactccctctccctcgccctttcccctaccatcacagcaccctacaccctcgaccaaatcgtcacggaacccgaccaagaaatcttgtccctcaacgcggagatggtcgcctacgatgaaaccaccacccggtatctccgcgaacgagaagtcctcttcatccgccgtggactgggtctgttgataaacgcctatctcatcaagatcgcgcccgtggtgtcccacccgatgaacctcaacggctgcgggaggatgaaactgaacgtgagggtgttgcagcagaacctgaagaaaattttggaaggtttggaattggggagggagatggggtattttgagttgtttgagaaggggcttgatgagaaagttgagcggacgaaaaaggatgctgagcaaatacaggggggggggttttttgtggtacggggggccgaaggggccccgcccctagctatgatgagctgaaggcgctgctggagctgtgctatagtgagcagctggctgatcgggagaggggggtggcggcgcaggcgaagaggcagttgggggagaggttgttggggttgagtgagtatatgtggcagcaatagtttttaaaggggggtgtttaaatttttttggggggggttatggtatgataggaatgagaaatggttgaaatgtgagcggtggtgtgtttacttggtgatgggtttgagaagaggtgctgtggcattctggtctgtgcagttgagtattttactccaggaagagaaccgttatcggagtatgattcgctggtgtagagcacgaaatatgttgctaagtgcctccttcagacttacaagtttttcaagtaaggttatgaggacttgacaggaatcctacagcgaggactagtgtgtggctctgtctcagccttcacatcaacctgacagagaatcaacttgtaatgttggcgggctacttacgcaaaaccctgtgtcttcgataagacatgaggagctgtgtcttaacagctcttgtctgacctacgaagtgccatcttgtacatgtgacttgcctatacagtagttatcacatgtagctattcggaaacgaacaccctcgtttggtgtgagggtgactcttacacctgtaccatgcctcctcctaatgctaggagtgttctgtgtacaaatattagagagactttagcccagagagatgccaatcttccactgtcgacgggaacacaggcatatacttatcgccttctctaatatctcacttcctcattgacttcattgattcctataactgcaaaatcattgtcaaacaggggcagaaagatacatactaaccagtcacactgcggaagcaggatccagtacgatctagcaggtgccattctgactcaccactttctagatcatctggcgtcaatccatgaagttggaaccttgagatagaagctctgtgtctcttgcctcatgttagttcgaggaagttgtcattaacaccaacaacacctgataggaatctgtggacaaccacacgtgggtagatcttttgctttctgttttagtcttggtagagactctggcaatttgttgatacatgtgcccatcattcacaccagaagagcagcggtgacatatgatggatatcagcgcactcgacattggaaccgaatcttttcgtctctatgcccgtcgtaattcaatcctgtggtgtgggaggtgttgctcccggtggatttcagtcaggttgctcctagggcttctgccctgtggcccacaggtcaggtttgttgatagggataggtttttgctctccggagctgattttcgtagtgctgaacaatatcatcacttttctcacagttctgctggcgcctcacatgtggccggcacctgacatgtaccagccaccataggatacctaaggtatccaaagcaacaccagacccaacaacactatacctccaaaccctcaaaaacaacacctcaccttcgccaccatcaccatatcccctcccgcccctgactaagtctctttctccctcggcaccaaagtaaacaaaaacaaaccacttcccttcccttccccccggcggccgccccttttcgcctcccccctttcccaacccatcaacaataccaccctcgccacccgcccacccaacatccgccgaccctcattcctcccgtcatcacgtaacatttagaagcccgcgaagccttccattccagctgaaagaaagtttcatgttaatcatcacatcacccacccccaatccacctacctccacagaagaaaattcgaaccttccacccaaacttcccctttcagcaaacaagtccgacctcgccgcaaatgttcgtttttcatcctcattccaaaagctcaggataaattacccaccacacttttattacgtacgtacctagtaacacgagccaaccaccctagatggctagctgggaacaatttacctaacaccctaccccagctaaagacctgtagatcgacttgcctagtctcccctctatcgacctggagagaaaaacgctagaccgttctcgccgtcgtcaaaaaatattaataaaaaaactagctgagcactgctaaggaagggtctaagatttgtatgacctcgtaacagcctctggacggcctttgctctcgtgcctagattttgctagccgggggttcactttagagctaattgctacctaggcacagacaggcatgccacagaccaaactccacgaggccaagcacaaatgaaaacaaaaggatcgagaccctctctttcttcagaacaagatccctttagctagcccgcctagcgtgaatcagatcgtcgtttgacttatggggcaagtgcgtgtagatcagggtccaatggaagtccaggcgtgccgggtgaagatctgaatagcttccttatttttttctttttttttctttctttttttgcggagagcagtcctaaattggtagtcaagggttaattatgagggctgtaagtttagtgcagttagtgcccctccgtatctagttccaaacttttactctggacaaaaagagaacggtgtgagtgtgaagcagcctttgggcctcgagaactggccttcctactgcatacccaaggggataggtaggtagtaggtatgtgagtttgttcacaccgctttctgtgaacaaccacaaaattctatctccgatacctagcttattagtcacttgccataggtagtaggtacagtacgcaacaagcatatgtaggaactttcaacaagccttgcccctttctatctgcatttgtatggtgcgtgtgtatgtgtgtgtgtgtgtacgtatgtctcaacagccttttcttccccaccctctctgcctgccggagctccatacatagaaagattcacggacatctctgccgacaactagagacagcaccaaagcagctgaggctattgtagactagagagctgaaactttcaagacagcgactctcgcctcggcagtccatccggtagcttcgtaacagctgtcaggttaggtattgtctgtgtggtggtggtggtggtcgttgaccctacgtgatgcatacagacaagaatagagcctcatcccttacattcacgagacgagacaacaccacgatccctaatcaacaacaaaaaggagtttgccacgactgccacgccgacactagctacggtgagagtctataaaatcttacggctttagaccatgttcgaacacatcgacggcgccgttttggaagatcgacgatcattttcaccgttgattgggataggttagcactacaacaatcttgcatcatgtgcatcagctaaaccccggaagggaagggggaggggtgtcggcaacaaacaacatcaaagaagcaaagtcctatccgttgctgtttttggatcccatcgcgaattcgatcttttgctagcttcaaagatgtcggtgattgtgtggagggtgggaaagttgagataaaaagccaagacccaaactgacacccgggaagcccttccccggcgccgtagctccgtcgatcatccggagaaattactccactccatccagtgacagaccgagcttaatactttgatatcaaaaagctactcgacactagtagagagactcgaacaaccggacttcgcaagctagaccactatcagtcgtagcggcgaccggttgtcggcacagcgcgttcaacaagacccttctctttgtttgattcaaaacagaagccggaagaaaagcaaagggctaaaactcgagcagttgaaaagaaaccacaaaaactggggccgctattcgggttcgataggccaagacatcaagtagcgtaagaaaagagaagaagaaagaaatgaggaggcgaaacaagacattgggggaagggagatcaaccccccccccccctccctcaatcgccgtgtgtgtgtacagatccctcggagaacccttcagcctttccggagatgtctcaagcacggacagcttggaaagatccgcttttggtgaaataagaggctaaaaaaggacaaaaaagtaaacaacagttcaaggttccggggtagagcaaagacgtcaacgtcgtccaacgtcggcggttcaggggctgaagccattgcgaaacagatctcagaaaccagcccaaggaaagaaaaagaagcaaaacagagaagtcaaccgaagtctcttgacggttctgaatacggccccgccccctccttctctcttaaccccccaccgtggcgatcaccaaagcacgtttctgcttagcttgtcgcgctgaaaagggttctggatttcttgacatctcaacgggcatatccaagcatcttggcaatcatccttcatcgtcgttaggctgggaagctgagaatactccaagacagattacgggacgatctctgttcctcctctgcttgatgaataatgtttcgaagcgatctcctccaagctatggccggccggtccggtcggtggccagccagcccggcttttgctgatggcgggaaaacaataagagaaccctctcaaccaatccagagtcgaatcagggatcaaagatgaaaggaccctctgcggatagatagatcggggccgaggcggcggacctggtgagaaggccctctacattgagaacatcgattggacgagatgctgctgtcaccatgacagaaattccccgtggatcgtatctagcggctcccgcgcggttgggaaaacctcgtgtagtatttggcggatggtgtgtgggcgtatgtaggtatgtgtgtgccatcattcgagtaataattgatgcgttgctcggcgctcggggacctgggtatttccagatgtgggaggcaaaaaaataataattttttgttgtctgctcctgctttccttccccaacgaattgggcctgtcgggagtcgtgacacgacgcagcgagaacgtgctctctccgtgatgccagggctcctcctgcctgtggtaggtacctctacgccttgcatgcaggtaccgaacgtccgcagccagttgatgtgctggatctcaggacgaaacacttgggtagcagcgagccggggcacgactagattgtgcgtgctgtggtgctgctcgttttacttgtcaatgccgccgcgacaccgctttttatcaaggtgccccttcggtatagcttctggtgggcgggtcgagatgttgatgttttgggacctggttggcgttgtgtttcccgtgtctcagctgtcgtgtgtgggtggcgcctgtctctctctccttatttaactggcggttcccacatcgttgacgtgataataatgatgggtgatgattgaggactaggaattcgtcgttgtaagtggcccaatatgatgtggccatgtccagtaacaatgccaggtacggttccgaggtgctcggggctcctaaaggcccgcgtattttcgatcttggcttgcggtatgtgagatgggctttcagattcccgagacggccgtgcgagcataggaattcgttccgacatcgtcgtctcgctgcgtctcctgggctggtgcagatggcctcttgtgactgccacctacgataccggaacgtcatgtcggtgccgttgtatcgaaacgggggttctctatctcgcccagactggttcgacatcataaaaagggaaaaaagagacgaaaagacgcaatccgcgctaggcgctcaggggccagccgcaccttgatgggcatccccatcttgtgttgctgcacatacatgccccgccccccaccaaaggagcaggtttgggggtaaaagagaacattcgacccaatcctggctgcgcaagaaatggaagccatgcataacgtacttggggggttcttgtattgagggagtcctggtgtttgccctcgtgactgaccgctcatactggatggacctatcgagagaggtgactgcgtcgaggtttgccgccgtcctgtatgtatgatcgtatgcatctgtgcgattgcaacaaaagatctgcctcttgttgtcgttcccgtgcctggcacttgagcctaatctgacagtcaagattttttttctctctgatcaaagagaaaaaggctttgatgtttgggcctagctagcaaggcctggtatgcaaccgcaacagaaaatggcaaggcgtgagctcaggggtgtcgtctgggcatctctttgctcgccaaatcagcgctgcgcagttgctcccaagagcacgggagacacactggcatgtatctgtcaaaattgatatctgatatctcgtcctgatactcgcatctttttgctcctttcgtttcccaccgtgatcttttggtgccgacctgcaaatcaggggcgctcgatgacagccatctcgactggacgcagccatcagccgttggcgacgagatctgagaggcagtgagatcctgcttgtgacgttgcctgccgacgcgtcttgtgatgagtggtgtagctcccgcaacgggggcatctcgaaatcaagcactgtgtggcgtttctgacccgcggagacgggtacgggggaagggccaggtcccctcttgagtggaagggccatttacagctagcggatgtaaccgatatctctacccggccaatggcagcgcgggagcacggagactggaacgtgctgtcgggactgcctcagcttcaccaggcgaggggatcccagacaagaggggggaactgaagcaattgcttgcgaagcttgacagacgccatttcatggtcaactttggcgccactggtagtgtgaaagcaccttgatagacggcgtcctccaggtcccctctagtagacccctcagcgttcatgtcggacattgtaactgcttcgcaggtcaatagcacggagcgggcgcctatttactggttttttctcccgagccggtgtacgtttgggccagcactcgggcgaaatgttttcgtatggcttcggactcgggacaagagatggctgtctcggcgacctcccgattggaataccatctcggcgcggcgaagacgcagcgggtatacactgtgtgctacaccacctcactgtcttcactgttcatcgggtgtcgtgtaatgctcttgtgaacggttcccagaacagaaagaggttgcaacccccacgctgcagctgttagtcatcagtaaaaggtcgatgacgagcaatctgggaggtatctctgcccctcatcccttttcctgggtctggcgatacgtatcaggttggctgtcgaccccactatcatttttcaagttttatttccgcgtctgatgatgcccaaggtcgtatgggggcccaaaattgcagtgaccacgcatttcaagcattgcttgcgaggggagtgagctgttttatgtcctggccaacgttggggcagcatgccaacacgtgggtttgtcgtgctgctgacagttcggtgtttgaaaaggtcatcctctttgggtcggtattcgaagcggcatggtgtggtgaagacgatgttgggaggcgtcggtcccgtgactagagtggtgatgaggttctttggtggctggtcagcctcacctgttcccatctcgcagaccaacaaacagtatctaccagtctctggccgtggtgaaggtagaaacttgataggtttgattagtgggtgacatcgtttgaactcgtgcgtttgagatacggtacggacgacatctcgatccctatatcaaggaccgcacacctccgcgattctccgcactactgtacagcagacaaagccggcatggcaagatcctaaaagtgtgcttcgcggcgtgcattgaggtcctggcgaatttaaaaatgaggggggatggtgagggtgcacccacgtagggacgtcccgcaaaccacaacgctggaatcagcccctgcaaggattggatatacaggctagccctgaaccagacatccgactgttcgtgatgtggagagcagatggtgtgcacagtatccgtcttttcagccaaaggcaatagtagtcgagaggtaggattcaactatgggtgtaatcacacacaccatcgcgatggaccgactttcctcatatttccaggctcagtcattctgcccgcgtctcgagtgttggcaacttggaaacagcagctatgaagtcagcgatttcaagaaaagcccacactcggctcagaccgatcaacaatctcctttatcccactggactcgaatttcaaaaggcactcgcgcatcttgctccccccccccttcgcttaccaggtccttggccctgactagtgcctccggggaagtgttaagcgtaccggaagccctggcaaatccactcgtgaaccgaatcaacgggtcatttggctgaaacgaccatgtctgcggagacaggattggcatctggggcggcgctagtgtagacatatcaactcatccgggattccctgcgtgcgtgtcattgtgcctgccatggctctccatacaggcacacgtgctcgacgtgtaacagctcgtggggtctctggtgctgtgtagtgtcgacaaatggtgatggcgagggattgctcgcagtggtcgaggagagatgcattcgccagaggctgatcaagatgcgagaggcacctgctgaatctggcccggctgctgctgcaggttcctgtgacgcacatcccacatcactccgcaccgggtgccctcttgcgcctctagtatagaaaatgacgggtcgcatcccgagcaaagacttgtggaggcggattggcatccggggcgtctagtttgcgtgttagcgcactgttttagcgggatgcgcctttgctggacctggaccgcggaaccgcttgcagtctccagaggccggcgaccagtcgtggtggatgaagcagcaggttgtcaggcgacgggcagcaattttcgacaaaacggatccggctgtctgttgttacatacagtcggcgcacggtgttgatggccccggatgacgttccgggctggagagtggaggccaagcatcgtctggttggagacatgctgggccagtcacgggacggcatcgaggtgctctgcggcttgtccttgcctcgccctcgttaccccttgcattgggaactttcagtcgattctcacggacaagacctgacatcttgcatctcagacgaagtgggtgatatttgcgaatgggttttgtgacagaatccggaccggaccttgacctgctttcgagtctgaggatccagattccatttgcttgtcagttcggttgctggcggttaatggcgatgtctcggtctcacccacaataaaagaacggtaagatgggcactgacggtaagccccaggtaagccccaggtgtgaaggcggggaaagaaacgatggaacgttggcaagaagaagatgatcggccgccaggcgagaaacgggccgccctgaaatcgcatgacgttttgaactgatgagggcattatgctgagctatttcggtcctgtattgaaaccttgaaactttgcacaaaagtggaggcgaaaaatagcggttgacaccagctgaggtcgtcccgagctgtgcgcacggtcccagctgccctgagcttagctggtgtgcgctctgctgttagtccacccactgtaattgcctctccaacactaacgcgaggcggaaagctgagctggtccctggaattcaagagacccgacgccgcagatgtccaactggcgccacaagtgcacacacccaccccaaccgtggtattggaaacgcgactgccgagctacctgtacactacctatcatcaccagatgtgttttgaaaagaaaacatcgcccccgggaatatgcggtaattgaagggtgggacaagacctgggacaagacctgtgagtgccgtcccgccccgagacttggtgatgttctgggaacactgacagcggacagtggacaggtgggggttgatgttgggaattgccgcgctgagcttgatgaaatgttaagagctgggctaagataattgcaccgtgacatgccaagcatccgggcttgatgcctcactcccggttcttgggagtggtgggtgctgcatgcagtgctccattctctgggtccttggctataccacgagcagtatagtgcatccactagagacccttgttcgtgtgcatcgccagctgccacacctcgccgtcggccccatcaaaaaaaagagttgcgaaatcaacctcacttcttcttgaaagggaagaagacacggagacaatgacgcgctgtctcgggacgcccaagcccatcacctcctccatgtcagacctttaacccgcccgcggggtaccgcgaagatccgaaaaagaaagggacttactcaaaccacttggtccacgagatgtgcatcattgagcaacgaacgagtcgtcatctctcccggagcctctctcgctaatgacgatggagagcacggcagacgaagacaatgcctcatccgctcgccggcctactgttgaagccgccccgtccgtcccttccgcctttccgcccgccgcctcatcaggcgcggtggattccatacttttcttatacgaggctggactccatagcgggcatcactctcattcccctctcatccccctcctacaactgccgtcccgctgcggtcagcacataaccaaagacgccaaaacctgcggtacctgctgcacgagttgttggccggtgatggtcacagtggaaggatggctcacattgcatctagagtgcagccgggctcagcagcctgtgttccggacttactgacttgagccagacgctggactcttctgctggtgtctggccgtctttcatgtctcatcggtcttgtcgtctccacattctgccacttggatgatgggtgtggtgggaacgaaggcgggcgagcaaggaggtcgccttgcgcccagctatcaaccccaaggagacatccactcccccccccttgtcccctgttccaaagaactccccaatcctcggtaacgaaatcccccggctggttctctccccatgtatccatgcttcatctggatcacgatccacctcaggttcgtgtggtgggggtcgagggatggtctgtttcttggggggggggggtgggaggaggtacttttggccttgtacctttttcttcttttttttctttattgctgcggagctgccccgtgcccaaacacccacccagcctgccaagtgcagtatcgtttattgagcatggtacaagcctctatttgaacaagatctccgaacggccatggcagcccagtcgattggctcagtcagatcgtaccccagctacttactctcctcctccttgggtcctggtgttgatatatgtctcccccctctccccacgcccgatcatcatccagtctgcttggacatacatacatacatccatacatattatctctccatctgtgtatactcatcatcacttgcttgtcaacggaccttgtgcccaacgacaacaagagtcctttctttattaatcatcacggcggacatttgctttgcagagccatcatccctcccacacacactctcgctcatacaccaccgttgtatttccggctgacggaaatctcgcaccacattgacagtcagttcacataacgccaaggacgaagaaagatcataatatcaactgggcaaaagatggctctctcggaacacctcccggctcctgccaactggtctcggtggcctcagcatcatcccacaagcggagactacgccatgatggagcacaacgtgatgccgtacgagtctcgtcaggcaacggccgctccccctcaacgaccccctttggcctcccagtactttagcagcacccccttcagtctcgcccccatcactaacggcgtgccagcgcctcaataccaaccacccgtcacctacagcggatatcactcatacacaccatctccagtcctgggttcacctttcagagccaacacttacccggaacagcagacgagggtcatgccagtcgagtccggtcttgcccgagggtcagtgacgccccatgccggccattcaccagtgcaggaaaaccagagtccatcagtcaaagccgaacgtcaactctccatcactgccgaggtcacgatgccctgcaagacgatcgaggcgaacttgaccgtggctggccagcaaccccacgagttccataccccattggatactctgatgaaggcggtccaggccaaggccgagaagccagctgagtgcaagaccgaaacctcagggacagaggctcaaggcagaggggtaagttgaccgtaattgctggtcaggcatggtcctaatctaacctgtctgcgatgaatagctaccatcctcttcgcaaagccaggcgtccacacgaacgagaagaagcgttgctgggagcggtggtccactcaagcgttacgcctgcggtatcgctgggtgctccaagatgtttagccagaaaacacacctcgacactcatcggcgagcccatacgggagagtcaccttatgtaagttctgtctggttttcctgtgttgtgtgaatggccgttctaacttgtaaatagcaatgcaccctgtgtggcaaagacttcactcagccaggaaacctcaaggcccactggcgccggcacatgggagagaagcctttctcttgcactctgtgtgataagcgcttcccccagcgcggaaacctccaggctcatatgaagagccacgacaagacgaggcccttcatctgcctgctcgataactgcaacaaagccttctctgttcggggaaatctcaaggtaggctccttgcatcgacctcaaggatctggtcgtacaagctaacgctctgtagtctcaccaaaacaagttccacgaggacaccatcaaaagactaacaacccgtttcgctaccatcaccgactggagcaccgcctcctacgaggacaaggagctgttcgagtacctatccaacctctacaagaacagcaacaagggaatcaagggccgaggaaaaaggcggaatgttgccgtcgtcgttccccagcatcaccaaggccacctcagcacacccgtcagcccgacgaactcgacccatcatcaccacccccatcagtcaccgatgcatctccaccacactggtctcccgcaactccagctctgcatgccccagccaagacacgacggcctcccgtaccacggcgtcagcagccccgcggcatacaacatgagcagccgaccggcaagcctgatggtcaacacgggcgggcgaagaccacacagcggatacggcatgtacgacaccgacgagagcagcgtttccagtagcggacctgttacgccaaacccgcacatgtatggggatgaccacgggagggatcttgcttttaatgacaggatgccatactaagtgttttcatgtttcctctctgggcagggctgtctgaacacacttttcgcctttttcagttttcactttctttatttgctcaccgggcaactttgttacattatatctccccttgtatttgtcttttttcttttttttttcctcttcactctacagggttggtcattgtctttcaaaaacttaacgtcctattaggacttgcattttgttctcaaaaaagcgttgctcgggtgggcggtttggcaaaccaagaagggaaagaatcctgttgtgtttttgatggggcttgcagcgtcggtggtacatgttgttttacttttgatttttacgtatgtctgcaatgtttcgccttgttttgtttgtctatttgcttttttttttgttttcacatatataatccccccgagatggggtggcgggatcacggtacacaacaatgggaggaataaggggggaacacacgaacggtatgccaggcagggaacttgactaggtaaccaaggggggggggaggcgtcatttgaaatcaaagcggcttgtttttgcattgggaaggaagggttgcaaagggaaagggatggggatgatgggatgggataaggggcggcagggtagagatgtaacaatttgtggttttgttttgttggcttttgcattatatatagttgcattgtttttgcattggccttatttttgcattggccattgaggaggataaccgaccctatgctagtgggagtcttggttgcaaaatgagctggaaggaggtgtgatggtgttggtggtgtacaatgatgggtggatgggaagcttgaacaagtttgacaccccccttgccttgagaagagcggtagtcaaaaaaccagatagttgcttactacagcataaaccaacgataccaaactaaactcgttgtctcgagcaaatgtgaaacttattgctgcccaactatgtattgtcctctcgtattcctgctgacatctctaccggcgaaaactggtgatcaatatttgaccgcaatagtttcttcccgcccacaataacgccgtaatgacattatggggttttctgctgatcccgaatccagcaggcgtccagccagccccagccagccctaccggtattgaatcaagaaccgccttctgaccaacccaacccatcatcaccaactgctgcctagtccagatcaacttccttcctcccccttcgtgatcaacagagtcaataaagtcagcaaacagtgtgcatagactccttgcctcttccccccccctcttccccagctcaaagacaagggcccgcggggaaacttgccgcacctggattgcagtctagcctaggcccgccttccccggtttcccatcccacacgctccccatttcccgggtcagacactaaacaggggaggggttccagtccagggctgacagccagccaaatcctcatcggcgacgaggccggccggtggacggttataccccagaccggactatctcagaacacagcccaaaccccggacggacccgcagctgtcaactgtcagaaaacgcccccaaccccattgttttcattacctcttcctgtccagggacccctacggagtgaagagggtcatttcgccggggcaagactcacttcggataataccaagcaacgcccgaccgaccgaccgaccgaccgactgactggctggtgatgaacagagggtgcggagaggagaagcttggacggatgccggggatacataacagccaccccggttaggtacggtgggagtttattattgacccaatcatcaccggatcttccagaacggtcgtcgtccaggtttttgtcaacgtcaacccccactctcctagtgtgcctgtccggtccacgcgcgtatttgccttgttgagccgggtcatctaatatcaaaagagaagcctcaccgcccacggatcaacaggggaacaagtgaaagagggggcatgtgagcttgttgaaagggtgctgtagccggactccccgtcccaactccgggttcacggaaccggcagaaggttgcacaaggtcgagtgacaagatttggcgactcttgtcacaccgctcaaattggaaggttctgtgtaaatggtgctgtgtgatgaatcgtgccgagaggtcaggtgagtgaatatactatggaggtctggacaccaaggaaatgttacactgggcaaaccacaacctcgaagcatggcaaaaccctcctcagccagggtcaacaactgtgctttcacgggctgggtcacaagaactggatgcaaagggtaggccaatgcaggcagctgctcaatggcttctgcaccaattccaaagaacaaacaaactcgatttaacacacccagtaacccccaaccaatcccgacagtgtcaaaagagcaataacgatacagaaaccaacctcacaacccccaaagcattctgccacgtccattcgctctgccccgtcaacgccattgtggtgatttgccaacctgaagaaattaacccccaaccactcaagcccaaatgtcccgtatcctctaatgagctcaaatcctctgcacaatgtctcccagaatatcataagaccatatcccacccaattcatcccataaaacaaccaaaaaaaacaccaaaaaaacaccaaaaaaacaccaaaaaaaaacccaagaatccaaaccaactcaaaccagcaacctagtcttcaccctatccctaaacacctgggccttctcgtccggcttgttgtccttaccacccaacacccccctcttcttcttcaacgactctttccccttctctcgaatctttgctagcagattactaagatacaaaccacatcagcaaaaccatccctcacataacaatacacgaagcacgcatagaagccaaaggagaagctacgtactcaataggcaaatggcccctcctcccctccgtcagtgccaggtcaattttctgcgtgttgtactcatgagcccggaaatgctcctcgatgatctcttgtgcgccgggctcgtcggccgagcggactacatagccgcattcctcgtttggacagacccacgagccgtttggccctgatggtgacaaagttgggagacgttcggcttggatcacaatgcgagaagcacctgctggcagaggcaggagggatgcagggtcgtcgggggttgccagctctggatttacctccgtttcgacagaatcgtcgctgtcttcatcgccgtcatcgtgatccaaattgtccccttcgaaagactgagtgaaactgcgcttcccaccccggctgtcgtattcatcctcgtcttcgtacaaatcgctagctggccgcttcttcgacgatggccctggcctcagcgtcgaccgcttcccagagacgacgttacgattcgaagtagtttgggcggagggctgctgtggtgccctcggggctctgggtcctattttgcctctgcgatacatctgtgaggggatttcctcctccctgacgtgcaaaagctgcccgtcccagtttcgcgacgttgcctcgagccacgtatggaagggggtcccggcccagatgttcgggtccagccgtgggaacaagtctttggcgtaataagagagaatctcacgagatccatgatagtccttgattttagctttgaaatagaccatgttgaaaatcgttgatggtgccctagcgtgtaaatctgggctatcttgaaccacctcatcaaggattcccagaagccgatcaaccggagaatcgggaactgcctgggcagcaggagaggccgactgtgccggggcctgcggcagtggctggggcgtggctgacgtcggctttccgatgttcaagtacttttccggcagtggtaccggactttctactggccttgactgagactgcgaaatgggtctgctcggcaatttctgcgagcgggtaggggcaacttcgaccatgtcaacatcttgaccttggctaaccgctttgctcttccttctcatccgaaggacctcgtcttcggagtcctccagctgaggagggggaggcaccggaatgggcagccccttagctgcgtcctcaacccgtttttcaagctcctggttcgcgttagcgtttaaacctcagacatagaacgctatacttgccgggtgcttcgaaatgagccactgcgcaaattgtgtcggcttccagtcgagctggttctctttcttaaagtgcgagatgaagaactcggcccacttgtcgcacagagcctccacttcgtccctcacaatgccgcttccaatcttgacagcataatgcagaaagatctggtcgagagacaacgggggcggctgctttcttccgcttttcttgcagagcttgaccaacttatggtgatcgtcgtgggcaacaaagacacgatagtaaaggtttgctgcctcggccacttcccgatacataggaaggtacttcctggatggttggatttcgaaccaaccagaagtaccggacacccagagggcgaacggctcatcactaatggagtacttggttgagtctgtgatttcgagatgtacacccttgaccacgggaattttgacacctgacgttgatggtcagccataagagtctctgaaggaatgaagtgagcacacatttcttggtttcttcgtcgatttcaagcaatccgcgaatcaccaaaggtccttctgaatgaaccatgagggggttggcgagtgttttgccatctttccgataaataatagcgtccgagaggacaaaacagggccattcgccctcgtcggggccgagttcgaccgacgtcagggctgcgctctccttgacataatgaacagagtcgtgatcgacggattcagagcgccttgaacgccctggccgtcctgggcgtggcatcgagagcttgcttggaaaagaatcgccaactggtgtcagaatttggaggggtcgtgcatgtgaggataaaaatgaagctgaatactgaggtcgagacgcgaaaggaaggctgtctggaaggcaggtagcgggcggtatccttgacgcggttggttgtcaagccacacgcgttaagtggaaggtgccccactaccccacttatctgtcccgtctcatctgataacgataactactcttcccctggttcctcagctccatcaaaaactttaagctcgaccgcgacgccgccaattccacccaaaccgaatgcgcttgtcccaaaaccagctgcgcaaccccaattgagccccggcagagtcgcaactctctcaccaacccctcgcatgccccttttccggcccaagccactcctgaaaatggccacatccacaggaggcaagatcctcgaaggcgtcttcggaatcaacaaacccatcggcatctcctccgcccaggtaatccgcgactgccaaaactttttcgacccctccgctcgcttcgcccccgccctcgagcaggtccgcgagcagcgcgacaaagagtccaagtaccagcgcaaccgccgccgccggttccccaacaaggtccagaccaaaatcggccacggcggcaccctcgaccctctagccggcggtgtcctgatcctcggagtcggaaaaggcaccaagtcccttcagcaattcctcctctgcaccaagacctacgaaacagttgtcgtcttcggcgccagcaccgatacctacgaccggctgggcaagatcatcaagaagggcgactattccaacgtcacccgcgatgccgtcgagaaagcgctggaaccgttccgggggaaatacagacaaatgccgcccttgtactcctccctcaaaatgaacggcaaacccctctacgaatacgcccgcgaaggcaagccgatcccccgtgagattgaaactcgagaagtcgaagtgtccgaactcgagctggtagaatggtacgaacccggcacgcacaagcactactggcccgacgaggaagccggccaggcagaaaaggacgtcgcccagtccgtctggcgcgtggccaaggcgcaggaggacggaggggaggaatcagccgccaagatggccgcagaggaagagagcaaagccctcgaggagttcaactccaaaaagcgcgccgccgaggaagcagtcgacggccttgtcagcgacgagacgcgagcctccaagagggcaaagaacgaggagggaaacccagaagacaccctcatgtcgggggctcttgaagtcaaaaaggagaagctgacccaaccccccaagggaaggggctcagatcttgtgcctgtcagaccagatgacatgcctgccccgtgggaaggcaagggcccgccggcagccaagatccgcatgacggtcacgtctgggttttacgtccggagtttgtgccatgatctcggggagaagttgggatgcggggccatgatggcggagctggtccgtaccaggcaggggcagttcacgcttgggggggctaactgtctcgagtatgacgatttgcttagaggggaggaggtttgggggccacaggtggagagcatgcttgacaagtggaacgcccggccgggagagatccaggaaccgactgttgaaaatgggggtatcaaggttgagtccgaggcagtgccggcgagggaggaggagccggttgctgttagcggttaaaaagaatctgatggtggatataggaagtgatgagacaaaatacaatacccgggctgatggaattgcccccgtccaactagtacatttaaacagacgttgatatgcagtggggagcccccccactaaccacccttgtcgatcaagagccgcatttcttagcttcagtctggggttgccgggatgtcttgcttttggaggcttggcaagggtccttttcatgcacgtcattttgtcgacgtcaagagttgggatttctcattcgagaggaaggttcagttctagacaacagtgatatgccaggtcagaaatgaattatattactgactatcccaaaactccagatgtctgccccaatatgccaagttatccaagatgaccatcccaatcatccccaaacctccgttaaccttggtaacatgtgttttcccaaagataaataacacccgttacccttccattcagcattaaaatcttccatcctgtcttcgacatgagtcaaccgttgagttcctccaacttcagtctcccatctcatcgtctttcgtattaaaaccaccgcccaactctcccatcactatccttccatccccctacgcctccccctcccccagcacccccctaacccgtccaatcctctccacccccctctccagcacctccaaccgcctcctcctctccccctcccgtcccagcaactccccaaccctcttctccagctctgccctcgccctcctctcgctcgcaaccatctcattcgcctgctcaaacaaactcacgctcagctcctccacctccctactcgtctgattcaacctcttctccacctccaccctcctcgcctgctccctccccaacgccgtcagcaaatcccccgtcgtcatttgccccgactctggaggagtcgccagactaggaagattataaagcgtcgcagaaggcggcacactaggtataggtgaacgaggcgagaccggaatcgaaggcaaaggcttcaaattactcgtcgatttcctcgacgacaacagcgcagagatcctcgttgcagcggcaggaagaaatgatgttcttgacggcgaaggaagggccgatgttaccgaactaggaggggtaggcaaaggggagccttcctgaagtaaggtttgtttctgctgttggtgttgttggggttgtttctgcggtgaaggggacgaggaggatgttgttggcgatgaggaagaagccgccgacggggagctaggagttgacgatctcgactctgatgacaactgagcgcggagctttgtcagctcgtcttcgtagtcggcccatcggtcgaccgctgctgaggcctttgcgttgaggagtttgatctgggattggagctcggtgatttgcttctgggcggagaggagggcggcttgggtttgctggtaggcggggagggaggggagggagaggggggtgccgcaggttgggcagctgcggcttgtcgtcgcggcggtgctggtgctgggtgtggtgtcgtcggtgccatcgctgtcgatgtctgctggccctgttgctgttcgtggccttgtccctgttgtttctggggttgtgggtgtcatgacctcggtggcggtcatggttgtgtatcaccgcgcgggggccgtcggtgtgtcgtcgcaagttgggagactatcacggaagtttgtttcgtcgaagtgtaagggtgtaggtggcaggagaggcgacgtcgtctttgatgtttgtttgccatgtgctggaatgaaaaagagggcggctaggcaatggaaggaagcgttggtggctgcgtctcggcttggcatgcgaggtttgcagggatccagcgctcccccctccaccagggccaacatcgtcatggacatgcgcattatagatcggcaaccaatccgagaaatcgtcgagtggaattttatgtcactaacgctgagtagctgcaggtaccgcttcatcccgttctattcgctatggaacatctcgtcccgcgggttgcttggacatgggctttcgtccgtgtgctcatgcaaagtgagcccgccatccgctttgtttcccttaaacccctcggcagtctgctgccgtcctccacgatcaaaagtgtaacatattatgtagacattaatctgagataaacagatgcttagctctcgctggtctttgcttgaaccaacccgctagtgctctctcgtatgtggcgacttttgattcagatcccaacatgtctgatcagatggctgaggttgcccgtggatgtggtgagcgaggcttacccagcctcgttcatacggccggccggtctttggcctcgcatttcgtcttcaatgccagccttttcaaacatccgatcacaatggtcaatacgatctccagatgtttctcatccttgctcgacagagtgagtccccctcctcttcaatatggcttcgcaacctttctcaactcggtcaagccggtctccgggtcccggtactccttccaactgacaggatgcatcgcattgccggcttcactcgtggctaaaataacacccagctcattacgagcagtggaaagataatagttagcctggtcacccagtgagatctgtttacaatgttagcaaactgtttgatgtttcaatgaccacacaaaagcacataccacttcagccctgacgatatcccccggtctgaagctctcatagatcttgaccctgtccttctctgtagccctgacatcctgcacacggatcaagccctgccattcagcatccagcaccgtgtcgccgcacaccagtatcgaaacaacagcctgcctcggtgtgatgcgaatcactctgcagagcaccacattccctacctcgggcagcacctcgcgcttcttttggccggcgtggtcggagcccgcggaccgcgtggggaccgtcaccgagattgtggggagctccgcaggggccggggctggtgtgatttttgtgagccgcttcactggtcctggagctttagcaggttgagcgatgtgtactgtgcccatgagcgaagcatgaacgttgtgattgtgaatgtgagtccctggcccgggctggtatctggatgttgaacccaagagctggcctgggatggccaaggtggggtttgatgttgtcatgatagcgagtgtccttatcgcccttcaactcgcttctgtcgcaatggaggggttttcaaaacaactgctttgaaaaaactcgatcggaaagtgccgcctgaggtgtggaaaattcgatatgccagatgtgagtgccgttggtttgaaaaaaaagtgagagctaccaagtgatgagagccttggcatatgtcgggaatgcgatatccggatggttcgacaggttctgtcagcgtgagttggaggccgaaaaaagatgcaatcctgcttgccaagccgattctgccagcgcaagggtcctgtgggtctttatctctgcgtatccgttggtccagctcatctgataactccacaggagctcgagctaaaccccggtctagcccgctcaccgcccactctgagccagcgcaacggtaaaggggaagtgatgtgcgaggtgcgcgacagctcgcgcttttgaatttcctatacaattagtgggctcaattcctctttttcttcctttctctctttcccctccatccctctcctccttgcctttgtatctccaaacatcacaatggcaccaaaatcctcttccccggccaagaaggccaccgcctgtgcttgcagccacaagagctgctgcagcagtctcaccaccttcttcaagtggttcgccatcctcttcgccgtcctcgctcccatcttctacgtcctcgaccaaaacgtcgacaagttctacgtcttcaacctcccccagctcgatgccgtcaccaaggccgccatcaacgcccaccccggcgacaccaaggccatggtcaagtacatcgtcgacgagctcaaggccgacgtgaccgtcagccgctacgtcaacaccgatgagcagtgggtattcaacaacgccggcggcgccatgggagccatgtacatcatccatgccagtaagtctatttgcttttccatctccccaatattgcataacctaacattaaaccccccaggtttcaccgaatacctcatcatcttcggcaccgccatcggcacagaaggccacacgggccgccacaccgccgacgactacttccacatcctcaccggcacccaaaccgcctacgtccccggcgagtacgagcccgaggtctaccccccgggaaccatccaccacctccgccgcggcgacgtcaagcagtaccgcatgcccgagtcctgcttcgccctcgagtacgcgcgcgggtggatcccccccatgctctttttcggcttcgccgacggtctctccagcacgctggacttccccaccttgtggaggacgacgtatcttactgctgagcagatgttggggaatcttgtcaagggcaagttttaaggggattgtgagaaagggatagaggggggggggtgtgtatataaaatctttttcttgtactagtacgatattatattagacaaaagaaggaagggggattatatgactgggtacataatggattggattgggttggaacgcggcatgggataaatgccagtggtcaattcgatgggttcaaaaatggaataatatgaataattcatctaagagttcttatgctgggacagttaaaaaaaaaagtttaaatgcacccaccgcagccactgatgaacgctggatatctttggtgggttagggttgggcattcacatctcacttgctcaaacttaccaatctaagctttccacattcttttggtcagtctgtcagatgttcactttgcctatcgagcgagtagttatcgaaagtcagagtgactcggtgctagtattgatgctgataacaaagtctgatatttattgacatgagaaactcggcctatcttacttgcttcagctttttttcatctcttcacatgtgacaataatcatgttgctttatcactatacatcatcggagcgttaagccccccggccgcaaaaaggtcaagacccggaaaaaaaagaatattgaggttcgtgggagggagcggttagagagtatggaaaggtcaagtaagtccctgctctatgagaacgtgtgataacgaatcctggtcttcggtgaattgcgttgcgagttcttgacttgcagcttccccaatacctatcacagggctttttcatcttatatatagttttcatgaaattgactctcattcccattgacctgccgacttgcatgcacccttatccatgatatcccaacgaacaactcaacaccatcacacactcactcactcactcactctcccgatctaaaaaccaaaaaaatacagatggctcgactctgttcctattcctacccccattttcaaattatttaaaattatttatcgtatgacgcgcctgaaaatgggggtaggagatatatatatatacacggaaaagaacaaaatgtcgtgttgagtagttttgctcgctttacttttagatgaaccatcccccctcccatcccaaacttttgatagcccattcattcatttgccctttcaagccattcacccatcctttcatccccatgattttgaactcgacaaaaaactccaaaaaaaaaggagcatcccatatatccctccccctcaatccaacttcatttggtatttgatgatgatgatgatgatgatgatgatgatgatgatgatgataaaaaatttagaaaaatgaaataaaaaaaacgcctatataaacacacacatatgagatgtgggataaaaaaagacaaaaatgaaaacccgccatcatcgttacatgactctggtcgtttccatcccgtgaaataacaaaaggggaaagagaaacaagatgtcttcacccatcccatctggatccaaccaaatcccaatcgtcgatttgctttttgcttttgataaaaaacttcgcccccccccccccaaannnnnnnnnnnnnnnnnnnnnnnnnnnnnnnnnnnnnnnnnnnnnnnnnnnnnnnnnnnnnnnnnnnnnnnnnnnnnnnnnnnnnnnnnnnnnnnnnnnnnnnnnnnnnnnnnnnnnnnnnnnnnnnnnnnnnnnnnnnnnnnnnnnnnngctccacatcgaaaagcttaaacaaccccccctcccaaaaatagaacagagccgttttgcgccccctatgcaagccacccttcatcctcccgcttgggacctcgcatcaccagaccctcatcctcgtcgtcatcatcctcatcttcatagtcgtgcctgtctccattttggtgttggtggtggtgatactccccatttctcggaaccgacccgttttgttgttggtggtgattatggtccccgtttgcgtgtccctcttctggctggtgattactgccgctcttgacgccataatcgttaccgttgccattgttctccggctccgtctcgccttcgtcctcctcttccagcatccacgtcaaaccattcgcgtgctcctccagagggaaaacctcgcgcgcatactcctccagccctcgtggtccttcccagagctccagggcagtcttggggcagtcgttctccagctcgaggtcgccaaagtaagggggctgcttcttcgggtcgtcacctccaagggtgaacaacgtctccagagcctccagctggcagcgataaccctcgggaatcggcaccgtgacctcaatcgggccctggacatagcgcaccggccgaccgacccccttcgcaaagtggcggcacgcctccctgggagtgagcatctcgtaggcgagagcgatgcgcttgccaccgccccatttcttcacaccgtccttgaagatctgaaggacggctggccccacgtcatgttctgcatcaagccaaggaagcttggcgtcggggtgaaaaggggcctgccagacaaaggagccgtctttttgcagggcggtgcaaaacagagggtacggaagagatgtgaagttgttgttatatatacccgtgtaaacaaacgttgctggcaacccgattttcctaacatattcctcgacctggtgcttcgaagaccaaagtggcagcgatggccagtctgggttataagtgttgtgatccggcatggatgaataaacataatgctgaatgcctgccgcctttgctgcgtcggcgagagcctcgccgatgaggttctcatcgccataaaatgtggtgttgataaaggccagctgggtaccccggaagagctccttgatcaggttgtgattgacgccgatgccggagataggaccgttcttagatacgtcaatctgtgcaggctcgccgggtttgctcttctcctttgtgtacagctctccaaggaggaccgtcacgttggggttggtagccacttcggtagcgatcacgccctcgagattcctcatctgggctcgaacatggtagccgactgctgtggcaacccggatgaaggaagcagcctgtctgccggcagcattgataacggcgattgtcttatcaggaccggtcagaaaccttttggccgggcggaaggtcaaagaattattcctcgacatgaggggtgagccatctgagtaggaggacctggagtgtttgtgtcgcctctcgatttcggtttgggggtgggtgttgattctgatttccctgggtgccggggccggcctgtaggcaaggtctgagtgtagctcgaccgtcatggtgaatcctttctgttgcgaagatgatcttgggtgtagataggggtggtgtatgtatgcgaacttttcgagcaatccgttggctccagaaaagaaaagtcggttttaactgttcaagctcctcgatttctctttctctgagtcttggaagaaagacgacggcgggttgggcgtctctggcgcagtgatttcggatggagtgctatcggtatctcgccagtgataaaggacatcagattgacacagctaactttcacgggcatgcgccccaaacggcccagcagcagcggtgtgtgcgggatgcggcgcttcagggagggtgcttgaaaacggtaaagcttctggtgcctggaaacaagcaggactgttgcgcagacaggaaagggtggttttgttgtgattttttctctctctctctcttctctctctctctgactgcagagagacaacagcttgtgaaccctgacggataggatagctttggtgctgcgtcgcacacgaggaacaggttgagctcggcgtcgatggcgtattattctgggcagtggttatctgttagtggggttcttcccgattgcggggcaagcaggggcactgataaaagataaaagaagagacaggcaaggcagggcaaggcagggcagggcagggcagcaggacaacagaccacaagcaggatggagggcgggaaggcgaagacggagggtgtcacccgagaggtagatcagagagagagaggtatggatgggtctctgcttatgcttttttttcttatccagggcttggagataggatgactcgggagataacacaaatcacaaagctctgtccaccctctccagcgttgctctgggactgaccacatgacgagcttcgtgatgagaagacgacgggcggcatgtcccatgcgggcatcgttggacattgtcgccgccgtttcaatgacagggagctccttgcgcaatcgcggcaggccaacaaagggaagcaaatcgaaagctcgcaacccagctctggccgtgcttgcgggacccgatctccccactctccagagtcttgttttcagtgctaaagacatcgttccatgcgggaaatggggcgagacaacttgtcgacacccaccgtatccacagcaaagagctcagcaggacggccagagagaaaaaaaaaagctgccatggacgcggtgagtgccggccaatcgggtacacctcgtccacctagtccagcgcacgcttcgtcgtctgcttcgctcaatggcccgatattgatattgcctacctctctggaggagcagcaagcgcgggttgagctggggcctggtgggcaagcagactgatcgagacttgatgatgttgcagactgtttgtcacagattccagggtttggtccggcagcccacgcaggctgtgtggatgacgatgatggccatgccatgatccgggggcagtgagaaaatggccgtagtgtagggatggatgtgagcaacctggatccggtacggagcagagagataacgcatcagggcacgaggcacagggttgcatgtaagtcaatatcagccggaccggtctgttagcgcagtaccttttctatgtctctgttgtccagcggcgggagaggctgtcgtacagaatcgtaatggctgatagtaaatctcatcctctttccaatggcattgcccggtggaattcgaggcaagcacaagctgcctcgctgtctcaaagaggcagccgcattcggcatttgctgattgatatccgtgcaatctcgctcacagtgctgccagctggagataacggcctggctgggcagagcaccactgggctgactccattttccacaccttggaaaacttttttttctttcgtcaaaggctcactccatcgattcgacggccgtctgggcatccgccggcctggcaggctccagtttccgctgcagctagaggttactgttacctgatgaccttcctattcagaccccaaaaaggcatttccttagcaatacatcttggcgctcccggcggtcggcgcgcctgcgaaagtgcgaacgatagagatagggaggctggaaaatcccgacatcatcaacgaaggggaagcccgtgccgcacgagcaatcatccgaactgctggttggacacattggacctctctctcatccacttcgattcatccaatatctagcagcccccccccaagagtcttccattccattggcgtccgcttgttgttccacgaaatgctggctcttgtctctcggtgtcgggtttgttcgatatccatcctccccatggagcagctgagggtgtgatccaaaaccgtgcggtgtgatgggttggaatggtggtgttggtttgtgagcatgttcggttcgttgaacgtcaaaaaaggctcgaatccgggcgcggccttccttttcaattacgtacaatatgcgccgctaaggccggtctagggcaagcaacaagcacagcaccatccagtgcacctgcgtccaggtatatacagttgggtttgtgtgccacagggccgctggcaaagtctgatatctccgcggaaaatcagatggttgttgcaattgcaattcacttttacccaacaggtgttacaccaaccactcacacaccacttacatcatcgcaggggtccgtggttcggctgaccctcttccaaaaactgggacacgttccgacgactggcgtcttttggccccttgtgggagcgagccctgccgagcctgggcagtgatgagactggaagctgtcaaccctctttttttccccgcaaggaggggcatcgaaatcgcggggaagatcagaaaacctctgcggatagcgtccctggaagtgcctgggcatcgaaggggacatcaccgggccaagggcttccggaagctggcggtgagctccgcattcggcacatccccaaggcacgcacagcaacatggctccacaacgcttttgggtgtcgaactctctggtccagagtccagactcgataaagtactacaacacacgctgtgtcacgcgagcagcatggctctgaggacggttgatgagttgggtcaagacattctgatcaacattcatacccttcctcctgctctctccagtcaaacgggctgccgtgaaagcccatggtggtcatcaactgaacatcgtccaacaagggaccctctggtatccagtcctccaccgtctgctgatgcacgttattttcaccacggatggcgctatcaaatgtgtcctagcacaaagtatggattcgtcagttatcgtggatcactgactcggaaaaacggccagactctggggagctgagtagtgaaaaaaaaaaaaaaaaagagagagagagagacagagagagagagagacagagagagagagagagagagagagagagagagttgccagccnnnnnnnnnnnnnnnnnnnnnnnnnnnnnnnnnnnnnnnnnnnnnnnnnnnnnnnnnnnnnnnnnnnnnnnnnnnnnnnnnnnnnnnnnnnnnnnnnnnnnnnnnnnnnnnnnnnnnnnnnnnnnnnnnnnnnnnnnnnnnnnnnnnnnncccctgtctcgtgctgatgtgttaacgcttttttggggcatggggaatccagccaaattctactcataattaattatacggtcctttataccctaagaaaaagtctctagaaatagtaatcgagagagagagagagagagagagagagagagagagagagagagagagagagagagagagagagagagagagagagagagagagagagtgtgtgtgtgtgtgtgtgtgtttgttgttattgcacatacccagcccatttggtccatccccatactgcccaggtcgagccatcgagtatcgattgatgatgcgggcatgagatcttgccgcgtcaggggctgctgcacatcctccatcatgtggtgctgctgctcctctggaccaagctcggaatcccagtgttcatctacgttgcgcgcacgcggtcgaaaacgtgtcagtcactcactcttctggctgggaatgtgtgtaaaatggggattggaaggacggatatataacataccggtcacagagaggctgccgacggacaagggctcatggctttgcgatgcgttgagccaagagtcctcgtctcgcacgtacgcctgatgttccgggtggtgctggtcaggtgcgagctgtttgcctttgttctgctgcttcttcagttcaatcttcttcagcatcgtggcgagcatgtcagtcgccttccggaagacgccgtcagcttccgagatggtttcccatatctgatgggacctctccaacatcttttggagttgctcctcgttcgagaaggctgacaaggccgggtctagacttggccagcagctgctctcctggtggtcgtgtctcccagactctggctcgtgctgaaggacgaggtagacgaccatggcggcgaggagaaagtcgtggatggccagcgcgctgatgtaccagcctgttgccctcagtgcgccgccgggcagcgtggccaggtgcatgaggttttggtggtccaggaggctgatggcggcttcgaggcagattctccgggaataagcatgctcgggcttggggacgggctcgatgaggtatcgacggtgcagcacgcaacggctcttgttgtacagggatatcaaaccgaactgctggttgaccagaaccggggagatgggctcgccatcataatcctgtggtggcacgattctcttcatgaaagggggcacctggctccatatttcgtcgagtcgcatgtcgagctcctggacctcggcgtaggtgggtcgggtgagggagttggcttggcgggcgacgagaccgaagacttgacagatggaggatttccagatcgggtatgtcagcatggtgtactcggtgtcgggccgggcggggggtagctgatggcagtctttgtccaggtcgtcatcgaagaggtttctgggcagggctgtgtcgctctcgatgctgtataccatgcttgggaggcccatgtggaaagagacgaggtggtcgaattggcaggctacatgccatagccttcgcctcatttctccatcaaaagaggggatgttggggagcttgtcggggtcgcggtggaggcccattctcagcatgagtctgatgcagactgatatcaacaggtaacagatcatctgggaggttcggttgatgaggaattcagactcgatgtacaagagaaaaggttgtatcgttgacggtccgggagacgagaacttgcctgccaccagggcccaaagggcggcggcacgataccctcggaatcgctccatcgggggaacgtccgagtcgcccgccagttcccggggggcggtgaacatggagaacgacgttccctgtgcaatgattacgaacaacaacgccagccattgcagagacgccttgttcggatcttgccaaaacacagcacaatctttggcaaaggtcggctggtggacgcagtggtgggtcgggctggcggcatcgaaataacgccgtgtcagcctttcgaccaccggttgaggggggagcatatcaaatagatcctgcttgcaggtcgggacggtgtgagacaacagcagcaagccaggtgagtgcgcgtcgtcgggagagccgaaccctgccaccgcgtcagggtcgaggcctgcttccccggtgtctgcctccccatcatcgtcgtcgtcgaagtaactcttcaggtcctcgatctattttatcaccccttttatcagcaacccacccacacctctctcttggtcaaaccgtaggagaacactcacatcctcgagcatagccatgaaatgcgtcgcccctacatacgtaacactccccttgccgctcttccccagcacgacctgcccaacagggaccgcggctgctctttcatctgggctttcctcgttttcatcgtcgtgctcgtcggtttgatactggccagtggctgaagaagaggatgtaagcgccgggatgggaccacggatgttagggttgttggtgtgcatcatgcccctgaccatggactctagccttttcaggcgggcagccatggaccgctcggggcgggctttttctggttttggggcgtagatgcagaggtcttcgcgggcttttttgaggcagtttttgcagggttgttggcggtcgcctgggtgattgatgtcagtttgggttgacaactgcagcagcgacaatgggcgcaatcgatcgaggcgggcaggtaagggaaaaggagcagtagagtaacgctagtggccatgttttgatcgtctgacatgagaaggttgttgttcgggctgtggggaaagaaagtttgaagtagacaggtcaacaagtaacgttgaaatcgtgacgtctgatttagggtaggtgtcttgagagaggtaggcaggtgtgatataatacagtaaatgttgtgaaatatagaacttgtgtggctagataccctatcaagggttggagatcaagccatgatgaagatatatctcacagtagaaagcgaaaagaactagatacaataaaagaaatgaatgaatgagtgaacaatacatacatttttgcttactggtcctacaaggcccacaagatagcaggaccctagtccgtttctgagcttgagtgggcggaagctgatagctactgttgataggtagttgcggccgactagaagctgcggctcccttaggtaataaatgatgaaggtttctcggggggttcgttggcttcgggttgacatgaatgttgctgctaccgctgccggtgctgtacccgcgctggggagctcgtgggggccgggaggacatgatgcctccttgaggtgtggtgatccaacctgtcggtaacggttttgatcttgtgtccgtttctggagtccggctgtatagacgaggcacttgaggattcaatatctggcgactcggatcgggtttatcgttgttgtaggttgtatataagcgaggctcggagataaggggtttggctgtggtgctttattccggtttgtcttgggttgatctttgctcttgatcttggaaagctcggtaggtgagagttggagaagggattactcagcggtatgcgcccaaagagagtttagcagtgggattgatgtgatgtggtggctggaatactgttcttagcataagattcaggttgtggatttggaatagtcgtagtcgactgaatatgatgctgcaatcacgactatgatcttgatgtgcaaagctctttttctgtcggtaggaacttaatctccctgccgacagcactggtattcccctcttctcggcaagggcctttgtcgagcacctactgtgtggtaggatcgcatttacaaccaacatgcattggacctacccaatcatcgagcactatggccgagggttggcaatgtttggaaggggacatatcaatcatatcgtgagggggaaaaaaaaccatgtatttgggaatttgcctcgctttcttcagccccattccgataattaccatgctgcccatatgcatttccctttttcctggccccaaactccaataaaacagaagatatcaagtcggaagacgtctgggtatcccttgtagccatccactgccctccagccatgcccttgattttcacaatatccctcggctgccttggtattgctgagcagccttggcttgtgccataaaagcgccactaggcccagccgctggttcagaggtatcgctgttgaacagatagcagacacatattcctcaaccatgcgccacgacttggccgacgccttatctcgtagtatgtgatagacccatttagaatcctcccgctcaagtagccggagcaccagggagtctctcgatggcatatttgcccttttggacgcccagaatgggcacacctgggatcttgcggagtcttcgcttgagatcacgatcgttggctgctctctatcagtaaaagctcaacgagaaaaaaaaagggggttacctactggcaacgatgtagatacggttcttctggacgcggtcgacgatgcactaggcagagttaattaaatcaagacaccgaagagaagacgaatattgggaattcttacatcatctgcataggttcccttgtggtcgcaggtgagcctcgtccacctctcgtcacgagcaatcatcaaggccatgcggtacttggggcccagcttctcgagttccgccatgacgcagtctgtgatgatgatgttgaccgaggcatacagggcgtccatggcagattctagaagtggcagcttcgcctggatggatctgctcaggaaattggtatcgacaatgatctggtatggtggaacaagcgaggtgttgaactcgaagaacatggatgatggtgcttgctgcgtgatggttagttttgtcctgttcagtctgtgaagattatgagaggacaagacatacagggacctcgcgaactagttccttctccttcttcttgatttccaacttcttcttctcggcctctgttttcctcctgtcatcgttcttgccgatgacccgcttcatgcggaactcgcgaactttctttgcgactgttgttatgtggttagtgtctgatgagatgtgaagggtgagtggcggacagaaacttaccacccatattgacggtaaagtcgctgaataatattggtattgtctatgagatgtttcaaatcactcggtgagtctgaattatcgggttgttcgtttgatggtgacggcttcgtttcatgtaagtgaatgagtttgctgatcttgaattttttgagaagcctggcacggaccaagttcgtcccagtcccaattgcagcatggtggcgtggccccggcgcgttgcacagcgggcgctgcggcaatcccagacagctggcaaccgactgcccacctctagcccaggctgtctttaattaaggtttggcggcgtccagaaacaggaggggcgtcctgaaatcatcttggccctgaaatgcaagaactgcagggcgctcgcgatgcagtagttaggtgcgtctgcacccaatatgcaggtatccgtctgctttccaccatgagacggtttgtgaaggacagtatctttctgcaaatatcatagaaataatagcctgatgggctgagacgccgcagcgttgagatttgctggatcagcgtgcctgcgtttgccaagaccaagagtggtccgggggagacgaacggggaacatgggaggggggctgacggtttttacggggggccaccaacacgaaggaggtctcctttttccctactgctgggcatccctttgcctctccatctctctgtgctattacctagccctcgctcgtgtcgctacactacactacatacatcaatttacattcttgccgtcggccattgacacgcgcgtcgcatcccctcgttacccatttgttttgagattattttccgccgtgtgtctctcggcctgcctggaacttgcttccgtcaccactgagacctgggcaacgcagactcagccccgtccctccacaaccacccactcggagtcgatcccttcgttggtggctgcaggccttgtccgacaacaaagtcctcttctccaggttgaaccccgccagatactcattgtgaccttgaatactggaacagttatcgttcacgagggcctcgacgacacatttgccgcaatgcggacatcatcgccactgtcgctgaggcgcgcgcttctgctgacgtccttcttcgctgccggagtctacgcccaacaaaacaacgacgacgaagacgaagcacagacatcgcaaacacaaaacacacagccaacgcccacaaacaaccggccatcgacctcctccgcgaatgcgcaaacgagccaaacatcttctcccaccaacgctcctcccccgctgtcttccagcacccaatccgaagaaacactcccttcccttcctcaaccgaccgccgacttgaccctcaccgatctcccgaccctctcctcccgtcccgacctcagcatcccgacttacccccctcccgccatcccgcccacccacaatgctcccttcatgaaccactcgaccctcccagatggcaccgtatttatcgccgtcggcgccatcctggccgcctttggcctcgccgtcctcctctggcgcggcatcctcgtctgcctcctccaccgcagcgtagaacgcgcggccatggcccagcacgcagcaaacgacaagtcggccgcctccttcccggctcccccggcccaattctacaagtacctcgagcgggaatccaacgcctctcttcctgttgctggcgccaactcgggaaccaacagcgggatcggcacccggcgcacccaccgcggtcctaccccctcggccaccccctcgcaaacaaacctgtttttttcacctacggccggccacggagcggcaatgggtggcggcggtgccggagcgggctcctcaaaccgcgactcgaggtttttaccctctgggttttatgcctcagcatcacccaatcctggtggtgcgggtgcggtaggtggtggtggtggtggtggtggtcatcagcatggaaactctgttagtctgtctaccctgcgaccggcatcacgaggaagggggcagatgatggggcctagtccgcccgagtccccgtctatcgatccgagaatgggaggggggtttagctcgagctcgctgaacttgaacaggccgcctagcgcgggggcgagggcgccgagtgcgtatttggatgacttgttggatgatcagccggggttgtttcctcctgctggggggcagcctgggcagcaggggggtgggtataatggggggcagcagaaagggaggttttaggttcttttgtcgtagggtttttattctgggtttggggagatggaggtggtttaaaatgtttatttctggggttgttgtgtagtagtagtatggacttttttttcaaattgtttagggatggcgggggggttggtggtttacctttttggggcgagtggcatagcaaccttttattttatttttttcctctcttcttcttttatggaaattgtaggagggtggattcctgaggggggtgtattttttgttttttgtttattactattggagcatccagtttattgtttttggcggtttgggtcagagagaagagaaactttttttttctttcttccgtgtctttgctgaggtttggtggtgtgctgtgttagtgttgtggacgatgaagttatcagaatattgggggggttatggttgcgaccttggttgaatttttcttgttttatgttgttgtgtggtgttttcattcgtcctggagtgagcggtgtttatgtcttttgttcttatgtgggggaaaaaaagggctgtaaatattcccctgatagttgaatcacaggaccataccagacacacttcatctttccactatcccaacttacaccaggacctgccagcctcgtttaccatctcaaacaatttttttttaaaaagccggacggatacttgcagtgacacttgcacaaaaacccggactcttacatatgtacaggacaagtaccggacatacatgcagcagacaggcagatagggacatggatcagacgtagtacacacaaaccgtccttttccactccccggactttgccgagcagcttctcggatggtatttctgctgtcgtgacacaaagactggacatattactccggctacagccactcgtcaacattcaagccacccaagtctccaaaacaaatatcgaagcatcgctgaatttttacacattactgctatccacaatcgtatacctccaccaccacatgtttccctttccgctgtttactgctgcccactacccagtatatcctcccccctaatcccgctccgctcgcacattcccctgaaaatccccccttccacctcccacaaccccctcggcgtcccaatctccgctatcctccccttgtccatcaccacaatcctgtcatacccgataatcgtcctcaaccggtgcgctatacacaacaacgtcttccccttgaacccctttgccatcgtagcctggatcttgtcgtctgtttccatgtccactgacgaggtggcctcgtcgcagacaatgatctgcgaaccgcggaccagtgccctagccagagccatcaactggcgttgcccaagactaaagttgagaccgtcttcttcgaccgtgctgtcgaggtggattttggaagacgaggaattattctcccccccgttggcggatgcttcaggtgaggaaggggaaggggaaggggtgtcagacaccaaatcggcttgacgcaaggcaccccagagttcaaggtccgagtgctcgccaaaggggtcgaggttggacctgacagtgccccggaagagggtcgggtcttgggggataattgccagccgggagcggaggtcgtggaggccaacggtggaaatgtcaaccccgtcaatggttatttttccagacgagatctcgacaaggcggaagagggtggacatgatggatgatttgcctgcccctgtccgcccgacgataccgatgcgctcgccgcctttgatgtgcattgataagccctgcaggacaagagggagaccctcgcggtagcgcatgtgaacatcgtcaaagacgatctcgccgttttggggccattctttggggagttcgatggtcttgaggggcgcttcctcgtcgagctcggtaccgtagtacaacaggcgctcgaccgcattcatgccgttctcgacttcggcgagctggcggacggtgaattgaatcatgcctgcgatgccgaggatgtaggacaggaccaaaccgccgatggaagggggcacggagaagcgggatgtgacgaccaagatgcccgttgtgaagacgagaaggttgccgatttgatcgagccggattgacaaccaccgctggttggaataggtcaagaagtaggccgagtccatgtcgtcaatggcttgacgcaagtcgacaatgaacctctccttgagaccgtaggcgcggatgctggccaccccggaaagaccttcgccaaacttggcaaagacgttggaccgaaggatagactccaaacgcttgacttctctcgccgaggctcggtagtaagatgtagcaaacaggaagagaataaacaacggaacaagggcgatgacaaagtagtaaaagaaggcgatgatgagacaaaacaccgagatgatggagcctatgctgaagaagtacatgcgcatggcatcagtcaagttgttgtccatgacatcaacgtctctgctgaatcggttcgtgatgcggcccaggggagtagtatcgaagaaggacatgggcgcgcgcaggaccctggtgatggcgttctggagcatgaccttgctggccgtcgttccaaagatggatagggataccatgaaggcgaacatgagcagagcctggacggcacccagaccggcatagacaccaatgtattgccctgttgagagactccacttgtctgctgtccaccacgagagccacagactggtgacaatgttggcgccctgagagatgatcaggaggaagagaacgatatagaggttgaagatggtgccggaagccttgatgtaagacgtgtacaccgaccatggcacgctagccaccgctcgctcttcggcttgcatgagcgccttgcccttcttctttttcttctgtccactgtccccgggaactgttgcagcagcgccatcctccttcttctcttcaacggccgtggtctccatcaacgtccggaaaccctccgaattttccatgaggtttttgaacgtgtcaacagcctggatcttgccggcctccatccagatgattctgtcgcagcggttcaacacccagagctgatgtgtggccaagattctgcacttgtccttgagaagcccacagatggcattgtcgaaaatgtgtcttccaacatgagcatcaaccgcgcttaacggatcgtccatcagaacgatgtcagcgttgaagtagatggcgcgagcaatgttcaaccgttgcttttgcccgcccgagattgtgatgcctctctcgccaatctcagtcaagtcgttgttaggcagcatatccaaatccggctgcagagcacaagccttgatgacatcggaataccaccccttgtccatttccttgccgaacagaatgttctccttgaccgtggtattttgaatccaagcatactgggggcagaaggctctggacgctcccaagacgacctcgccgctcgtcttacgcatgtcgccagccaacgcagcaagcagagatgttttgccactgccaacagtaccaataacagcgacgagctcattccggccaacctcgaaattgagatcttgaagtttgaagggctcccgctcttccactagagtgctcgcatcctcgctagcatctccaggcgtgggcttggacttgctcttgatgtttgtcccgacagtcccctcgctatcctgggtaggtgtcctttcccatgtgaaagaagcatcatgcatctcaaccgcattctcgatctccgggtcaaacttggcctcctcttcccgctcctcggccagcacaaactcctgaatacgagaaatcgacgaccaagcatccgtcacctggccaataaccatgggcaacagatttagtggcattctcagaccgttgaacagagccaacgacgagaagatttcagcaggcgccaggttgtggttggtaagcgagtaggtgataaaggccagcatggaagcaaaaatgggcagtgaaatgctgatagccatgatggcattgcgaatcgagagaaggacttgaatggccgagatctcgcggtttcgaaaatctcccagtctctgcaaaaacgagccctcccagccgaagaacttgacgaatcgaaccgactggaggatttcctgcgtcagactgactctctggtcagtaatcttgttgatgtcctttctccgcctgaacaggctcctgatggccctggtgaggatgggcataccaacaaccagcaaggcaaaaccagccagggcgctgtaggtgatgttgacgagaagcaacgcaagcgtgataagacacgacaagggagcagtccagatcatgtggaacaagccacaggcctgatcaaccctgtacgtgtcgacgctcatgatgttgatgatcctgccatttccccaaccttccccattagccccagcatcctctcccccctttccacgcctctcatccttccccccctgcttcttcgccgccaccgcagcaggaatatccggcaacccaaccccgcccgccttcgccctcccactgaccaccatgctcttctcatagatcagactaatcaaactcgccctggccatccccccgataaccatgccccggtagataaaatggttgatacaaaaactcgacaacacctgcatccccgttaccccaacaaccaaccctatccccgccgccaaatttggctccggaaagtccggtaccctatccgcaagccaggcgtcctgcgcaaactggatgaggtacctcagcgtgaacggcgccatgacctgaaggatagtcgccaacagctggcacataccgcccagccaaaactcccaggcgaatgtctcgtgcatagcccacaacagagggtatttatcccctcttttgaccctcttctcaaacgactccttcatccgctcggtgagcggttcgacagaccggtcagggttgactttgtatatgtctgtcggttgaagagggcgtttataacccgtggtcatgaggggccccatccagtggaagacgagtttgctgaagaaactggccttgtgctcgggagaaactaccctctcctctgggatgggcgggatcttgccccagcggagggggttaggttgcttgtaccatggcttctgaactggtaaaggggggttggtgagagcggccgagtccacgcttgtggcgtaggatttggtgcggttgagctcgtttcgttctttgttgttctcgtggtcgtcatcgctggcgttgcccgtaccgccggcgatggtaccaacggcttcgatgctatcatcgtcatcatcaccacgtctgagttgacgggcggcggtttgtttttcctccttgagtttttctgacgactccaagcttgaccgtgagtagacccgagcaagagggtctggtggtggaatggtgtgttcttcttcgacttttggtggaggtggcgacctggagggtgaaggtggtgagcctgccatggttatggctgccgttggcgggctcagaaacgggacgactcaacggccgtgagtagtgggatggaccctgaagaagtcaccggtgcgagtcgaaaaaggtgacctgttaaaactattataggattgtgacggcggtgtcaagaagcacgccactgcactagcaggatgctagcgtttcgacagttggggggttactgtggaaatccaacagtcgtcgcgaccgaaataggcagcttgagggtttgtttgtttggagaggtcgaaaatatgacgatgacacttggaagctcgcggaaggggggggtatccactcaattattgaacacgcccagggcattcattcaaaaataaatacgagagggtgagcaaaaagtgtccgggcagtagaaattgtaggagcaataggtagaatagagaaataggttgccaaaactggcaagaggctcgacctcgttgttgtcggagagttacgagtgcgaagggtaggtagtgtagaaaattgattagaaagcaaaaacaggggcttaaagttccctgctcttggccttcccccaacgtcttttccctcttttttttagttttttttttatgtccgttccatgtcccgattcccgattctttacgatggaggacagcggccaaaccagagttggatcgagctagcgaagagcggcaagtcgcatatgacatgatgacctgcgaagacagtcggcacacggcaagtcccaagcaccgacttccccatttgccatactttgcacgcgcattagtctccttttactatcccctatgattttgtaatcggagatatcggtggctttttccatcccccttgttcttgtgtccaccgcctattcttttccgccttttccatcacgtcagcagacaaaggagaacacgcgttatgaccaccgggcattgggaaagctgttatctgaataaattggccatgtcagttttatggaagggcttcagttgcacagcaggctatataagtcactacacatggggccgccggcatgcgggcctcgataatgcaagcggcttaggttgaagtgattggacgagtcgaggacgagctgtttccgggtgggtagcatcggtaccgtgacggcaccggcagtcgatgacttatccccggacattgagcactatccgatggaaaataggacagagctgccagcaatgtctagagtatacagttccctgtgtcacctttcccgttagagaccaagactgcgatgtcatgtcactcatacagtacaatttgttctagaagacttggcattttcttgtcagatttagtccaagacaaccccaacgtcacacaactaaagacatgaaagactcagatgtgtcaaaaagatagaaaagccaactgccaatccaccctcaacctcttcttctctctcctctccaccctctcctgcgccctcctctttcttctcgaagcccccctatcctccataaacctcccatacctccactccaaccactttctcaagaagatctgaaaatctgtcttggtcagcctcccctcccacgtcaagccctgcaatctacaccccgcccccgtccccctaaactccctcaccaaccgtgtcggcaccttcccatacctcccccaccaagtatgagccgtctcaacctgcgtcccaaactccccaaaaacaaccttatccctgaacagcttcgacacccccttcctctgcccctttagcttccactccttcttcttcatactcccatactctttcccattcaacttatcccacttcacattcttcatcccctcccactcttttttccactgctccctctccttcctatccttacccactgttcccaaccccaacccctccctccacgccctcaccaccgcctcagtttctttctgtccaaaaacccccatctgcatcaactccttaacagctttataaaaccccttgttatcattaaacacctcccccaaccccaacctcctcctattcttctccctctccagatcaggaatcacattcccattctcgtcatacctcaccgcaggcaactcactctccctaaccgcctttcgcatcccctcctccgcccacaccttcttcttcctcgccccatcatccccacccggcccaccaccaccaccaccaccaccaccatcaccaccaccatcaaaactagcatccgattcatcgctcgtatccatctccatcacatcagcaggcgggtccaacccgtccggctccgtcgccgcccgccgcgcagaatgagccacataccccgtccaatacagatccgactccgcggtgggagcagcccccgttgatctccccccagcagcagcagcagcagcagcaacaagaacaccaccggttcgggtgaatgcattaaccccccctccgacaccaacatcaggaagagcagcagcagcaacatcacccccaggaccaaggttagacccagcaacactaaccacattcttcttcctcacccacccaagagtaacaggcgtcaccagccccccccggccaccacgaccaggtgtgctttgccttggtgtgtttcccccaggtgttctcccaggcggggttttgggcggttcgggagtcttcctcccccggtggtggtggtggttgcggtggtggtgtcttgggaccggtaacactcccaacaacactaggcgtgggcgtcttcctcccccccgaagcagcactaggcgtcttccccctcccgccgccactgttgtcaggactaacgtctgtgttcgggctcgaaacaacaaccggctgggcagggctctgatcaacctcctcttctgatcccgagtaggaaggagaagacgaaagagattcgtataccgcctccgactcctcatcgctgactgctacatcgtcaatctcactgtcatcaacgacaaagtcggggggtaggaagccgacctgtagcggtttgctgctgctgctgctgaccagccgtaccagtgttttgagcagcgctcgccgccgcagcagcggcagcttgagctcttgtctgagccctggttgcccttctggccggcttcgccatcaccgagtcgtcgtcgtcgctgctgataaagtccctgtacccatacccgacattgcccgcctcccgctccagttcctcgtcgtatcccccctcgacataatactcttcgttgcagcactcatcatcctgttggtcacatggttgttggttctgctgttgcagagcctggcgcatccattggagaaaagacatggtgacaagtagtagtagtagtagcaaggtgattgatagaccaggacagacagaagcctcgagcagtttaactgagagaaaaagtaggcagatagtaagcaagtaacaatgttattggctttctataattcttttcgaggtactataccctgaacgcagacggctggacaaaaagccactggtggtccgagcggccatgctccaaaactgcttctttcacatcaaccctttgttcaacaaccaaagctccagctcacaagtgagctgatcttaaagtgcccaaagcttaacgccggaatggacaatgacaacaagagcaccatgttgaccttgtgctcttccaatccaatcctcaaaacgaaaaaagaaaataagaaaaaaagaaaaaaagacaaagaagaagagaataaacaaacgtatgtggaccttggatttgcgtccactgttgacttttgaggctgagagaaaaatgcaaaatgcccctaccagtaaaccacttggttgttgttgacccccatcccatccccgccgaaaacagacagccttccctcttcaatgtccggaaccaaaggtaacggcatggaggattaaccagccaacttcagccacagtcccctccactcgtccatagtgtagtcgtgcccttccattgtcttttctcccatgctaccatgtctcagacacagaaacaatgcatgcatgtctcgccaactaccgccatcaaccctcgtcggcctcaccgctgaccagttggtcaaatgcttcctccatgctcgccaaagtgtaccgggtactggaatgcagatagcgaggacatcgtgacaggcaaccaccggcgggccgcagagcgtggcgtttgcctgtgtaacaaaccaaacagacatgtctcgggcccatgcataaactccgcccacacgggcttcgtacctggaaagaaataaactagttagctccgtcagcttgagacacgataggttacctgctctgcccttttggcgacggaatcaagtcagcagtatggaggtattgccaaaaacgagggatccacggggacgaacaaagacgctttgggttgccacttgacttgaaagttttttttttttttttataaaaaaaaacccaaaaaaaaaccaacacgtttgcaccactggggccatggcgatacttaatgcacgtgtgtcaagggcgtattatgctgtgtgggtgtgtaggtgtcaggaataggaagatggtgatggtaatcgcaaggacgcatttacatgtcggaaaaaaaggctgttagtttgtggtgtgtcacggatcaaggctggctggctggctgaagttgatgtgtttcgtatcatgtcgactacgtaatgaaatcccccggtctgaaaactgccgccgtgcttttatgccgctgctgcaaaagtcgtcacgaaattgagatgccgatgagccgtagcaaagaggcggaaaaaaagtgatagtacaagcgaggctgtcatccaagcggaaactcgataggatgacggcgaatgggtaggcccaccccaaaacaagtgtcgaccagtgctgccgcaaaccggagagtgccagtcccaacccctcaaccctcggaactgtcgaaagtcgcaacccagagaaaggctaagaagtaaaaagatctagaaccccagaggctgccaagacgatgtgccgaataaacagaggccgtttaaccctccaagattgccgaaactcctgctgtccgaatcgcgttttaggatatccgatttttccccagtgccagacgcgaaaaaacaagaaaaaggaaagaaatcccgtgctgcgaagacgtcaaatgccagagagaaaagggatgcccgatacttagcgagcgcctagagaggacgagtcagtaactggttgtcgaggggagggcgatcaaggtccattaccgtaggggtcacggctgtcgccgcggggagcagcgtcgccatagccggcagcggcaggaggagcggcgtcacgaggacgggagtcgcgctcactcggacgatcgtagccacggtcagcgcggtcaccacggtcgtagctgggaccaccccgacggtcatcaccgccaccacgtccgccgccatagccccgatcatcacggccggcgtagcggtcaatgccaccacggccaccatagttgtcgtcacgctcgcggcggtcatacccgcggtcatcacggtaatcacggccgtagccacggtcatcgcgatagtcacggccaccgccgccgccgccaccatagccgcggtcgtatccacgatcaggggccccacggtcgtaagcgcggtcatccccacgataaccacggtgagagccgccacggtacgagtcgtctccaccacggtaaccaccgccgccataaccgccgccatagccgccaccacgacgacggtcatcaaaacgaccacggccatcttctggtctagttagccttgatcgttacacaggtgatggaaggaactagatactcaccacgcttgggaggaccgaagtacttgcccggggtgggagtgcgaggacgggcgcgacgagccttctcaatagaaagagtgcgaccctcaatcacctcaccacgaaggccatcaatcgcagcctcagccatttcggaagtaaccatcttgacgaagccaaagccacgggactcgccagtctggggatccttcatgatctggcacttctcgacctcgccatacttctcgaacagacgggtaacctcggcctcctcgagacgaggatggatgccggtgacgaagaggttggagccagggttgacggcaccatcttcacccttctgggagttgttatcactcttaaccggggcgctgttggacgacgaaatcaattagcgggttggctccagacgatgatgagaagctaatgttttgtctaaataaatcgagacaaacataccggtcgttaccgttgggcgacatggagcggcgacgcgactcgtggccatcgtcgcggcgaggagaagcactgcggtctcgttcgtagcgaggagcctcgtctgtgttaagagagggaaaaacgtcagcgatgatgctcctctcgatccgagtcggaaatgatggagtggaaaagaagccagggtcgacgcgcgccacacgagacgcgatcgacatcgattgatatcagcagcgacttaccatcgaaacggtcgccattggcgttctcgtagtccatcgacgtggtcgccatctttgtgcttgtttgtgtagtggatgtgaatatggttgtgttcttgcgaagggaaaataagagaaggccgctgcaagatttttggtggagtttgggtgcactctcggtgacggagagattttggctttggggggggaggggtgggaagagaaaagagagcgagggaaggtttggttcggcccagagcgcgcagaagggaaggatgacgggacaggaagagctctgaaaaaaaatggaaattatcaatgcgcagcctggctgcctggggtgcaaaactgccaagacctggagtcgccgcaaaggggggatttcgtattctctacgccttgttaggccttgtggaagtgaattgctcttcgttatcgatagcagagtttttccgcaaacaaaagtggggaaggatttttaggacagataaaggtccagagcgaatcagcaagaacgaaggaggtcatgcgtgccaattaagacatcctgagtgaataaaagaggcgacaatggccgccggttgcaacaaccgaacggttcaatgtttgcctctcaccctcttctagttgttacggtctaattgcatatctaggctgggcaagtgaacatgaactaagccaagaatggcctaatcagggcgagcttgtcttgaattaacttctccactcgaccccagatctcggatcttatcaatctcgaaagcacagggccacagtcacctcacccgacaagaacaacaccgtgaatagcaagtgtcatgactcgtgatttcctgagacttgcataaggatgctgaggcctcctcgtgatggatggtggtcatggaggagggatgtcagagtaacaacagcagccaacagagtgagtggcaaattaaagagttgtcctctccatgattggacaacctaaagcaaactcaagcgcctctctcccactcttctctccaacttgtatcaccactcacagagctccatgcatcacgaggctgcgtgttatcatgcaagctcgaacagctgcagcttaaaacaacggcagcacgtgcgcggatgccgcaacacgcaccttgatcgcaaattttgtacccgaaatgaatgttgcatacagctgcttgaagctatactatcatggcccttttcagtcttcatatgccctcacatagacactaaacccaggtcctcaaaggtcctcccacccctcatcatcatactgctcaccagtagaaagatccctcatcagcaccaactcaacatcaacctccccaggctccctcttatccaaaaacttcaatgcctccacagccttgcctccgcatgccctctccagtgccaagaaggcaaagtgccccccaaccaccggtctcgccatgaaccaaatccccgggaaccctccattgccctctgtatcatacaagtccgtaaaaggacgatctaacaccacgttagcaaatacaccatcacatgcagtggaaagaggagaagaacctaccagtctcagtctcattcacccacctggccacactcgtcagaatctccgtcctcgtcttccgtcccgtcaccgccgccgcaaaaaactcccagtcactcttcgtatacaagtgcctcgaatccaacggcagcccatacttttgcagaaccgcatgataccaatcgctctgcatctggtagaccttgtcagggataaagacgttcccatctttttcagaccggtaagcctgttgtccaagtggtatctgactttccatcctcggctgcttcccactctttctccctcctgtcaccgaagatttgttcttgtccgaaacatggaaacacaacagcgagtccgcatacaggttgtaaatagtcgtccacgatccataccaagtgtacgccagcttggcatgggtcccatccctcgagatgccatactcctgccacttctcaatatactcccccgccgtctcccgataaaactttgcatcctccttttcgcccacaatatccgcaatctcgctcatggctttaatcccaataatccccttcagcgccaagttcgtctggttcgccaaccaccccgcaaagtcatccgtgcaaagctgattatgcggaataagcgactccctgaccaagtaaccctgtccactgcttccaaagcttgtaagaccgcgacaaccacttctccgccgccttgggcgtagagccaagcttagcctcccctctgggtaaatcaatcccatactcatccacactctcccaccacctcttcgctcccggagccgtcctcatcccctccgccccctttggcctcacaaacgcaggatcagtatcatacctcagcgcattcgccaacgccaaccccataatcaacatattcccacactcctccacaggcatatactcatccctcccatccggatgccccgtcgcgttcggaaaatgcgcccccagatcatgcatcgaatagtcgtttggatactgcccgctcagctggtgctccagcagcggctccagcagatacgccaaccacctcgggttggtatacaggaagaacggaaaggccgggaagatcacatccaccgtctggaaattcccattgctcgaaatctccttcaaaaacaaaatcgggtcctcgggcgtccccgaaaactgcgtcgcccccagcacctgcctcgcgctcagcgcagcaatatcctgatactccctcgacccagactcatacgcatcccgtgccaacgcatccgaatactcccccgccagttttgctgcagtctcaaagtcatcaaaatgccaacccactaattcatccgcatcggtaaaaaaactctgccaaagcggcctcatcatcgtcaaccccctagcactagcaaactgcacaaccggatcctgcaccagcgcccacgtaaacctcacgctctcctcccttttctcacacttttccttccccttccccccatcagccaacttgaacccctttgaaaaagcaaaaaccggctcatcctccatcaccctcctgaactccccatccacctcatccctcagctcccccctctccgcaaacaaccccctcagcaaagcactagtcccactctgatacctcaccccgttctcccctcccggggcagaaaagtgcaaagtcccccactcggcccgatccccaaactcggtcagcagctcctccctctccctcctcaccttccaagtttttattcctgtctttgtcccattttttgtccccttttcttccccgggaggagattcaaacatctcccaccgcaaagtattatccctgttccccgtcacccactccccattcacatccgtgtacaaatccaagtcgtcgcaccccgcaacaaaaacagtcatgtaccccgccggaatggcctgtctcatcgtcgaggagggtgtgataggtgacaggaacgagagcgtaactagtaccgaggattctccacccgccgcggggatggaatagctcaggttggtggtggaagcatcaaacgttacgccgagatactctggatacgcaatcttgtgacgttttgtcgacaaagagtcttgcggccggccgaggagggggtagaccttccccgaggcagaggccatgaccgagaagccgacctacacacccgttggtttagtagcttgtgagggggttgggaaaagggggggaaggacgtacgtgagcaccagtccaaaacattggccagttctcccatggtgcatcacgggcgtggtatacgctccattgccnnnnnnnnnnnnnnnnnnnnnnnnnnnnnnnnnnnnnnnnnnnnnnnnnnnnnnnnnnnnnnnnnnnnnnnnnnnnnnnnnnnnnnnnnnnnnnnnnnnnnnnnnnnnnnnnnnnnnnnnnnnnnnnnnnnnnnnnnnnnnnnnnnnnnngctggaataaaaatcacggaggaggaggataggggtagtcttcaatggcggaaaccagacgggtgccgccaatatgataccaccgggcggcggcccaaaccaactgaaagaaagcgctgcctttgcccgagccctcgggggaaacagagcagcagtaacgactcgagtaccaccaggaatcaaaatacaaaaccgcaaggtcacacagcaaaataatagcaaccatacacatacagagtagaacgcattgcaagaataaaaccaaaccccaaaagcaaaacagggcagcgaatccttaaatacaagctcccaacgcctgtaggatgacgcctgtttcgagatgcccctcttcagatgaacagggagggggggggcgggtcgtccaattaagcaaccggtcatggggcttccacagggatgctgccccattaccccgcaaactccgggacccatgacggggcaagctcccgctgttgcatgaagctgttgtgtgtcatttgtggggtccgttgcaactctcgggtccacgatgagatcagacaatgattgtgctattgacagtgggctatctgtatctgatttcaacagaggcaactcttcccagcaatgtataaggtaagtctcagctggcgtgttctcccaagtatgatgataaaaacacacacaacgcatgcctcccaatatttcctagtaacatgagctaaatgcgctctgttttcctccgcttgctaacccatatgactcctttcccaaaccaacgctggtttggttacattatatacagtggcaggtgacactacagcaaggccaatgtcagaacgacaggaattgaaaaaaaaaaaaaaaccgacaaaagtagcccatgtgatcatggttgatggttcctgatactcgcacaaaatccaatcagctgccacggaacaagaactgcaggtcctccggactcagcgagtccatggcggcatcgtccgagttgatagtcgagttgatcatgttggtcttcttctcttgcagaagcaccatgcggctctctaccgaatcttcgatgcacagtctcgtgatcgtgcagggtcgcgtctgcccgatgcggtggcatctatcggcgctctgccactcactgtgatacaacagattagcgggtgccatgtgacaagctcaatgataacgaaacagaatacttacgctgcgggattccaccagggatcgacgataaagacgcgagacgcctctgtcaagttgagcgctacaccaccagccttgagcgagacgaggaagcattccacatccggattggtcatgaaatgatgaatcgaagcctgtctctgagcaggtgtcatgctaccatcaagcatcacagtggtgatacccgcacggcggagacgccactcgatgagctgaagcatggttgtaaactgtgaaaatatgatcgacttgtgagaggcattgtccgagcgcagcttgtggagctcgtggaccaaaagctcaatcttggacgaggacgtccaattctccatcttgatccggttgatgatcgaggacttcttgaccatggtctcgtcctgctcaatctcgggctgctcaagatcaatcgagaggggaatgtggcattgtgggcagttgggctcctctgccgaattcaggtaactcttgacacatgtgcggcagaagtcatgcttgcacctagatcggatggcatcctccgcagtctcgtcgcatatggcgcacacgatgacgttttggccgccctcgctgtgcttcttcaggagcaaatccgggtgatcagcgacctggcgcatctgcatgatcaagccgaagatattggcgtagttgttgaggagaacaccggtggccacataggtatcgaatttgcgttgaccgttggtcatgatcgagtttgcgaaatcgttctcagcttcgccgaaaaactgacgttcaacattgatctccttcacaggcagctccatcgagtcggtgtggtcctttttgagccgacggagcatgattcgatccgtcaggacgcgcaacttcttgaaggcctcggcgccctctccacgattcccgtacttttggatcgggttgagcagctcctggttgaagaccgaaacatgctgcatgcctccatgcttgcactcggtgcagcgactgtcctcgtccatagaccattccattgtcttacagggacagtacttgcataaatagcatgcgaatggacggacattgaggaaacgaatcaaggagaaaaactcgccaatgcgattttgcagaggagtcccggacaagcaccatcggtatgtgaccttgagggcgaagcacgccttggctgtcatcgtggttctcgtcttgatggagtgagcctcgtcaagaatgatgcggtgaaactcggtctggtggatgacagacttctccttgacaagacctccttggcgcttaaatcccttttcttgcttgcggaagaccgactccaagctgttgtaggacatgatgatgacatgatacttcttaatatctttcaccttgatgttcttggacttggcgtttgtgccgtgatagacaagcgtcttcagtgtgccgtcggtataggattcaatctcagtcatccattgcatcagagcaaccggagggacgagcaccagtgtcggctttggctgcgggaagtcggacatgatgagggaaacggcctggattgttttgccaaggcccatctcgtcacccagaaggccccccttccactcggtcttttccatcgcctgcatccaagccaatccctcaagctggaaaggcttcagctggcgagaaatggacgttggctgcgccgcctttccagcctttaaaatgggcatattcttcagatcctcccacattgtcgtgagctcggggtgatttttctcaagacgacgacgatcattcctaacacgtcgagaattcgcataagatctgtaagcgcgtcgattggccatggctgtgcgaatagccgaattgctcctattagttggggctccagcggtgctgccaacttcagacgcgatgttgctgccatcgtcgtcgctaacatcgtcggcggtgccatcaaagtcgtcttcagagatctcgctctcacctgcagccacgttgagatcgtggttcctgattggaccggttggtggtcttgctgctcgcgtcttgatcaacggaagagagtcatcgctgtcgacctcttcaaagtcgtcatcatcctcgtcgtcgtcgtcatcctctgaatctgaaacgatggcgggtctcttaacacccactcgcgtctttgatgtttgtggaagagacacttcctcgttcttcttaccataacggcgaacgggtgcacgtgcacgtggagaagtgaacatggcctcggtcttgtccttagttagaccggctcgccgagatcggggtttagcctttgtttggagagaggggatcgcgaaattggcagcagcagcgtcttcctccttctgcaacctccgcgcaagctcagcatctggggaatagtccgagagctcttcctcactgtcctcgatgacatttctcttgcgcttgggtgcgacagagtatgggtcgtcttcggggacctttgaaggtctagcacgggctctccgagtggtaagtaccacttcgatcctcttccctggaacagtcaagggggcctcggtaggtactggcgtcgcaacattgctagtaagcggcgtcgaatattcacttgccgaggagtaggcttggggggtcggcgaagcagatgattctgtgctcagagccagctttttggctgggggtttgcctctttgcttgaccgaggggactgagtcgggctgaggggacgccgctgaatatgactgttagtagaggattccggggtcgcttaggggtcttcaagattggagccatctttgccattacggcatagaattgtcacttggatgtaattgttgtttacttaccaacaatctcgccggctgcgagcgacctcctcgtctgtaccatcttgaagtaccaatgttgatccgaaggtggaggtgtatttccgacgaaagagggtacggttttgtgggttgtaggatttttgatgtccgcaagagagagatttcacaagaaaacaatagcggcttgatactcaaaatttgtcagaagaaatcggttgagttgtgcagatgaataggtagggagcgggttgtcaatcaagcccctgatcagcgagcttggaaagtgctcccaccacggtgatctggggatcagagtaaaatggtgtgcacgcagtctgcgccgaggaaagggaggaaagggccaccaagcaacaaaaagtccacgggcgataattggtcaatgaaaacctcgtgggacaatggaggcagtgagaaagaaatttattgtcgtcgccaccttcaggaggtgaaagggctgcgctgtgcaagctagaggcgggaaagctgagagagcagcgccaggtgcccaggtaggggttcaggttcgcgtttccatctgacacgaaagcacatgacctaggccttgattgatttgctggagctttgctttttctccacgcagtccaggcagcaagaggcaaaccaggcaaggaacggcaggaacgggacgagcaagttgcccttcttggtttgactttttgtctcgcacggtccactcgccccttgctgctctccttttggagttcagctccagccttggaatcaaagtcaggtgctttggcgtcaacaatgggggcgagttttaaattgattttgcccctcttcgcgtctgtcactgcatgtcgctttattcccaatttttaccctggggcgatctaaactccaggctgtcaggtcgacattcatccatcttgttatagcttccctcccaaacagtcgcaggcaaagcttcgagatagccaatatgtgagtattgcctatcttatctcgcgccgtcttgagatcaacacattctaacatgagagaaaggtcccgacagactcggacggttgggtgccgtattatgggcccgttagtattttttggtcttgtaaacggcgcttgcaaaggtcatgttagctgacagatatccggtgcagacaatcggccttgacggactttttggctgtaagtggtcgcccctgacatcttgagccccaatacaggacagatcaaaccaactaactgccaacagtcgcataacatttcggcaaaccaaattagacttgatgctgaggctcgtcgtagagcggctgcccaggacaaccaagaaggtcaagctgatgctgctcaacaacaactcttgaatgagaatggcgatttcgacaccccgtcaccgggatctgacgaggacgagcccgttgtggcatctaccggtcgagtaacaagaggaagaagcgcagcccaggtaacctctgaagtcgagaggcgcaaaaaagagaaggaaaaacacgctattgataagatcaaggccagcaagaagttccagaaacgtaagcgcgatcctgacgcttcagatgacgacgacgacgacattgtccgcgcgcttttcaacgagcgtgcgaagcctctaccgggccagatggagaactgtgccatctgcaacacacggtttacggtaacaccgtactcccgcaatgcccctgacggaggcttggtctgttcaccctgtggaaaggagcttgctaaggatgatcctgctcccaagaagaagaccaagcgtgccagcggaggaccagtgggcgcacgtcgccaaacccagagcaggattttggatggaacataccacgtcggcggcaagagcctgatgtctttgtgcattcagactttggcaaagaacattgatcttgccgaggatttgggtgacttgccacccaaaattgtagacaagattgctcgaaagctttccaagcaccgtcttctcaaccccacgacactcagcctgttcttgaaaccaagcaaccaggaagtgctcgtatatgacggcgccaagctcagtgcggacgacttctatcgcatcttccattcggtcccggaactcaagaaactcaaagttcgcaacgccatccacttcaaggacgaagtggtagagtatctcgtcgaccgccatatcgtccttgaagatttgtatcttcacgggtgcaatctcatctccgaagggaaatggatcgagtatcttcaaaagaagggtcagcccctgcgatcacttcgggtatactggacagacaagcattttacggatgctgttcttgcagttatccccactagctgtcccaacctcacccgcctcaaagtctgccacaaccaagcagtcaccggtgaaggcctgaaccacatcgccaaaattgccactctccgccatctgtccctcgacttgcgcgaggcaatccacccggatgtatacgtcaaactcttgaccgccatcggaccccagctcgaaacactgtgcttgaccagagtccccgagctagacaacacagtcctcgacgccctccacatgcactgtcgcaatctgaagaagctccgcatcaccgacagtgagctcatgaccgacgccggatttgcccgcctcttcacctcaacctggtccaaccccggtctagtcttcctcgacctccagaaatgccgccaactcgaatcaacgaaacctcgcgagaaccccgacggtatcggcctttgcgatgaagggttcaaggccctgatggcgcactcgggcaagacgctccagaatctgaatgttcatggttgtcgtcacatttccagcaatgcgtttgaggaggtgttcacggcggataaaacgtatgagaatatgcacaagatggagatttcgttttgcgaggaggtgacagattttgtggtggggtgtatcttccggagctgtcctaatctgagagagctgaatgtgtttgggtgtatgaaggtgaaggatgtgagggtgccgaaggggaagattttggttggggtgccgaatgcgagggggatggttatcgagggtgaggattgaggcggttggttgggcgtttttgcgggtttatcatttggagggccaggatgttggagtcttgtcgtgctnnnnnnnnnnnnnnnnnnnnnnnnnnnnnnnnnnnnnnnnnnnnnnnnnnnnnnnnnnnnnnnnnnnnnnnnnnnnnnnnnnnnnnnnnnnnnnnnnnnnnnnnnnnnnnnnnnnnnnnnnnnnnnnnnnnnnnnnnnnnnnnnnnnnnnctgccttggccgccagccacggggacgtggaggaggtagatcgaccgttgagttgggccgcgaggtacgtacccggccgggtttaaagatatggggaccaggtctagggataaaacgggaggggcggcgctctcgtcggtctggggaaggtctggggtctactgctggggagggagggcgttcacctcttttttttttttttggctgggaaggaaaggtggaagataacatggtattatacatagattaattaatacgatggttttaattctaggaacgtcatggttgtgtgacggtgagggtggtgtattttacgttgctactcttgaattctgttaccttgttgagtgtagtctgaatgtcatctacaaggtcaggttgtccatgttttgaggggttggtgatggggctcgggttgaacaggagggggatgtgttgttgctcgttgttgttctcctcgtcaacaaggggggctttgacgtccatcatcaccttcacatgctggccattgattcgagattctagatcgtttgctccgatgtaggacgtgaaaagaagaagatatcatgccattttcacatgtatgatgatgagtggttgaccgaagcaggatgtaatgatgatgatgttggagctgggcgtttactccgtaatccaatcccacgtgtaattcacatgtttcgaacccttcagctgttgtttactgtctctctctctctccctctctctctctctcccgcccctcaccggctattgaagtcttgtgctcttcgactgtaattgttcatgattccctccgattctgatacttcccttcttccgaactattctcttcctctcggttatacagtcgtgttcttcatgattgttcaatacttccctcagatctcgtcatcgagagtggtggttcgtcacctttacccgaaatctactgagtcataaatatgtgactctttacagggtatccgctgtgaagccttacatgctttacatgtgaagggattccgcacctcccatctgtaagactttaccgagcgaggtaaccaaaccggtaaatatcccccctctccctcgggtacatggtatttcacacacatcccacatctttccccatcccgagtagtacccggagtagatggatggtggataggctggccttcaacagccatcacccctgaatgaaccccaactttttcaacccacacttcccccgccaagctccacatctttttcccgtggggaattgaatgaatgtttatccatgacacgaaccccctccacatatcccatcagagccgcaacttgtccagacccgggaagacccagccaccaccccgcttgagtcacgagctttttcttcggcctcgattctcgggagtgtcttttttccaattggaggctttgggggagttcagcatacccggagttttgccacgggtttttggatattcggggtttgtgcgtgtgtgtggtggttggctggctggccggccgagcacaccgaggaagaccccaatcactcaccgggccgagggagtgcccccagggcaaagcacccccccccctcccccgcgtggcttgctgatgacagtcaccatcacaaaacacggggatggtacccttgctggccattctcatcccatgttctgttccgatgagaaagctgggggagttgaagccttcaccatcccacgttccacgccttgttcctttttccgatttttctgaccaagcaaaaaaaaaaaaaaaaaaaaaaaaaaagatctggggcacagccaaaccgtggggatcgttgcgcaaatccgaaagaggggccagcaggcggtgaagctcgtccgaagcttctcaccggattctgtggcggccatggcagtggtggagtccgaaccccagctgaccgtggtgaaccctacctcttgaccgggggcgagatcaaccttgttgattttgcggggtgtcacggagagcccacgagcctcaccacgtctgaagatctagcaaaacggtgctcgctccgttgtcggaacttttgatgcgggaatgcttgcttgcatttctgattgttcgtctgtcacctgcatgttgcctttatgtgcttccggtatcccccgcaaaatccaactttgggacgaaaattgggaatttggagggggggatcggaggtgctccgggtggtacccgaccaagatccggaccaacaccggtctttgacggaacatgtggtggtgtggggccgcttgccggcacggcacctcacggacctccagcgtgttcttgaccgaaagttgcaggtttggggcccaaagctgccgctcagcaggacctttcaaggctagctcggaaataccacgcttggactcctgtagacgatgccgatctgcttgagaattggtgatgcattcgtggcattgaaaaactcgaggaaacgaacagggcgaggttgctgggccgcagacgggaagggcggagatcagacaatcctcgtcaaatcgagaaggtaacccaaggggcacactgttggggttttccgaatccatttccccaaccctcttttttcactctttgtggtcaattttgagaaggaagtcacgcggacgtcagcaggttgcatgccttgtacggagtaccttggacagcctcacggcccaatcccacctcatccgcttgttccgtatctacaatagtttgttatgtaattctagaccaaagtgacagcactcagaagcgtgaaaagagttcagacgaaaagcagcatgccattggggtcgtctgtttgagagcggtggaggccggcggcacatctgacatcagacgcgaagctgtccctgtttcaccaagggcaggcttctcgaagtcgtttggacgacatggaggacatccctgcgatggcgtcgggagaagtcggagggaaaacctgcaccatccatgcagcccgcaaactgcatgctcgtgccttccccgggcctgcccctgagactccatcgccccaccggccggtccccccttcagacgatttgcgatggacccacccacaccccaccgcagctccaccgggtcccattgacggctgtgacagtgtgggaatctgcagaaccggagtagcggtacctctcgaccgtttgagattgaaattccccttttccgctttctcggtaaaatctctgctatctcgcagaactcgcagtggttgtatatatcggcgccattttgcgacaattcggaacccgacatatatgccacgatagcgaattccccggcagcaccggttttcttgtacacaatgccgctggagccggtgtgtaacaccagcaactgatcaccgaacgcgtgcctctcgctggacttattaggtaattctgcaaggagtggcagaggtcacgggttgtcgctgagacaagggagactgtgtattttacagatgagaggccgacaaccgatcccgacttggctgccggccagcatctcaacttcagccgacggttcgggacgaggccccttagcccaaacaggcaatggcaccccatcatcgacactttgattggtcaggtgctgcgaggttagtggcctgtcgagatgaagctgagaaaacacggaattttcaggactgttttacaatacacgattacatccagctgaaagacacaagcagaacgtcctgctcatcggcgccaacgggtgtccgccatgttttttcactctcatgaaaatgtgattgtgtgctctcaagcaggtctcggcgggctgttgatgaggttcgttctcagattccggccattcccatagctgcaggagtgaccaccttcgatgtgacggcggtacttggtttggctcacatggcgcaggaggtacttttttttatttttacggatcgagaggtctgggtctgacacaccctggccaaccaaccactcagcaaccagcctgtgacgtcgcgcgcaacggtgcggcggtcaattcatttttgatatttttttttcgttctcttcccaacgagaatcaagcccagggcccaacaaattggtgcaaaaaaaataacgggatattcgggagcgattgtgattaacgcccaatatgcgtttccatggattccgcgccgtgtcgggagcccattccggtccttgttgaagtggttgaacctctggggtgtgattgtcggtgactcctgctttcggtgtcgcccggccgtgtaagtggaaaccctgaccgctacgggaactcgtaccggtaccggcacccctgatgacaggggatcgtgacttctttttttctttccctagtatcccacccatcgaggcccaacgtgcgagcgtgcccagagagaggtcgtagcccttgaaacgtgcaacgaaacctccagacaggcctccgtcgcatcaagtagtaaggtgtagcaggcgatggagctgctgctggcttctgcttcgcgccgccgtggtcttgcaaaaaggtcttaaagaggaggcttgccgtcgccaacaagcattgttgttgctgttgttggcaagacactccaacaaccatcactactgttgaccgaaaaggctctggtggcccaatcgattacacgccctagcggtagtttcagtcgccgtaatactacttctaataatacgcccgctggtcgctcaaccctcgacgcactagactcacgccgcaggggaccctcccgttcctgttcctcctcctcttcgaagacttcttttgttctcccgactcccacacatccttccccctcgtcactcgcacatgcaatggcttcgtatgctcccagcgcctcttcatccgatatctcaacgcctcggtcaacatccccctcatcgtcctcagtagcgtcggcccggtcctcgcactcatctatatctacctctaagcgcatgtccatctcgtcttcgcgcagaatatccgccgccaacccaatgtcgtctgttgacatcgctgccattgaagaagccatgagaatggccaacctcgacaccctccggggttaccagcaaaagacctacggcgaggtcaagcagttcgccgagacgcagtacctctcccagaaccaggctcttggttaccaggtcatcaacgagcccatgtggaataagggtgagtcaacattcttttctctcttctctttgcgcgtcattccgtttagcaggggaagcggtgccagagcttaaatcttgcaccgtgtccgagcagacctgctcccgaacctgtccggaccatctgactcgaataccggctccccccccctccccactacccctccctctctctaaagcatcatattcccctacctcctctcctcccggtctattctttctgaaccttgatgagcctttgcctccatcaatgacctcccgcatcctcccttcgttgcgcaccatggcagctaacatcacgtccctccgtcaaggcctctcttttaccccagagcagcgcatcgccaagaacctcaccggtcttatcccacacgtcatggaggactcgggcaagcagtgcgagcgtgcgctcaagatgatccggactcgccagaccaacattgaccgctatctctatctgtcgtcgctcaagtaccagaacgccgacctcttttaccgcctgctcatcgacaatgcgaaggagctcatgcctctggtgtacactcccaccattggtgacgtgtgtcttcagtattctactctctacacccgccccgaggcgctctacatctccatcaagcagcgcaagtcgataaagacgatcctcaagaactggccatatccaaatcccgagatctgcgtcgtgacagatgggtctcgcatcctgggcctgggcgatctgggcgtcaatggcgttggcattccggtaagtcacgtcggcaaaagctgtggacggacgcagcggggtcccggtgggctggttggctaatttacatgcatcagatcggcaagctagccctgtacacggcggcggcgggtatccacccggataagacgctccccatcgttctcgactgcggaacggccaacgagaccaacctcaaggatccactgtacctgggcctgcgctcgaagcggccctcggtggccgagcagcaggagtttatggacgagttcatgactgccgctgccgaggtctatcctgaaatggtggtgcagtttgaggatttcgagtcggaaaaggccttcaactacctggaccggtatcggaacaagtacaagtgcttcaatgacgacatccagggcactggcgctgttgttctcggagggtaagttttggcctcgccgaaggatccgcaatttttgctattgctaacctgttttgcagctacattggtgccgtgaatctttccggcgttcctctcgaggagcagcgcctcgtcttcatgggtgctggctctgccggtgtcggtgtcgccaagcagcttgtagagtactacaccaagcgtggtctctccgagcaggcggccaaggacaagttctggcttgtcgacaccaagggcctcgtaaccaaggaccgcggtgacaagctcgccgagcacaagaagtactttgctcgcggcgacaacaacggcctccagttcaagtcacttgaggaggttatcgagtacgtcaagccaaccgctcttgttggcttgactgccacctttggcgtcttcaccgagtctgtcgtccgcgccctcaaggcttctgtggacgccggtggtctcggccgcagacccattctcttccctctcagcaaccccctcaccaaggccgagtgcactttcgagcaggccgtcacctggactgatggcaccgtcatctttgcctctggctctcccttttctcagttcaccatcaagctcggcagcgaccaggccatcacctactaccccaaccagggcaacaacgtctatgtcttccctggcatcggcctcggcgccatcctcgccaaggccacccgtgtcaccgacaacatgatctacacctctgctgctgcccttgccgggtccctgaacgccgaggaggtgcacaagggtctgatctaccctcgcattgagcgcgtgcgtgatgccagcgtgattgttgcccgcgaggtgatgaaggctgcgcgtcgggatggtgtgagtgccctgcccgaggagcaatggcttacctgggaggagtggggtgacccggctcttgataagtatatcaaggagcatatttatgaccctgctctttaagtgtttgtttttcggggaggggcgggtattgaaattgggagtctataatgactggatgaagctgggttgggagagagggaggggggggggagtgcattactggcgttgtttactttcagggaaggacttagcttagcctttttttttcttttctgttttctttgcttttgcttgccccttggtatgagcattgcggggattataatgggcttcttttttgcggttatctctttttctaatgaatgatatcccaacgaagagttgaggagaccaagtttcacacacacaagatttggtttttggatggactacaatggatggcagagtgcatggaaaacgggaggtttctgaggcaagacaagacaagacaagattacagttgttggatgtggcggtgtcaagtgagcgtgcaagcgcggaatagataaaaagagggaggaatccaaatacatatactacttgttagaatgagaatgaaatgggggagagcggtttgtgtcgagattgttgatgcttgataggagaggtgaaggttgaatgaatgatttggtgtgcagttgttgttagcatgtgatgtgttgttgctgttgtgtgtctgattggtgaacctataaccatcaccgcagtacccctttataacacctgagtgctgtccaccctctcacgtcaacattctcataaatctctctctctcacaacaccatcccatcccatggttaaaccgcccccaaagtccccaacctccccccaaagttacnnnnnnnnnnnnnnnnnnnnnnnnnnnnnnnnnnnnnnnnnnnnnnnnnnnnnnnnnnnnnnnnnnnnnnnnnnnnnnnnnnnnnnnnnnnnnnnnnnnnnnnnnnnnnnnnnnnnnnnnnnnnnnnnnnnnnnnnnnnnnnnnnnnnnngaatgcaatatgcggcagtgcacacccccaatctcgcgagtcagcagtgctgagaggtcccgtgtatgaccgaatgaggagacgggaaagtggccttccggcggccgtgggcggaatgaagatgggaggagaggcggcggacttcttgtgtgaagtaggcaagtgagtcgttcccgggttaggagggggggttagatcgtaagagagggggggttgtcatcggaggaggaaggggggtggtggtggtggtggttgtcgtcgtatgctgttgttgaagacaatgtggtaaatttgaatattgtggtggctgtggtgggtggtcatttttaatgatacgccgaacgctggtggtgtgagatggatggttgaaatgtagagatatgctgctggaagaaaaggatggatgatgtgttggtaggatatggttgtgtgacaaactcctccctcgacttcgagacctccttgtcttatactcccacaaatgtctcgctacacaaccacctccccgccaaaacctccccggcttcaaccccccttactcacacgaaaactactcacatccgactagacacatgcagacaaaaggtgaccacttacacgcatctagccgcatcccccccccatgcttgcacatcctgcgttgcacacacccaatcaaatctcactcccacccaccctcttcccaaccttgttttgtctgattgggaccaaaaaaaaacgctgtcttgctcaagggtccgtacataaactgtggctaccgaccaaagtcaatcactatcatacatgcatacaaactttgctggttttgttttttttgcctgttgatctctccgtcttcctcggaggtacccataatcatgaaaaataactccccgtgaaccatgattcctcaatgtccattaccactcccgccctcccccccttaaaaaaaacaaaacagatgcatattcccctccctccatagaataagtccagactccacaaacataacccccccaaaacccaacccctcaactcaacgagaactcctacttagcctccctcatcttcctatccgccctctccaccctccccctagcacccgaatccaaactcctccaccaccccctcaaaccagtcatataccccctataaccctcccaaccctccaccggcgcccccttaacctgcggcgccccctcatcagcatcaaacaccgcccagctcgactcctcccccgacctcagcccaaaccccttcttgctaatcgacttgacctgcagcctctgcagcaaaaccgcatcccccaccctgacaacaggcagtgactccttgtgcggtcggtacagctgcacctccacaacactacccggcgcgatcgacgggtcggtaatgtgaaacgacatgacgtattccctcggtcccttcttggcgcggacaggcgtggtgggttcagaggtgacaatcgcggcgacgacggggtgctcgtccacgtggtatttcagtgaggtcaagttgatgcagtcggggaattcctggcggaggcgcttggtcaggtcggccttcaaggcggcggtgctggtgttgttgtcgtcgaccagaggggaagctgacttggttttggacggagaattcagcgcatcctttgcgaggccgacgctgacatctcccttggatggcgaggccagcgcgcctctcgccaataaaacgctgagatcccggttggagggcaagttaaaagaccccttgggctcttcctcggcgtcctggttgctcgactgtaagctgttcgaccgcctcctcgcaagtcgcgggctaattcgtgttggctgcggctcctgtggctgtggctgccctctcttgctccgtcgcgctgctaccgactgctgggcgagcttgacgctcacatctggcgaggaggatgatgacgctgccatttcgggttgcggtgacatgtgctcttgagaggatggcgtctggaccgtgatttcttcctcggcgctcttacaaacagctctggtttgcgtgggcggctcggaaagctctaattgtgcgctcttgcctctgactgcctttttcttgttcttattccgtttgcttgcacgcgtcgctgcagccttccgaacaggcgcactcgggactgacgcgacttcttccgcatcagactcgcccgcgttgaagcttaaatctggcgagccagcactgttgttcttgcctggctgctctagaacaacacccacgtcagcctgctgggtttcttgttcctcctcggcatcgtgatcctcaggctccgcttgcaccatgctctgcagaggggttgggggcagctctgtctcccgcattgcttcctgaaacccttgggcaaatggcgacagtttcttctgagatgcaaaagagttggtgagaggaggcgaggcagggacttcttttcccattgcttcattgttggctggtgcagttgcaccctcgaccggctccagagacaccactgctggcttctcctcgtcgacaacaggcaccgggacttctccctctgcctccttaacaggctccagatgaacttcctcgacagcatccgtgtcctcttgctgctgtgtgtcctccaacacctcttcctgtgcttcctcagtcgcttcctgctccatagcagcatcctctacaagaatctcagttgtcacctccatgataacagtctcctcaacaacctcctcaaccacctcggtaatgatcatgctagactcgacctctgctcgtggcgtctctgcttccataggcgactcgaaatgcggcgttcccgcatcaagcatatccacatcgacgtcatcgtcaaccaccgacatgggttcggccgtgctggctttttcgtggtcgtcttcgacatccatctcgtcgtcatcggcctcgacttgactcgcaagtgacatcttgtcatctgccgactcggacgccatacgctggttagcctgctcttgttcgagttgttccagtaccatgtcgtcatagaaatcctcgagttctctgtcgaagtccccggggggcacatcgtcagccatgtcaatttcgtcattctcatcttccgaagggatataatcagcatcgtgttcatgctcggattcattatcaacgtcgaattggccggccgactcggcagcagtgacatctggccgctcaagttccgatttggctgcggcatctgactggtcgacctttggttcaaccccctcagcttcgtttgtagcagtagcagccggctcttcggcctcagattccttatcttccgactctgaagcggcagccttctcgggagaggcggccaccggttcagcctcggatgccttatcctccgactctgaaacagcagcaaccttgggcggttcaatctcaagttcagactcggaaccagacacctcatccgtgtcttcaggtgccgacatgacaaaggaatcttccttgtcggcatgctcatcagcgggtgcgcgtgcttgctcgtcgtgcccatcagcttggtgaacagcaaagtcaaccacatgggtctggccaccagcaaccgcaggggcctcgtcttcggcctcgttggctgcttccttgggcttcgaaacctcacccttgagcgctgtagcctcatgctcgtcatccgaagcctcatctctggctgaagccccatcccttggttgtggcgcttcacctccacggcccgaggtttcctcttcaggctcttcatcttcgtcggaagcctcttccgccgtgtggtcttcagcttcgtcttcatcttcatcttcatctccaacagaagcttcctccaccttgaggtctccaacttcgtcttcagatgctgattcatacatcactccagcccctccaacctccgagacctcctcttcagcatccggcatctcctcctcagaatcatagacatcctcctcaagctcccgatcctcctcctcagatcccacctcgtcctcttcagagtccttagctgcttcagatgccttagcttcctcagattcctcaacctcctcagaaagacccggatcaacctgatcagaaccaatccccgggctcttacgagtctcctgcgtcggttcagcagccggaggtgccttgggcgcaggcataggcacgtcatcatcctcagagtccgaaagcaagctaatcaccatcggccccttcggattcgcctgtggcagcaccctcccagtataaactggcttagccgccggagcctcctcataatcatcatactcatccccctcctcctcatcatcatactcctcttcatcgtcctcctcctggtcctcagacaaatcattgaatcccttaaactccgactcatccaacaccccagcatcaccataccgatcaacaatctcctgatgaacctcctcttcctgctcagatagaccctcatcatcatccgagggctcaacgtagtttcgctggtcgtaatcgccttcttcgatgggctcaccatacgcgtactcatcttggacggcatcctgatcctcctcatcgtctacaccaacggcgtcttcctcaagtgagtcatcaccctctccatagccacgagcttcctgagtagcaagtccaccatccgcaaactggccttgcaacccgccattcccatagctagcaaacccatccggcaatgcgttaggagtaacatgagcagcgtggagagccgcatcgccaggaggcatccgggtgccctcctccagagcgtcatcaccaaagtggccgccctcggtttggttatagcgcggggactctgtagtaaccgtccactgattgttatcaaagttctccgccatggggggctgttgaatgggcagatcttgagtgtcggccgacgcaaaatagttgttgatatgcacatcagacggcgcgtcatcaagatacgaatcaggatatgcctcgttcttatcaaagccagtggccccatggaaatgttgatcgtgagcatccggagggggtgcggtatgtggaatgtgagaaaaccgcgaatctaacttggtctgctatgcttgaaggtgattggatccgggcgggcgggccagtgccaaacatggagaaaccaggagtcttgggggtgccaaaaagtgagctactagcaaacgtatccgtagcaggcttttgggcggtatcaagtttgggcatgtccgtgttggcattggcagccgggggaccggatcggctttcagtgggctttccagaagcctggtcatgttggggggtagcagggggcaattctggcattgtgagagctggctgctcctgagcaacaggtgaccttttctcctgctgcgctcgggcaagcctgggatgctcctcggaagccggagacttctgtgcctgctgcgcatgagcaagcgctgcttggctaagcacgtccatggcgctctctgtacgcactgggggtgtctgcactggctttgtccgtaccggctccgtctccatcggctccgtttgcgctgcctcgacccgtgttgactcgggctgtactggctctgtttgcaccggttcagtttgcaccgcctcgtccgtgggctcggtcatttcaatatcgactgtctggactccctcatccagcattaccttttgtggcgaaagctgcggggacgttttctcggtcacatcttcgtccatagactcctcagccggtgactgaggttcagggctaggtgactggctggtatagcgccacgcactgctgtcgcggccaaaccgagttcgtttgcgacccttgcccttgactcctccgtcttcctcgaaagggtcaaacccatcctcgaacagcgcaccgtacgacagtcgctgccgtttgatgagtgctggggatgcatattcgttctcggcaacttcgaaaaatttgcggattgtagggacgtgttcgggtggttcttcgggctcaggtgtcgacagtcgaggtgctgtcgcaagcggagccgggggtcgaggcgaggcctcggtctcgagttcgggatggtcgatgttcaagtgtctgagctggtttgtttcgccagattttatctatagaaagctgttagatgggttgtgaatcggcgagcaagcgtcatgaccgcacctgcaagacaaacttctcgtcgaactgcaattgccattccactctggagccagggatgccgcctggcgatgtgtcctttgtccatgttacttcctctagagagaagagtagctcatcaccggctcctagaccacattttgaaagaatccttgcgctgggaccatggagctcgatgcgaacttgacctcgagcacgacgcagtcgtacatcgggctctgccagcaagaaagcaaaggtctcggtgaccgagttgtagggccaggtaatgccaacttcgcctcgcacggttcgcgatggttgatctggcaaatcggggccaagctgggcaatgggtgttgcgagtttggtcgccaaaagcgcagcgacgtttccgtcttcagccatctccatgttggatagggcgctgtgtcgatgatgtgaacgcggtcgggttcaaattactgagagcgtgtcatttccgggtaagccaggaggtacggggagacatgtaaagaagttacaatgttttggcgacggttgatgaacagaggcaagttgtgcagcctcacaaagctgctcctcttgggttgagttgctctttgggagagctccttcaactttcttgaggttctgtcgcgcgaatgacggcagcgggaaaccagtgacgtttccattggtaggttccaggcttggagaagctttacagtgggtcctgcctgggagcttgcagctgaggcatgctccaccgcctgaaaacggaaggcggtgtcatcttgagagccttggcagtttcgggagcttgggccagcctgtaatttcgtattcgaagcacgtaatcggtgtatgcaatggtaacgacttgatgatcagtcaatgaatgggttcgactgacaaccacctctctttttccctcaagtttgtatactttgttttcaagaatcttttgacgccgaagattccgtctatctatcctatccgacttctgagccacagatcctctccaacatgggcttcgaaacagtattaggccaagcaccattcggtattcacagaatcgcaatcatcggcgctggcccatgcggtcttgctgcggccaagtatttggtggcccaaaaagcctttgaaaagatcgatatctatgagcagcaatcagaagttggaggcgtctggaagtatagcgcaaagccggcggagaaccgtcgtgtgccccaagtgaaccccgaatgcccgccagacccccctttggagcctggagatggcaatgatgataagggaccagtttttccctcgcccatgtacaaactactacacacaaacattccacgaggtttaatgccttttacggactttcctttctcagatgatctcctcatcttcccctctcgcgatgacgtacaggactatctggttcagtactcccaggacataaggcacctcatcagtttctctaccgaggtcaaagatgttcgtctgagaacagatgccaagggaaaggatcagtgggacgtggatgtgttatcgctacgaacgggcgagcttacgaccgcaacatatgatgctgttgttgtcgcatctggtcattattctatcatttatatccccgacatgaaggggatatccgagttcaacagcacacaccccgatataatttctcactccaaatactaccgcactcccgaaccattcaggaacaaaaaggtcatcgtggtgggcaacgctgcctcgggcttggatattgcctcgcaaatcagccaagtctcgcaacaaccattactcttatcggtgcggacaccaaccccagaggccaaccttgaatggaccggggccgaggaagtcccagaaattgaagagtttctcgtggcagacagagctgtccgattcaaagagggcagggttgagaaggacattgatgccatcgtcttcgcaacgggctacctctactccttcccctttctcacctcactacaaccaccgttggtgacggatgggcgtcgagtcagggggctctataaacatctctttcacattgaacacccaacattggtgttcccaggactgcctataaaggtggtaccattccccgtctcacaaagtcaagcagccaccttctcacgggtgtgggcgaacctgctgcccttaccatcagtggatgatatgaaacgttgggaggacgaggaagctgaaaagaaaggttccaagtatcacgtctggccggtgggcgcagattcagagtacatcaactcggtctatgactggatcaccgaagccggcattccaggcaaggagccacctcgatgggacgaggagcagtgctggcagagaaccatccacatgaaggccaaattaaggtttgaattggagggtcgcaaggcaaaaactctcaaagagctcggttttgactatgagccggagcagaaagatgactcggggccgttgttgctttgagacacggccccgccccgaatgtctcactcagcacgccctttctcaaatctaaccggtcgccgattcagtgggaccgggtcagacaccgaagtgcaacgcaaaagccggatggcgattcagaacaccatcaaaataaatatcatcaccatgatcggtagataatagccggaagttagaaagagcatttgggggcgggctctggcatagatattccccgcctctctcatccgacccctgcgaccaaaccccacagtgagttttccgccgaagcggtagccccggaggtgtgcccggcaggggttacaacagcgcgttggggcgctggaagaggcgttcccgatcccgagaaagggacaaagtcgcatcgcattgcttgatctgatgtggctaatcgtggtttatttgtaagcatattatcgattattgaaccagacttggttgaatccttcgtgccttctccaattatcagtctctgataagatttcatcttgctcataaccgttctcatcttctcatcttactgaaccggtagttgttcatcgatcttgttgaactgttgcaatggcgtcgttgtcttatcgtgacgatagccgtcaaggtgctggcggtctaagtgacgacgatgataagccactgcctctcgatttcacccaccactactctgacaccactaaaagccggaatgccagtaagatcaaggcaatctacaagttcttccagatacctggcattctgaacattgctggtggtatgtattctatcatgtctcttcttgtaataatcgtgatactcaactgcaccgccaggtctccccaatgcccagttcttcccctacgacaccttggaggcacaggcagccaaacctgagagatggtctccttcctccgggtcatcaaacccttcagcaccaaaccacatcaccatcccccatgatgattccactcagaaggacctcctccaaaagatcgacctagccaccgccctgcagtacggcatggcccaaggctacccccccctcctcggctggatcagacagttcacccgcgaccacctccaccccggcgtcccctacaaaggtggccccgaagtagtcctcacctgcggctcaactgacgggtttgccaaagccctcaacctcttcgtcaccccctggagaaccactgaccccatctcatcccgtcccggccttctctgcgaaacctacgtctacaccaacatcaccaaccaagccacccccctcggcgtccaaatggtgcccgtcaaaaccgacgaatccgggatggcagtctctggcccaggggggttagaagacgtcctcgcgaactgggacagcagcaaggggaaacgccctcacttgatgtataccgtcaccctaggccacaacccaaccggtatcctcctctcggtcgagcgcaagaaggaaatctacgccatctgcagcaaatatgacgtgataatcatcgaagatgagccctactggtacctccaattccccgaagcgagctctctcgaggccgaatcccgtggcctgcctccccctcctcgctcctccctttccacagtcaccactccatcctccggcttccccttcctcgactccctaaccccatccttcacccccctcgacaccgacggccgtgtcgtccgcctagacaccttctcaaaaacagtagccccaggctgccgtctgggctggataaccgcccaacccgccctcatcgagcgattcgaacgaataaccgaagcgactacccaacaaccctccggcttcgtccaagctctaatctccaaactgttgatctccccccctcccattccctccaccacccaatccatatacatctactaccaccccccccccccctcccaaccatcaccatcccaaccctacccattcctaaactccatctaccccctccccaccccctaccacaacaccatccaaacaatttacacaatcatccaatacccctccctactcataacaaccaccccaacccgctccaactaatagaccctactcaaaaaactaaatttttaccaattttaataccccaaaacacccatttaaatatacttaaacatccacttattttaaaatcatttcttcccccttttaaaatatccattttaaacaccattnnnnnnnnnnnnnnnnnnnnnnnnnnnnnnnnnnnnnnnnnnnnnnnnnnnnnnnnnnnnnnnnnnnnnnnnnnnnnnnnnnnnnnnnnnnnnnnnnnnnnnnnnnnnnnnnnnnnnnnnnnnnnnnnnnnnnnnnnnnnnnnnnnnnnncaggctggcaaccgtccggcttcgtaacctggctctccggcctccgcacccgctaccagacccgcatggcaagaatgtgcaccatcctcgactccggctccgtcctcatcaccacccccccaacccgctcccactcatgggccgtggtgaagaaagtaaagttgtacgacttttcgtggccgagagcgggcatgttcatctggttgaggatgcacttcttttcacatcctttgttccccgttttcaagtctgccttgtcaaccgcgttgatggtctggcttacggggggggactacaaggtcttggtcacgacgggggcaatcttcgctgcgaatgacgagatcaaggagggggaagggtgggagtacttcaggctttgttttgctgccgaggaggaggagaatgtcgagttggctgccgagaggtttgtggagggggtgaaggcgttttgggaggtgagggatcatgaggttatcaagaagctgctggaggaggtgaagagtgacgacgaggtggttggggagcaagaggggttggtgaatctggctgggttcatggggtgttaaagataccagggatagatgttggggaggcaatgtaacaatggtatcgaatttttatgtaaaagaaatacttcctggtgtgataggacagactctatggtttcttctcttccgctttcttttcttcacctctgcccccagtcctatacttggccggaattatcggcggccccaacgccttcctgatctcgtcaaactcggccactccattcttccacttgcccttcttgactctgttcttaccccgcacgtcatactcacccaaaaactcgtccagcatgctgtcaaagtcttgcctggtggtcccctggacagtcgacatggtggacacggccgacacagacgccaagtcgtcctcgtcatagttatactcctcctcgagcttctcaaaccttctatccaagatgttgagctgctctgtccggtatatcgacgaagaagtcatcgagtaggtcgacgggttcgtcaacgcgcccttcctcttcttttgcctcccgccattggtagtggtggtccaaatcgacgattgaatctccgacggcgtagccccccacccaaccgccttctttttcggggccgcggcaccagacttctgatcatccttaaacttcttaaactctcccatccagtcatccgacggtccttcttgatcaccttccctggaagtatcaaccagctccggcacctgatcctcctcttgactccgctgctgcttcttctgcgccggcccagccttgaccgtacaatccgactcccacccctcatcctcatcctcatcctcctcccaaacatccctcaactcatccagctcctccgcatccccctccaccagccccttcagcacatcctcccccccttcctcatccacatacgcctcatcctccaacgcctccaaaacctccctcaacctcgggtccatatccggctgaaaccccgcaatagaatcaggaacatcctgctgagcctgatacgtcaacctctgcaaattcttgctcggcaatatctcctcatccaacaacccctcgctcttgtgctccaagtccatctttgccagcgcctccgacaagttcatcttttgttttcccttggacttttgcaaggagggcgcctcgacaaagacggcctccccggcgccggtgccgaggtcgcggaggtgctgcatgtagtcgtactcggtgtcatcgtagtagacgccgtagttggcggcctcgccctcgttgtcgcggatcgaggcggcgtcggagccgagttccgaggcgaggtcgcttaggcctttggattttgaatttttggagggcgcgctgggggcgaggaccatggaaggggctgtgtcatcgtggatgagggggtcgttctgggggcggtagacgagcgtgaagtgggtggctgtttttttgtcgctgttcagatgtgagtatgacttcgaggtgaggggaggttgttatctgaggggagtagacttacatccactttcctttgcccatttttggctggtttggtcaagcagttgcgcttgacggacagaggttggtttggttaggggcaagttctctacgttcagctgatggatgagggcaggaaatggaattctcgaatcaagagcccaaaaaagctgtcaaggtggaatttgttatcagagtgcagcaccaccaccacaccaaaccatgcacgcggcagagcaaaggaaaattttggtggggtagaatacgtttatcttatcaaagattttgcgggaggggtacttttgagccaacacttgttcatagagactattcactgcatcgagcctgaagagcaacaccaagctggaattgtttggattaactgctggaagtgatagaacaatgactttagagaagaattcatccctcaaaaagtgcccagagagctttacgtaacccgaaggcggccagagaccgccacacacagtcatacctaggataggcactaggtaccccagcaccatctctgtccgtcagcgcaaatttgcccctccatttatcagcaattccatcaataaaccaccaccccgcccaactttgcgacggacgttgttcaacttacatcacatccccccaatttcagcacctatagctacgatatcccgatcgtagcgtgctagtaacaccatccgaaaaaaaccacacataggcaacacccggcggaaaaccgcaatcatggtcctcgccaaatccaaaaagtcggtcggtctcggcaactcgctgatgaacgaccgcttcggcaagggcaaaggctccgaccgcaagagagcctcggccgtcacccgtatcgaccatgccaccggccaggaatacatcaccaacgacaggcaggaagcctcctgggtcaagatgcgctccatcaccgagcagggcgccctcgacgagttcctcgccaccgccgaactggccggcaccgatttcaccgccgagaagatgagcagcgtcaagatcatccacacggaccaaaagaacccctatctcttgtccgccgccgaggagagggtcattgtcgggaaacaaaaccagaacaagggcaaattgacggttcccagaaggccaaagtgggattctaccacgaccagggagcagcttgacaggctggaaaaggaggcctttttggactggagaagagggctggccgagctggaggagaccaaggacttgctcatgacaccgtttgagagaaacttggaggtgtggaggcagctctggagagttatcgagcgctctgatgttgttgttcagattgttgatgccagaaacccgttgatgttccgttctgaggatttggagaactatgtcaaggaggtggaccccaagaagcacaacctgctgcttatcaacaaggccgatatgatgacgtataggcagagaaagatgtgggctgattacctcaagggtcaaaagattgcctacaggttcttctctgctcatctggccaaggaggcgctcgaggctgtggaggaggagtctgagtctgaggaggagcccaccgttgcttcttctagcaagaagccggttgctgaggtgaaggaggagactcgggaggaggaggaggaggaggctgaggaggctgaggaggccgagacccaagaagagcaggaggatgaggataccagaattctgacggtggacgagttggaggatattcttttggagcttgagccggcgaatacaggtaagctactgacctagattttgaacacctcgacacgaagttaaccataatcatcagaccctggtcacaaattcacagtcggtttggtcggttaccccaacgtcggtaaatcgtccacaatcaacgctcttgttggtgccaacaaggtgtcagtttcgtccacccccggtaaaacgaagcatttccagaccattcacttgagtgaaaaggttttattgtgcgattgtcccggtctcgtgttccccaactttgccaacaccaaggcagagcttgtctgcaacggtgtcttgccgattgatcagctccgcgagtacactggtccctccactctcgtggctaccagaatccccaagccttttctggaggccatctacggtatccagatttacacccgccctctcgaggaaggcggcaatggcattcctactggtgaggaattgctcagagcgtatgcccgtcacagaggtttcatgacacagggtctcggtcaacccgatgcctccagagcagcgagatatgtcctcaaggattatgtcgctggcaagctcctctactgcaacccgccaccagacagtgtcgatggtgccgagttcaatcgcgagctctacgacattgcccatctgcccgagaagagaagagctgccctgcaacaagcactggacgagatgaccatcgatggtagtgcagctgatgatgcttcggttctgaccgacttcatcccccttcctcaggggcaaaaatcgcaaacactggacaaggctttcttcaagagcggtgcgaacaacactggcaacttcaccagaccgttccagtacaagtacacggagcagggcaagcaggttatggagggcaagaacttgtccgggaggaaactgagggctatgattgctctcgagaagggaatcgacccgaaggatgtgcagatgactacggggaagaagcattataaggggtctatgaaggggagaggcaagcacagacgcaacaacgcggatgatgatgagccatgaatgtttttttttctctggttgaaacttgggaaatgggtttgatatcattagaatcattacttttggcgttataaaaagtctcaatggattatttccgtgatgttcacttcgtacttgtagttgctcgtaatgtgaataaatgcatatccaaccctaacccgcccctcaaaatggtctgtgccacggggctccagaaaatttccaactgcaaccttgagagccgtctcagagcttttgggccgagtgagctccgggcaaaccactccgatcaatctcgaatttccgtcgcccgccgcccgatccctttcgaagccatggcgagcgtccgcgccctgtcccgaccgacccggggtgtttccctgtctcaaatatcccggcagacctgttccagacgatgggcttcttcagccgccgccgaggcgcctcttgaggacctcgaggactcggctttgggggcgccgccattgagggaggaggagaagaagacgtttagaccttggaagaggcaagcagacaggaagtttgctttgccaagtgggaggtttgtttttaccccccccctctacatggcaacaatatattgaccttttgacacgacagatacaactaccacgcccccaaatacgaccgcggccccctccacccggtccaacccctcccctcctcggagcccacagcccgcgacttcgtccccggccccttcaacctcccccgcctacgacagacgtacctctccaccgtcgcctccgacatcatgacgctaacctacaaccacataccccccggaacaccaaagaaggaaacaccccaacgtcttcgtgaatgggatgattcctccccctaccacgccaatcgctccctccgcgccccccgcggcgcgccggtgttgccgctgctggagagggatgtcaactttacgaatatacccgagatcaaggaaatcaccctcgcggcgtacgtccctgccgcgctgcaggacatggacaatctgcttgttgcccgcgcggcgctgcttgctattacgggggtgctgcccgagatgacaaagacacggactaatgtccagcagtggaagattcgggcgggggagtttgcggggtgcaaggttactgttagggggaatgaggcgtatgagttttttgatcggtgtgtgaacttggtgtttccgaggattaaggactggagggggattgaggctacgacgggggacagctcggggaatttggcgtgggggtttacgcccgaggagctgaagctgtttccggagatggaggtcaatttggggatgtatccgcccaaggtgagtactcgggtctcagtttatgatgaagtggttgtgctgacaagaaaaatagatggtgcctggttgcagagtgtacgtcaagactacggccacgtcggataggcaggctaggttgctgcttcaggctatggggttgccgttttttggtgaagtgaagaattaaagggggcagagagggagaggaagaacttgtacaaaataccagtaaaaaagtgtataaatgtaacaacacatagacaaccggcaaggtttctgaatcaagagttttgttcatgtcaagtgagcaaaagccacacgccattgaatctgcccgtcttatcatgtctatattcacacgaaccccttcccacccaaaaacccattttaaacccctcccaaaaacgccgtgtaatgcaaaatcatttttgttgatcccccttcctttaagtcttgttactcgtcctcttgacccgctccttcaacccctccataaccctatcaaccccatccatatccgtcgcatcccccaccttttgttccgcttcatgatgaccccccttgaccagctcctcatgacaaacatccaacgcaggctggtaattcctcaccgccgaactcaacgcataaacagccttcctcctcaccccttcctgttcgtcctctgccaggatcatctccaccaacctcggcaacccccccatcgccaacaatctctcttgtgacttgatattgttttggacagcggtgccgacgcaccaggcggcgtactttctgatttcgggctccgagtgggagaggagggcgaggaggggggtccagagggagaggttggagaggttgtttgcgttgtcgagggactcgatgagctgctcgaagttgtcgaaggcgatgagcttgttttcgagggtggtggtcgggtcgtggaggacttccattgctgctttcatcaggtctgcgtctgaggggccgcccatgagggcggagaggatttcggggttgaggtcgctgcggggggccggttgggaaagggggggggaaggggcggaggggtcggcggaggggttggagacggtggagtgctcgattccccatttgaggaggttggtgaggtttttatccattttgtttgagggggtggtggtgatgatggtggtggttgaaggcttcgagatgtttgatggaggggtagtttgcgacagacggttatggaggggtgatcgggttcagatgtgatttttgactggctgatatatcaccagaacgtctgggagagaatgggtatcttgaagagtatgcgactggagaaatatggtcaagataaaactcgggaatcgcagtcttatgaaaaaagtgatagcgatatgacacccaaaattgaatcccaatctgtaatctgcgattggcgttcgcgaatgttcaggaaaattctatcccgaacgggactagcgcgcttgcacgtgagtgtctgtgaagctcatgatttgtgtccgactgaggcattggggagacatcacttgatatgaatagattatgaaagccggagggacttgaacataaggaatataagccaatttctgccaagtcttccagaacaaaacctcaagatgaggctcgctgatgatactccatatcgtagacgatacgatgccgctgtgatggctcgtgcgtttacgtgcccctccacacttttagaacaaggtggaaagctgccccaccactgcccctcatcgccgctcttaacgatttcgcctaagccaaaatgaaaaaaaggggaagttgaggacaccatagagagacaggggaaggtagccactttatcattaggagaatcatctcccattatcatcaaccccctgaacttgcacgcaattgcatctcgaatcaataatagagacggatgattacgcaattagctccttttgtttcatacctcaaccccaatcggcgctatatcggacaacctcaaacttgttatcaaagggggaggaggctcaccgacatatctacatactatgtataatggggaccaaccgcaatcaaatatccagcctggaatgatatcccgtaggacttgtccaccaacggattccccggaccggccgagatgcatttctcggattctccttggactagcggtggagttgctgcttgcagttgcagctgcccgccgccgccgccttgttggaagttatcagctatctcacagcgtggacccggtatggccatatagccgcaacgcttcctgctcgggaacagccaccgggagaaacataacgttgtccttttttttcttccgttttttttttttttcgaaggtggttgtctggaatgctgtttcgaagcttttgacggtatcaaactgcaagggcatacgtatacctccactgccccatattctcatattttgaacgcagcgccccgtgaaagtcgaaaaaggaggtgcctgcttggcggtggtggttttgtgatgttggtgttgaacggggtgtctcgagaacaagataatggggccgagtcgtcgtcagccttttccccgacttcattttttcttcatgatcttgcagttcatcccatctttctttcttcataggtattacttgatgacagtgatagtggcattattgattgacaggtggacaaggccaccgcctcgggaaaacacaccgtgcagataccttgccgcctccccgcgttgtggcaacaggtgccaagcgaagctgggtccatgaggtcgccgcaccgtatgggttgtgccacgtacggtattgtgctcacatagctcaacaacaggttgacaactgggagagctgcgtaattgttggtgaaggtggctggctgcctcgaggacctacagagagaggtacctctactgtcgacggccagagagggacgggattgagagatggagagacaaagcgttggaatagaaatagatagttacaactccaaatattcacaagctgtcagcccagccacatcagtgacgaagcagacaaccaggccagatttgttaaagcggcaagtcgatcccttgtttctgccaaattaggcggtctcgacttgccagtgccagttgattttatgtaggcagtcagacaggcagtgggttgggaagcagctgtgacatcgttgcagggggggacagggccttccttcgtcagcgtgtgtgtgtgtcgctccacccaccagtctctcctggagcgctggggactggggaggggggggaggaaccaagacccaagcactgaccttaaattcacctcccctttccaacctcgcgccgcgggaacccatctttttccactctccgcctctgcatctgtctccgacaacccataaccatccatcaacctcctgctcttgacgatccgggaatcgcgcaagctgattattgactttttcaccttcaaactttttcgtctacaagcaaataatctatcaaaatggagggtaagtcaccacacctaacctaccaagctcgggctgccagtttcccagctgcgaagatgacgactgctgctgcccccttcgcaagcagctagctggcagtccaaatgcctggaataccttgatgatcaaacaaatgctgatccggtgtcccgcgtgcagaagaagttgctgccctcgttatcgacaatgggtaagccgcgatcccgcaatctcccaatctctcccaatctcaccgactcggttctgcgggggcggagcagcgacgcaactcgacacatcatcgagcccgctggcccagcaacaaactcgccgtccccgcgaacatgagagaaccacacaggacaaaaaatggatggaaactgacgtgcatctagctccggcatgtgcaaggccggtttcgccggtgatgatgctcctcgtgccgttttccgtaagtcgcgcctctggtcaaccgcaccgcgcgggcaagctgccagcaatgccagcaatggctgcctttttggacatttcagctaactcaccgccccagcttccattgtcggtcgcccccgtcaccatggtattatgattggtatgggtcaaaaagactcgtacgttggtgatgaggcccagtccaagcgtggtatcctcacgcttcgctaccctatcgagcacggtgtcgtcaccaactgggacgacatggagaagatctggcatcacaccttctacaacgagctccgcgttgcccccgaggagcaccccgtcctcttgaccgaggctcccatcaaccccaagagcaaccgtgagaagatgacacagatcgttttcgagacgttcaacgcccccgccttctacgtctccatccaggccgtcctttccctgtacgcctccggtcgcaccaccggtatcgtgctcgactctggtgatggtgtcacccacgtcgtccccatctacgagggtttctcccttccccacgccattgcccgtgtcgacatggccggccgtgatttgaccgactacctgatgaagatcctcgccgagcgtggttatactttctccaccacggccgagcgtgaaatcgtccgtgacatcaaggagaagctctgctacgttgctctcgactttgagcaggagatccagactgctgctcagagttccagtctggagaagtcgtatgagcttcccgacggccaggtcattacaattggcaacgaacgtttccgcgcccccgaggccctcttccagccttccgtccttggcctggagtctggcggtatccacgtcaccactttcaactccatcatgaagtgcgacgtcgatgtcagaaaggacctctacggcaacatcgtcatggtgattatttccggggtgaccctcctattccttcaatgtggcaaaggctgacccctgactagtctggtggtaccaccatgtaccctggtctctccgatcgtatgcagaaggagatcactgctcttgctccttcttccatgaaggtcaagatcattgctcctcccgagcgcaagtactccgtctggatcggtggttccattctggcctctctctccaccttccagcagatgtggatctcaaagcaggagtacgacgagagcggtccctcgatcgtccaccgcaagtgcttctaaggtattttctcctcatctcccctcttaacgggctgatgactgaccgcctcgtagcatagggtgtggcagcttcccggatcgtcgccaggcagcggtgaccttttgctctactagagaccacagctgcggcagcggcatgaggcattactatggcgtcgggcttgtatctcgtggacgagactcctatttacaaaaagtttggacgctggtcaggggacggtgggcgtctgttctcggacgacacggtaattatcagtctctgtgtttcctgggcgggcgggtgcgattgtgcgggggcagcgcgtggtacaagtagaccgtaaaggttgatgaagcacttttttttacttttttttattgcactagccattgggtgaatttagttgttttttttccgctatcctgtggctgtctgtgtaagaagacgataaaacaagttgattatggttggtttgcccttgattatggattgtcttgtttattttgtatgactgcttgtctgtccacaggtggttcttttagatcatgaccgttgccgtcgacttttaccgtctccgacttggtgccaggtgtctctatttcgttggactcgtcgtgatattcctcatccacaacctcccactcgaactcctcctcgtccacttcctctccctcttgaacctgttttgtctctggcaaagtcaacccggcagccctggccttttcctcagccagtttcctgtgttttcttcgggatttctttgcggcactgtcggcccttttcttcttgacgctgccgacgatggcgacccgggactgggaaccgttgtagagctcgtcgaggcgctcggcgaggatgtcgcgggctatcttgcggttttgggagcgggagcgggtggcttggcacttgattacgatgttggttgggaggtgttttatctggacggccgagttggttttgttctgttttcagttgcggtttgtgttagtggtggtgcggttgggtttggagagaggggggtgagtttggtgggggggcgagtatataacgcacgattttctgaccacccgggcctgaccccttgaggaaggactcttcgatttcggattcggggggtggtttaggtcttgagggcatttgtttgcgggatatggtttttttgttttggttgggaggggtggtgtggaagggtgcgggtattgctactgctgttgttgttgttgttgttgttggtggtgggaggggatggtaacgggtgaggaggtggcatggttggtggcggaggaggggtcgtagggaaaacattgtggctgtaaactggagggatggttgaagctatactcatgtctgtaagtgctggctgttgacggcgtcaccaatccatccccgtgtcgcgacgcagataaggaattatggagttgccttgtggcttatcgagaattggccaatcagccatacccacccagttaaatggccgatacttccgccccgactttgactgaccgccgccgcccgccgcgaccccctgaaccgtcgcgcttctggaaccttgcccagtccaggaattaattcccaaaaagttgcaacttttgcgacaacacaccacaccacaccacgcctcaccacgccacaccacaccaccattcaccgtatttcgcaaagttcaacaaagaagaataggaaaacaacaacaaaaaacaaacaaaaaaaccgccaaaatgacaacaatgaacaactatcgcccccccacggcagaggaaaaactcaccatgtctcccatcgacaggctgagcaagtggctggagctcaaggtttaccagctcgaggtgacgatgagcgtgtacatgtttacgccgatggagaagtttattttttgtacgtccggacacacgcacctctccctcccgttgggtggtttgctaattgaaggaaaatgaatgttagactcgatcctgttcctcctgaccagcctgacgctcatcgcgacggtcttgtatctcccccatcacatcgccttcatagtggggagggcgtggttttatatgcatggggaggtgccggtggatgcggtagagaaggtgacgagttcgacgttggggaaggttgcggaggtgacggctggggttgtgaaggagctctaagctcgtgaaggacaggggccgggaatggttcagggacctgctcgagacacaggttttcggtggcggtttttggtatggtgggccaaaagcagcgatcggagggtctggttgctgtaggcctggagggctgggtgatgataagttggggatggacgactaatgcggttgggatgtgacagtaatgattgggaatacggaacggtcaattatcggtggtgctgttgggtggtgtacgcaattcacacgacatacataaggggagaatggttggattaattgggcgttttaggggcaggcatagcaggcggtcatatagtaatttggaaggggatgaacaggtgcatacagatagatgccttggacggcggtacacataaacatatcataccaaacaataaacttaacaccacggatatcaacgtgttctatagtaacactttaatcatgactttttcattcacatctaccatctagtctgaacctccacctcatatatcctcaacgaaccatcctcacccgcaatcgccagctccctcttcttctcatcttgctcagccgtcttcggcctccaagcaagctgcaccaccgtccccggcaaccagagccccttatccaacacggccttcctcaccacctccacctttccctcttcagcaacacccaaagtaacaaccatgaccctccccgcctcggtccccacagccaaaaccatcttgccctctgttgtcacctcgggcaggaaatccaccgcagtaaccggctccccctccttcatctccccccccagcccaaactctttgttttccccaacccaaaaccgaacaagcttatccctccccgccgtcgcaaaaaccctttttttctcctcagcaggcccccaggcacagtcaagaatcatcctcgaatgccccttttgcatctgctgcacaagctcataccccgtgccgctcctcccccaaacaacccactgcctatccctccccacgctcaaaagcagctcatcatcccccgagaacctcaccctcgccacggtcagggaatgagcctgcagcggcgggcgtagctcagtccacttgtctgtttcgaacagcctaatcacggcgtggttgagagacgaggctttgcaggctgaggcgatgattttcccgtcgtgggaggagcacagacaggaaatctcatacccgtgaccgtaaagcttttccacttctggccagagggtgtgccgcgagaggttttcttcgaagggggggtgggtggttgttgcttcgagggcggccgggatggtgaagttgctttgggagaggccgccttcttcttcttcttgggattcaggttgccgttcggaggaggtgttgtcaatggccttgttggacagacccaacactggcatgtctgccgcgtcaggggcgaaggacatgtcgattttggagtttgtcaggtaagaaagcatcttagccaccgcctttggcgcggtgaacaccctcatcagcttttcgtctgcccccgagacgaaggaggatgtcggacccaaggtggcggtgcagttgaggtcgtagccgtggatttgcgggcgggacatctcgtgccaggagccagaggaggaagagtcggtgccgttgcctgtccactgggcgtggaggcgggtggtttggtcggacgaggtggacaagaggtaggtgccatcttgggaccaggagaggcccgtcacggcgcgggtgtggcccgagatggcgtaggtttgctgccaggcgtcgtcggaggggttgtaatcccatcggcgccagctgccggtgcggccgagggtgatgacggttgttcctgcgggggaccataggcctgtccagaagccgccgatgctgcctgttgctgttgtggcgcccttttcgcggctgacttctcccaggcgggcgcccgtgatccagatgccggattcggggtcggattcccagatggagagggagttgtcggccgaggcggagaggaggaggagtttaccgtctgcggttcgggaccagcgggccgtgtagatccagtcttcgtgtccgagcagcagggcttcgaacatgacgcagtattttgtgccgccggccgagatcttgtggattttgtttcctggtgtcagggagactgacaggtccagtccggtggcattgttgagggctgagagagccgtcccttggtgaagcctccagagacgaacatacttgtcttgactggccgaggcaagcagtagatcactccccgcctctgtcttttccttgatgaaatccagagaccgcacccagttttcatgccctggcagggtagcctgcagtgtgaactccaaatctgaagcaccagctgtgaatatctgaaccgcatttgtcgtccccaccacagccagcacaattccgtttgcttcatcatccagcgggctcagcgccagagccaagggtatgaatttcttggtcgtcttgacagactggagaagcttgaacggctcctcgttcgcagccgaattgtgagcccatattctgaaagtcgcatctgccgccccggtagcgaatatcctcttcgtcggagccccagcaggcgtcactcccaaagccgcaatgcaattgataggctccgcatgcccctccacagcctgcaaatacgaagctgtagcatctcgagggctcacgctccaggcacgaacaaccttgtcgtctcctccgctgatcaagatagtcttgtcgtcaccctcgagcctggggagaaacttgacggctttgacatggccggtgtgctggctgagtatgcttgagatacctcttgggttctgtatacaccatcagtttcttgctcacacaacccctatgttagggtaggaaagagaaaacatacttgaggattccacaaacaaacattcgcattcgacccgaaagccaccaccccctcggcgctccagtcagaggcggcagagtacctgtttgctcccgcggccagatagctgctgtctgctcttatcgtctctgtgtcggccatttttttatataaatttttcgtctctgtcgtatagtgagaggcgtggtttcacatgaactgtttcgagaaaagggaaggcagatgtgagaaatggaggactgtgattggtcgaaatgtcagggttgggaaggttttttggaggacagtgagcaataaagtgtggggtagctttctttttgagtgtgaaaccttgagagggaatgattcaatttgatatgattcaacttctgaagggttgatattacaactggttttcacggtttttgttcttcattttatttcaacaactgaggctacatagcaagatcatcaaaatggcaccagaaccagagaccatgcccatctcggtggatttcctgtaagcccctctcagtcttattcggttactggtttgatatcaccaccacataccatctctcatcatagagttgttaatcatttctcatgatactgacattcacacagaggcggcctagacaccctcttctccaacaaaacatcccacaccatctccctccccctcctcaacccctccgactcctcccccgccaacgtcggcttcctaatctcatacctcgtcaagcaccacctcaagcacccaaggacagaatttttcgtgcaagacgatggtcacttgtaagtgttcctgttttcctttgaacaggccgagcacaactaacaaaccagaacacccggcatactggtcctcatcaacgaggcagactgggaactcgaaggggaggaagaatgcgagctcaaggcaggggataaagttgtttttgtctcgaccatgcacggtggttagacctcagttatttttaaccaaacacaagaatgatacccatccatcaacaagcacatcccttttcccctacgccagcgaggaaaacgaattccctccccctccctccgtcccccgtctagtccccatcaaattcttcatggtgttatacatcaaccccggcaaccccccctgccccacctcctccccctccaaccaccccaacactcccgccctgtactcctgccagctgagtctcaccccccccctcccagccagcctcaccaaactctgctgcgtcaccggcccagcatgccttaccaacagccccccctttttcatttccttttcttccagccccctcacaaacttgatactctgcagacaaagcaccgggttgtagctcagaccaaaaacagtctcgagctttaaatcatcgtctaaatctctgagatacgagtccaaaacagggacaagcgatttcggtatgcggcaacccctggcgttggcgtcgggggagccagagtcggatgttggtgcgagggcgaatgcacgtcccctccagaggttgttgcagatgtccatcaggaagccgttgaagatgttgatctgggaccattcttcctgtgatggttttcgttgctgttgctgcggggaggtcttcttggttatgacggtctcccaggctattttatagactgttaggatggagcagaggcgggataggacggttagggagggggagaaggctaggttgtagactagcaagggtggggggatggcgattgggatgtggaggaggaggatgggggaggagtagattctgcctgtggcggtgtagaagtctaggatggcgagggaggtggagatggaaggggaggattgggatagagttaggcagagggggttgacgtgggtgacgagggaggggatggaggtgactggttgtgatgggagggaggaggtgggtcgggagaggaggcgggtcgtccagttgtttaggaggagggtgtaaaaggttaggagggcgagctgggattggggggtgttgttgaggagcttagattggaggagggtgaagaggggggataagtctgaatgggttagtgacaagttgggtgattagggatgaaggtgagggcataccggtaaagtcaagcaaggggaggtagctcaacgtctcgaggactatgtctcgtttgtctaacccgttccatgtctgcaggaagctttggaagaattccatcaaaacgggagataattcctgcagcatgttagcatggaggagttgtgtggaacaatagacacaacaaaccttggtactcaagacataatcacgaatcacctctaccatatcgagtaggaatgacgggtctgtatcaccgctcgccacatcacccacacacgccatcagccagttgcttatgcgctgcgaagcctcctgactgggccgcagcaacaaaaacttctgcagcaaggggtctgcaaggacggcaaccagctgcgagggcatttcgatcttttcgagactgttgacaaacccctcggcactgtcaaactcctcgagtgtcaccgaggtttcgtgggcatgtagcgtatgaacgttgggaacaagagctctcgcccccttcaaccggcgtcccaaagcatgactgacagcaaagccgtttctggtcccgtcgtcttcatgccggtcgaaatgctgttgctgaatctcgttgagccgctccctccactggacatctgggtgtttaaaagcagccgcacgtcccttggtgatgtcgcccacgataatctctgggtagtagttcttgaagaccctgagcagaccagtcaagttggggtcaccgccagtctgtcgcgaaagagccagtctaatccatgattatgtcagtcctggtcagtcgcaaaatacgaggtatacgatcgctcactcacatggtctgaatcctaaatggtcgcacatgcttccgcctggtgataagcgccagaaggtgacacagctgcggtctgtgcgagggcaagtgaccatggtcagtaagacgagatcccaaacatcatctgaaccgagtttttcgacgtacctgatggcagccgaatcgagaaggttgaacaagacggcgtatgtctgtgacaagatggttgggttctgcaacaggtggtacaccatcaccagccatttcaggaacaggctctgaaggggaaacgatggcttgaggtggccgtggcccaaggcaccgacgattcgtaaaaggacttcatcgctgacttttcccaaaggatagaggttgcgggtgattgccgacagactggcctggtcaaggtgattgtgttgggttaacaagtcgaccagacggatgaggtcatctggaagagcgcctcggtcatagagaagtgatgtggtcttttcgactgtgggtttgatgcttgtttggcgtcgtttggccgggattttggatgctgcctgcgagttagtgagcgaacaatgtaattgcgaattatgcatgcaatcatgaaagacaccatacctgtttccaagtcgtccaaaagctggtcaagccggtcgcctagtggaggggacaaactcatgttgggatttctgactttttatgctgataaatgctgaatcgatgttgtttggccgtgaattccgtccattgggccttccaaaaccactccaccataccccaaaaaggtaacctgacctgtgatacctatgctctggaacacgcgtcgaacgcgtttcgacaggaaccttgtccttggcatcttcaagacgtgattgtaaccctaacccgccaaactttaatgccaagcagtccagggttgcatgtctacatgtgtaaccttcaactgcccaatctggacatattttgcatctttcattatcatatgcctggttcttggttctgctgtcggcaaggccgggtaatgaggcaagactgccctgacggtgacggtcgagatgaggcctgttacacagactttccacccgcgcaacaatcaacaatcaagacagcccgtctgacgtctgtctgaacgagacacatccccaaccttgccggcacccccacgtctgctcactcgcccgatccttctcgacattcattctcggtgacaagtatagctgttgtcgggccttccccacacggcctgcgcttccgcgtctctttctaccccttgctccttgctccttgggaggttaccttcacgcttgtgctacccatgctcggccgcctctcgacgatgcacttgccgtatcttcaacaagatgtgttaccgtcgtcgagtacgagtacggtcggtcatcacgctgtaaccagacttttctgtgtaacaccagtcagtcagcaatagcggcgtctacgcttccgagatcaaaagctccggcaaggcaacacattcagacatggggcaaagcggcgcggaccatccaggccccgatgccgacaaagagaaccaccggatgatcgactggtgaagccaacaacgagcgacaccgacaccaacaccaacatcaccaacattgaatacaacaagtctatggatacgcaggtcggtatcagcgcgtcatgcttcttgcttgacctccaatatctgcacgtctttctgtacaacccaagcttctttcaggcgtacatcacccaccaattgacccttcaccaccaccaccactaccaccaccacccaccgcacttgtcatgcagcctacaccaagccgaagtgcaaatatcaaacagtaaccacaacggcattaaacaggctgccactatggtgttacccggtcgcctgttgtgccagtcaccaactacagtacatccagaggccaatcttacacctgaagcggcactgaaagccacctaggccgttttctgagaccccgctgacaggagggctgacagggaactcgatggaatttttcctcaaaaagaggcgctgtttctggtcttcccgcgtctatctcatctcttgcttgacgagcttcggggggtgtggtgtcacacacacacacacacacacaccttcacttgttaggttcctgcaataaattcaacttacatacataaccacacgcacccatctaccgttgccgactcgtggtgcccccaactttcctctgccgctcccattggccctgttcttggctcattcctctccgcccgaaagggcaccaaaaaatcctaccaagttcgctgcattttacctcggaaagtcctggttgaaggccatttcacccggccctgggatccccattacgcaacttataccgtaccgctcaccaccagctttcgggctgcaactaataacacttttcatcccgtatccgacttgtccctaggacggtacgcgtggactgacacggcacgagatcaagaaagttcaagaaaaaggcttgcatgggtggggttcccgttcagaaatgtgtgaggttttgaaactgttcaaaaggtgatgtaagtgaggctcaagaccaccctcgccctcaacccctgaccattgactgaccgatgaacccagacacatttattaattcataatgagtcctcccgaaccctcaacaactgaccttgaccctacctctcctgttcccatggacctcagcaagcaccgggtgactacggtcatgcaagattcgcattcctatctgccactatcaaaaccactcaaggatggcgacctcctgttactgctcacacctggaatcataccggatcttggcagttcgaaaatgaattcagagacaccacttaccagtgacccgttcgaatccctaggcaaggcattggcgaagcatcatccctgggttcggcatgtgccctacctaccacgctacggtatcaccggcacacatgttgtgcacatcaggctagccacggcgatcattttcgtcctctcaggtccacctgtccatggtcagccctcgcaagtggcactcgccgagatcacacgaagtatctgcgagaaccgaccacatgtcatcgtggcctgctgcgacgcccgagagctggggcccatcgaaaagtcgttcccggcgatagtgcaggtacccagcctcgacccgtccgatctcgaagcagcggcagacgtcatattcggagagaccaaaaagcggccaccatcaaccggtcctaacctgcagaatctggtcctcgccccaaaggcctggtcggtcgaggtatggaacgggccccgggacatggatgcgtcgtatgagctctggtgccggtgcttcccagacaacttccacctgagccgcttcttgttccaggcgctgttgcgacgggacgggtgggcgatgcattacgtggttcgtgagccggggacctcccagctgctcgggttttgtgcgacgtatacaacttatgccggggctgaggaggaacgcctggtcgggtccgtggctgccttgcttgtgcgcccggcgtaccggaaacgaggcatcgggttgagcttgcacaaccatgcgctgaggcagcttacaaagacacgtggtgtgtgccggttacagcttgggagcacgtttcctcggctgttgtatgggcttccgatggactcaccggtggaggattggtttgggcgacgcaactggcctgtccttacccagttaccgggcccggggactgggcaggaggcgtgcgactggctgctgaagtttgcggattggcctattccaaccgtgttgccaccggggccggtgttccgccagtgcgaatttcacgagttcgacatggtgttggcgctggtagggtcggagtctaggaggagggacaatgtgggctggtacgaccagtatgccaagctggcgaactcgatgaacatccgcgatattgttgtcggactggacgaagccggcacgatggttgccgcggctttgacatatgtcaagaacacagggagtccggtggccgaggatctgccttggaccaacatgattggggatgatgttggcggggtaacgtgcgtttgcattgcaggtcagtgtttttctgagcaccacgtcgtcatgtgctaaccgttacggtgcaagatgatctatgcagagattcaggtcggcggggcgctgtgatggtcagactattagacagctgcattcagctgcttgctgagcaggggatgacacagctgtttatggacgccgtcaagggtggcgatgaggggttcccatctatgggtgagtgtgacaaagcaaagaatttacaactgtctacggcggctgaccaattgtaggcttccacaaatgggcaagatacagagatgtgtggcgggatatctaaggctactgtcaccgaaaggccggcccttcaccannnnnnnnnnnnnnnnnnnnnnnnnnnnnnnnnnnnnnnnnnnnnnnnnnnnnnnnnnnnnnnnnnnnnnnnnnnnnnnnnnnnnnnnnnnnnnnnnnnnnnnnnnnnnnnnnnnnnnnnnnnnnnnnnnnnnnnnnnnnnnnnnnnnnntgtggcgatatggaacccaaaccccaaccccaaccaccccccccccccccccaaaaaaaaaaaagaaagaaaaaagaaaagctctttgctggcagcaggaaggatcagacgcaaccatccgaaatgtccccgccttcccagtcgaaggattcggaatctttatccgtgcaggcctatcaggattatcgtccgtaacaccgacttcgaggaagagagcccaaaaatggcaacattgaccaacaaggtaggtaggtagctttgctgtcatcagctggacagagaagagaggatcttccatcccctgtcagtcagctaggctcgggttacacgagggattatgtcaacacaacaccgagcttatgccatttccttgtaagcgaggcggtggtggcagggacgaggatggatcgtggatccctcccggcaggcagacattctgcttaaaggtgggctttgaggtcactggtggtggtggtggtggatataaacactgggcagcatggtccggatcacataaggatagggctcgtgtctcgcacgagcctgcggcgctattggtgtctgaggttgggaaaaagattcccggtgttgcaagacaagttcaaagatggaaagaatacccgacagaacacaacacaatttgcagatatcaagcacatgtttttggggttcggaagattgtaaaaggaaaggttttcggtgtctcggttgattaccattatctgcttgtgtctcaaactatccttgctgggatgtaaaactgacaggctgtgttcttacgctttggacatactcggaacgagttgtttgtgtaaccttttcaaaggatacattacaaacctcgttcctcacttgaattcaacgtctcacaaacccttttcctctcacgaataaacgcgggggcgtttatgacagcacaaggggcgccaaccttcgaacaaacgtcactatctccttgctgtaagtgggcgatgatctctgatctgctttccccctccaaccctgaccagcagaacaccacacaaaacctggctctcccgcatggttgatcttggggatgacagattgacgcggcgtggcggcacagcttggacacacacccacctacatacatacatacatacatacatacacacaggcaagacagacagggttttggttgtgtaaccaatatgtatctgcacggtttccttcgcaagaccatgtcgatgaggctattccggaacgaaataggattaaggccgcatacctagaccgacctacctagttagtttcttcgaatcagatggcaccgatcaggggagggggtaattaccgggctggtgactgatcaggatggatgggatggtacctaccttgtgggaaagggttgttgttgggagaaaagaactttgcgtgtaacgacactgataacctacctacctacctacctacctacctacctacctacctacctacctacttacctgcctgcctgcctgctgtacattgtggtttactctatcttgtgctcttttgtgacacttagccaaccaagaagagaggaaaagacaagcgaagggggggttgacaggtggttaccttgaggtatgctgtgtcacttctccgttcaaaatatctgtccggtaggtaggcattactcaactgtgttacccccttcagcccccttcatccgagttcatcccatcatcctcttgaccgatctcggcccggtataactctctcatattttacctatcatcatcatgccgaaaggtggcggcttcggtccgaaggtcttgagcgctcacacactcatgtgaaaagtcacgtttgacggcatacaaacaaaccaaccatcctactcgtacccagatgtttccagaaggggaaactcagtcgtagaggtcgtacacatacttgcacatgggaacaggcaagagtttgaaggtgcggtggcttttgtgtaactttgctgatcgatcccgtcccatacatacatcaccagttttcgctttcgcttaattgttgacctcgccgccgccactgcttgtggggcttccgtgaggtgccgaggaggtgtttgagggcttgttgcgagtccgcaagaatttcgcccttgtgctaaacgtcttggggaccaggagcttgtgtcaccgcaacaattctcgttcgggttatgaggcactgtcatattccccggctttgtgtaacctctctgggttggttggtaaccggggttgtggccttgacatgtttgtttctggttggtttacacgacgagtacttgggtgtaagtgggcaaaggattgtcatggggaaaagaggctctgttgacattctagaagaaagggggcacagaactatggcaccggtcccgcaaaagatcggctgattctcccctttcttcgccaactatacaaacttgaagtattgaactcttcggaagccgttcggcactcatatcacagcaaacttacaaaagatcgacctcagaggggatcaaaacggcctcccgcatgcacggctggggcaagaccgggaccgaaatgggttccatgaatgaacgatgacggatggtgacattgtgcggctgaatgtgagagatcatcatcctcctctcttcggaacgtgctatcttttcatgcgtgggatatgtgtctgtcccttctggcaagagtaatatgtgtgatacgatatagctcgcccctttttccctcaccaatgacaaatcatgcgcctacctggtacaagatacctccgttgtctcctctcagtaagtccgtcaaggccatgtgtcttagccagactagtttctcgcttctgcatgggtcttgcgttttccttttccaaaatgcgggatgtgatcacactaaaggaaccagcaacatcctgttgaacaacagactttgtgttacatgaaccacgctgatatacacatgtcagatccaaccttgaaaggtaacatggggggctactactcaatatatgcacatggattagccaagcttgataataatctgtgttgtgtcactcatcaaccggcaacatcgtgactaaggaaactgtccattgaggcaaagatctgtattattctcggataagcaggccaagatgataatgatgtattgtgagaacaggtgagaactcaaacggtgagttgttgttcatgcacctacccagcccggatgtcaacatgatgaataagggaagaaagatatcacaatggattttgttgcacctcctcacatggatgggcgaggtcgtacgttgtgtaacaccgcttaaactgtccagtcaggtaggtgtggagcgagccctgactgaaaagcttccgaagaatatgacagtcttttgtgacacacgatggatggggtgttcggacatgtgacggacgagatttgtgatgtgaagggacacaagaaaacgccacctttggcaagtccagccactggagatattctgtgtaataaacaacgagctcagatgcgaagaccaagttgtacagaccgtgaacacttgaaggacatagctatgcaccatcggacctcgagaaccaacaactctcctctcttttacaccaccgacttgattaattacaccccaaacacttcaccaataaaaacccgtcttccgaatcgggatttcaaaacccagggttaccgtcagacaacaaatactgatcaacaacctcctcccgtctctcagccctatcccgatcaccaaccagcaacacgcaaccaacatcggatggaaccgaatacacccacccaaaccttccgagtccgagctgaaaatgttataaatgcgggcgggatattaaccaacacacacaccccgattattcatctgcacagaccaacccaaccctcaccgagccgagcgcggccccctcccccccccacgtaatgttttgttaaccaacctcacctcaccgaggagcaaatcaagacatgaagatcaaagacagaaccaacaggcccgagaaagcaaatgctgtgctacctacataatagaagtgaataatcagcaccccatcccccctcgcattccaaccttcaaaaagtttcttccttcccttcgatctcggatcttgagcataacactgaaaggggttgtttggttgaatctccgaacgggtcgaaagatatgcccctgaaaagacaaacaatatacacccaatccaggacgacaacctgacctacctgcgcaggcaacaactggccactgcgcaagcacacagtgaactctactgatttgagggacaatttctcttaaaatgctgagatagtcgcgagagaggggatcacacatgtaacaatctcaacctctcaaggtaggcaaggtactaaaaaaaatagccaaaagactttcaaaagcttgtcaaaataagcctcgaaggaacggtaaaatgggcaccaccataaaggttcaaaaagcctacctaccacaatctttcaaccactctagatgtcttcagtctccccacacacaaaaaaccccttgtgaagatatcttactacctcttgaaaagcccccacctttttcttattgtcaaactcactcattgtgctcagcatatatgtgtaaaagcaaccaagtaaacaaaacacaaacttttgcctaaacaaaaatggtatatacacctcctcctttcctccccttctgccgctaatattcatcacaaaacccaatcctcttcacagtgcaataaaaatcgcaatttgagttaccctcaaactgacccccctctcccctaaagagagcaaaaaagcaaaagagacctccctccccccttcccctctccctcaacgtcccagtttcgagtacaaaccccctcacaactcaccgccacaccattcattacctcaacaccatttttaacaaaactcaccctcccaatccggtcccttgtttcctatccggccatgtcccaatcccaccctcccaccaagaaaatcaagtccacttcgaaaaatccaccgcatccaccagcgcctccgtatccccattcccaccctgcccatggtgatgcaccccatgatccgtcatcatggtagaactcgccgcagtgctcaacatgctcgatcgatgcgacccatcattcccgctccccgtccccgtccccgtccccgtcccagccccagaagtccccccactcaaccccgtagcagcagtgttactcgtaaaaaacgtcgcaaccgacgacctacgcaagctgctaaagctgtcacgaatattcccgctcgccggtctgctgcctgcgctgttgatgccagaggggcccccgccaccgccaatgctatagtccgacagcataccccccggcccgacagcgccggcacttgcaccgccgagcccgctctgcgttcctgacacgggggcgctgctgttgatgagcggtaagccaccggcagtagcggtggcagtagccaaaccagtcgacccggcagagtgcccatagtgcgcactcttgggaccgtgtcgctcgcgtagtcgattgatctcctgaagacggttcctccatgacgaaacatgctcgccaccttcgcgttgagaccacacaagagaaaacacggatgcgttgagggctatcagtctgacgaagcgagggagcgccttcaagctgataagctttggctcggcgactggggagatttctgggaagccgggccggttcatgacttggaccttgaagaagggggaaacgtgctgagcctctccgtcctgccgcttctgcgccatctctctcatggacgaaaacgtccgccgcggtgcgggggtgatgacaatgtagacgtagttgaactgggagggaaaggtgtcgaatttgaacggcaagccagattcgttccagacaatgctgacatagtcgttcccaatgtgcttcttcttgtggttgcactgcgggtcacgctccagattggtgggcatctgtgtggtgacatggtagacaatctcggtgacgcggtcgcgccagcagtaggtgtactggccgtcggtgtcgtactcgcggtccaagccttgggtgttgaatgtggcccccttcagcttcgtcagcacgcccaaacccttgagaaactcgaggtattctggcgagcctatcgtgttggcgaggatttcggtctcctttgtctgtccctcgccaacataaataacaccgattttgtgcccgtcgacggtggaattcctgtcaaaaatacggatggctcggttcacattgtcgtcgtccggtaacggaatgggtcgaatggcgggatcgtacatttgaggcattggtgcgagcagctgcatcagcagatggctgggaaagatggtgataccgtgctggaagcgtccttcccaggccgatgcatcagataggtccgcagctggctgattaggcatggcggagaattcgacacggatggcgaacgacgatgtgcccgacggatatcgtcgagtaatctcagcccagcccgtttctttagcctgccgaatggtgacgatgctgtttccgatgatccagcgcctcttctgaatctcgccgtagaactcctcggtgaagaggggatcctgagccgaatcgcaagcatccgaaaaagccacacgctgcatgaagtcaagtgtgacctgtgcctgttcctcgtttgtggccctgccatccgaatctacaaacaggttcttggcgatccagttgatatgactcggtcgatcgggcagctttaccgcaaggaaccagaaagtaatgacatggtacgccagagcatacacgtactgtggcagatcatcgttggcagcttggtggccgagcatctctgggtggtgtgctacaacaatactgggcgttgacggctcgctcgaatgactagggcgtgcggcatgttgtttcttgtcgcgtactgactgcaagtatctggcgcagatgccgaagatgatgcgatactcgtcctctcgaaagttggaatacaacgacggcaggcgactgaggcacgccagaaactcaagaatgtgtacggcgacaaggggctgtgtgatgacttgcgacatcttttgcagaatcgtcacaagagctttgctgacagagagaggtagctcgtggcagcacacttgcaaagcgtggatgcatgtctttgctgtcttgtccgagatgccatgcgtgaaagtcctgaccatatcgtcctcgtccatcttttggaagtgctcatgataactgagaatcatggccagcgagtgaaacagacagttgctcacatcacttcgccgcaagcctgacgaaagggggggctcttgaaagttgccggtcttgatcatttcgcaaaagaaccgtcgaagctcgtggatgtgagggatcgcgcccctgaagatgggatgattgctgagttgggcgggaaggtgtgccagaacaaagctgtaaacctcccagtcgcaaccgttgtggaagaggctgatcatcgcttccagccaagcacccatattcagtactgcccttcctgtagagcccaactcggctccaatagcatcattctcgtctcggtaggaaataagcaaccagctcggtctctcagggaggctctcaggtagagcatctgcatcggggaccgaccataatctttgattctgatggactacgggccttggggtatgtgtttgccgtgcaggaagccctttctctcctgcctgcccctgggtaaacgatataccacgagacggccgtgttgctggctcagcccttggcagcctagatggatgtgcggcatcctcggccagctttcttgcaagtgacgcttccgtcctgtaaagcaagcctgcaaggctttcattctcaacctgcgtggtgatatatatttgatattccgcatctgctcgaagtcgaaagagcatcttcatggccgtcagtcgagcatcaacctcacatgaattagaacgggcaatgtgaaccagggcagcaaaagccttggatgctttggagccatcggtgttgagtgttcggatgaaaatctgaacataacctctggtgacaacgttggagaggctctggttcgcaaagtaaacggtctgacctggagggaaggaactggactttggcgacgccaacaaagccaagggtgacctggacatttcctttgcaaccacctccctcagacctcctatgatgtcatcaaaaagactgccatctgcagtttgcgagaccttcacgaggaacgtaaccgtgtcctgaagaaccagtgtgttcgtttcttcgctcataccagagagcagccggcgcacgaggtcgccaagagcgtcctcttccatgagatcttgtgtgagagagagaaagtcgtagacttcgatgatgatttccaaagcgtgcaaccgcgtcagcggatcccggtgttgggccaggaaaaagccatccatgattatgtcaagattcttcttccactccacgtctgatgggaagcagctcctgtgatccttgaagtaggcgatgacgagacccgcagcagaatctggaagggccaagtacacctggctcaggaattgcatgcactcatctcgttgcagcaggtcggatgtttgggtgagtaggttttcgatgcgggtgatgaggcgtctcagctgcccggtaacggggtcctcggcttctggtacttgccgcggcgaaaggagtgattccgaatctggggcagtgaaggggactgcctgtgtcccacactgggcagcaacctcgaagatggaggaccagtgctcgtctctgaccatcgaactgatgttgttgcgcgcgtcgtcgaataatgagttgattaactgcagagtatcagcggctattttggtgttgctagacctagcaacattggccaggccgtccaccagaagcgcaagggacacaggggggtaccccttttcggccgatttgtgaaggagcttcttcagtaccgaaagggcgcctcgaatctctctgttcaactcctgctccttctccttatcgtctggggccgcataagttcgcagaatgtccagcaatatcctgaccgtggactgcccatggtgcgatctgcaaataatggagatggtgtgccatgactgtttctgcaggtgaggcaactgttggtgtatcgttccgaggactttgatacagtctttgagcttgccgtttggaatggtcccgaacgtgacgagcgcttcgatcacgttgatgcatgctatcaaatcatcctccgatgccgtttttctacaaatattgagcagctcgctcatcaaatccccaaccactgggtccctggcgaacttgaagttgaatttgatcacgtccctcagaagcacaaacagctgggagaagttcttatcttcgcctgctgcggctgatttccctttgctagaccccccattccctcgcagtgcccttctacgagcctttctgacgatttggtatgtctggtgtagccaggaaataagtaacgggaatatgtcgtacgggaacccggtgatattgcgaccttttgtagtgagatcttctagagcagcgagctgaaggtgaaagtctgctcggttcgcaggtgctgtgagggtttcaaaatactcgcggcgctccagctcgctggcagctgtgtactttgcgcactcggtaagaagctcccagccaatctgtcgggcgttttctggatagttttcgttgatcaggtctttgccggcgtaccatatgtcgagtacctagccaacgacgtcagcaaccgggccccgacggcttaaggaggcacatggggaacacatacaggattcagtggaaaatcccttattgcgtaacgaagcgaagttgccgcagctatcctctcattcagatgaccattcctattcttcagctttacatattgctcaacctggtcgggggcaagccctcgaagggccgtcgggagtgggctgtcatcggcatgtttcgtcgacggtgaaggctgtgcctgggcagcggcgatggaaccgagggactgaagtgaaggtggtggtgattttgtaagcctgctgccgccggccagtcccttaaagacaccggcaaggcctccggtgatcctctccgggggctggtcgtctccgggagagggggacatgggtagctggtcctccgaggccgagtggcctagagacgctagtcggcgcaacatgtcagtataccggcattctttgtagcggcaacgacgcagaacaagcaggacagatagaaaagatcaaaaagcagcaaagacaagaggaacactcgtagtgtctgtcgtccgacgccaagaccagaaactcgcaaggcagtggtttagccctgcaggaagcttgcaggagccgcatgcaggctcagaagtccggggcgggggagggcgatcgaaacacggcgggagcgagagctgtgaattgtcgggttccctcaacatgacatggccatggcctgacgggagggtgtggtcaggtcgggggcggcctaacttaagggggaaagtcgcaagagatgtcgagacatgttcgtctagaaataacccggaaaactctcgagacaggacaagacaagacatacgttcgacttacacgtaatgtgctaatcgcaacaggaagaggcaggtcacagagacacaagccagcgaggggagctgtccccctccttgtctatctcttcccaccctccctcactttcaatcgggaatcggggctggtgactggtcctccacactcttcacgccaccagctggggggcacatgcgccaacgtccggaagggtgcagtcgggaagctgtgtgatggtgtttcagctggcgggatggtctggcctttgtgatgtgtgattactcgctttctatgattggaataacgttggaagatggacttgcggactggcggactggcggactggcgatcactggcggactcctgaaaaatcaagctaccggtcagtggtgttcttggggcagcgatgacggaacatggcccagtgaaacccactggtggcagcgattggatggaccccacgatgagctggggggggggttgacggctgcgtgttgacccgcccgagccaatcacaccttcctggcttgcaggacgaccatggaaaaaaaaatggaaaaaaaaagtgatatggaaaactgagattttctgtcaagttttgcagagagcactgtggcactgttgtttgtgtcagggagagacggtccggtgctccatggtcaaagaatagatcgagcaggctatagagagaatgatgactaaaaggctaatggagatagtttgcgtcttatgcaagttccatcacaacgaatgagaaagagacgaggttcgtttgatagaggacgataagccgttatcatcgtctttcccagagcttccttccccactatttggagggccgacggcaagtaccgcacgcaccccgctacctaacaaagtccctgagcctctgaggtggcccgtggccttgcgccagccaaggctctgataattttggataccaggcggaggctgccagaagaccttctcccccaccataactctggcaaccgtcaaccgctttttcaggtgtttttgttttgcttccaaaattgaagccactgccacatacacgtcgtcatattgcttgcaacctcccaacacacatctcacccatcacaagtagtacaaataccacgagaacgacgaagcagctgccaaacatggcgaccgacctggtgcagatcgctcagctgcttaacctgacactggatgcgaagcagcaccgcaaaggtaggcatcaatcacatagcaaattcccgctccgtgaccgctcagactaacttttgtttctcttttcctccttttcagctgaggccgagctcaagattctatcagaacagcccaactattccctgtcccttctcacactcgtccacgatgccacgaaaccaacccagacccgcctcgcggcagcccttgcctttaagaactttatccgccacaactgggtaaacgaggatggatcccacaagcttgctgcgaacgaggtcgagaccatcaagaaggagattgtcggcatgatgattgaagcccccagccaaattcaggcccaactgggcgaggccatctcgaccattgccgattccgatttctgggagcgctgggacacccttacccaagatcttgttagccgcctttctccaacgagttttaagcaaacaaatggcgttttggaggttgcacactcgattttcggtcggtggcgccctctgttctcgagcaacgacctgaaccgcgaagtgttgcatgtggttggtgtgtttggcgacccctttatccagatgctgggcatcgccgaccagcaaattggggccaactcgggcaacgaggccgagctcaggggttggcttaccacgatgagtctccttgttaagatcttctacgacctttcgtgccaggacctaccaccagtcatcgagtcgaacctgcagtccatcaccgtgctcctccacaagtatctcagttacaccaacccaatctttgatggcgaggaggacgatcccacgccactcgagaacctcaagtcagacatctgcgaagttcttcagctgtacacaaacaagtacgacgatgacttcaacccatatgtccaaaagttcacccaggatgtgtggaacgtgctctccagcgttgggcccgagaagagatatgacatcctaacttgccaagcgcttaaattccttaccgctgtggcttcagtgtctaggcacgcacagattttcagcgacgaggcgacactgggtacaattgttgagaaggtcattatcccaaatgtgtctctcagagaatcggatgttgaaatgttcgaggacgagccgatcgaattcatcagacatgatctggagggctccgataccgactcgagaagaagggcttcgaccgattttctccagaagctgctcggaaactttgagatgctggtgacacaagtggtcttcaagtacatcaaccatttcctcgagcaaggaaagagtgactggaaggccaaggataccgctgtgtatctcttcctcgccatcgctgccaagggtgccgtcacggcatctcacggtgtcaagacggtcaacagccatatcaatgtggtggagtttttcacccaacatattgctggtgaccttgttggtggggactcgcatcctattgccaaggttgatgccatcaagtacctctacaacttccgcagccagcttgacaaggcccagtgggccgctgctatgcagccactcatccagaacctgggttcagacaactatgtggtctacacttatgcggccattgcggtcgagagagtgctttacctgacggacgattccggccagcacattttccctcgggctgacatccagccccatgccaaggagctcttggaacacctcttcagtcttgttgaaaaggacgcctcgccagcaaagttacaggagaatgagttcttgatgaggtgcatcatgcgcgttctgatcgttctcaaggagggggcggccgagtgtggtatcaacaatattctcactcacctgaatggcatcaccaatatcatcaagcagaaccccagcaacccgcgcttttactactatcactttgaggccatgggagcccttgtcaggtaggactttttggtttcttgactgcactggactgaaatcgctaacttgtaacagatactgcagtagtctgcctcaggtcgaccttatcagccgcctgtgggagccgtttgcattgatcctcaccgaggatgtgtccgagttcatccccttcgtcttccagatcttctcgcttcttttggagctcaacccaaccgcgcagattccaggcgatttcaaggctcttttggaacttgtgcttaccccgactctatgggacaccagaggcaatgcgccccctctttcccggttccttgcggccatcatccccaaggccgcccaggccattgtgctggagaacaagctggaagccgtactcctcatcttccagcgtcttttggccagcaaaaagacgtcgcagaatgcctttgacatcatcgactccgtcgtgaccacattccctgcgtaagtgcctaactccagttcgaatgattcaaaaaggctaacctcgttgctatagtgaggtgttggagccattcttcaccaatgtggtcggccttgtcttcgacagcgtccagaagcaccctagcgattcgcacaagctccgtgtagcgcgtttctaccatctcgtctcggccaagccagggctcggggccgacttcttcatcaagcacgccgacgccgtccaggcaaacgtttttactcctttctacctgcaggttatccgacccaccactgccttgttcgccaagccggtggaccgcaagctggctgttgtttcttacaccaagacgctgtgcgagtccgaggcctttgccacgcgctacgccaagggctggggcttcacctgcacgaacctgctggacctcctcaagaacccacccagggttgctgctggtcttggtgacgagctccttgttgagaacgatgtggacgacattggcttcggcattggtttcacgcctttgaacacgtgcaagcgcggccccacggatgcctaccccgagatcactgagattgagaagtgggtcggacagtatgtcaaggaggcgaacgcgaagacgaacgggcagatcacgcggtttgctcaggagaggctggctcctgaggcccagcagttctttgcgccttatctggcttaagggggggtcagcatggggagaagaggaggcggtgattatgtatgttgaggggagtgtttggcgtttgggagcagcattggaggtaaacaattgatgggcatatttgttggtattgctttgggggggggggggtaatgttgagcggaacagagctcgagaccagacaaaagaagataaaaaggggtggggaatgaatacattttgatggcaatggcaaagcgatggatggagtttttgatgatggggtgtagagtgatgtttgaagaagttctatatatgatggctttttgttagatggtaaacatgatattaccaaaataccgcttcttccacgccacccttgattctcaggcaacaaaggtctttattttcactttctacagatgtcgtttggtaggactcgttcttttcgtcccgtcgcttgcttgtcctaatcaccgagctacggtcgactcagcggcacagctgtagcctatcaacacccgatctgcaaaaagatgtgtttcaaggacttctttcaaacgtccactaatctgccactaatagttagcagcatttggcccccagcgcccccgcagcgggcatccttcttcaatctccattttccagccctgtggtttgaactgctgggacccctgtttgcgtcgacagctcaacggcggctggtctgcgccctccctggggaaacatctttctctcacctagcaccactacccctccttttttttctttctttattttaaccttctttgtttctctccctttcgaacctgactacggttcaaggtctgtatactcaccacgcgattgattgattgatcctcggtgcgcgcaacaatgggcttcttctcgcgcataaaaaagaacaagtcgcttgatggtggtggtggtggggcggcgcattacgatcctaggttcagcaatgaccaaacgacaacaccacgatccaacagttatgacccgagagactaccaactatcctgctctgggttcagggccatggtgacgggcaattcccggggattgattgcccaactgcccgagggggtgctacggcgtatcttcggactggtgtgcccccatgccagggacgagagctacgagacgtttgaggggagcgcaatgatgattgttgggggggaagaggagaggtgcatgctttgtgacatgagggatttggcgcattgcgttggggtgtgtagacggtggaggggggagggggtcaaggttttgtatgtgtctcccttcattgcaccacaggacaatgctgatattctggttggcgggggggttgaaaaggtatcatagtatacgactcgatccggtgcattactgccctctggaaccgatactttctgatcgaagaaaacgccgctctttttttgacaggaatggctcgccggaggatccgtgtttgatgaggctgaagctgctgtgtcggacgttgagggaggacccggttaggaggggggcgttggtgagatatctcaagatgccgtacatgcttagggaagcggcgcaggcggatttggcgaggacgattgcggttacgccggggttgagatatgttgatttaccagagggcttgtttaccgacgagccggggtttgtgacgttgcggctggaggtccaggcgaggtgtttggagttgaggaagatgagctacatgcgcgggagcgagaactctttgcaggcgctggcgacggggagggtgtggacgaggctggaggtgttggagctgaataggatggggatggacggggggatgttgaggttggtgttgggtgggttgggggggttgaaggcgctgaagatgtcggagatggatgtcggggatgaggttttttcgagtgggtgggaggagcagctgcctccttttccggggacgatcgaggaattggttttgaccgactgcaagaatatcactggggatggcctgaggtcgtggctatccacctcccctgaatcacgagagcggctccgggtgctgacccttaacaacactggtgtccgcgtttgggggctacactcgatcatatccctcgctcgcggattgaaacacctctccatcgtcgaaagggtcaccgtcgccatgccttcctctccagacctccaacccctcaggagcaccaccctcgaaaccctccgctacgaaatcacctccgcgaccccaaccaagaaatacggctccccaccacacaactcctcaagcataacctcatcctattacacctacctggccacctccctcctatcaggcggcctgccacaactccgctccgcctacgtaagggacaccaccttccccgacctcctcctcggcctaccgcctctccctttaccctcctttagttcctcccccgcccgaccaggcagctcctcctccataacacccttttcgtcatccccatcaagacccgccaatttcggtggtctcccccccttacaacccggctcctcactacccaactccaaccccttcacccccggccaccgcccgcaaggcagcctgtccagcctctccccctttggtcagaaccaacaacaaaccaatcgcttcagcagcaacaaccccttcaccagcctcaccaccgcccacaacgccttcctcaacctccccgcaaagctggaagtttttacaaaatccgaagaggacgacgcgctaaactggaattttgtccgcatcggcggcggcggtggcggcggtgggagacaaaacaagggggagagaccactaagcagttacggcttgggtgctgatatcttgggtgacgcaggcggttggagctctggtgccggggcaaggaggagcgtgcttgttggtgggaggggggaggnnnnnnnnnnnnnnnnnnnnnnnnnnnnnnnnnnnnnnnnnnnnnnnnnnnnnnnnnnnnnnnnnnnnnnnnnnnnnnnnnnnnnnnnnnnnnnnnnnnnnnnnnnnnnnnnnnnnnnnnnnnnnnnnnnnnnnnnnnnnnnnnnnnnnnaaggccttggccgctttaacgtgacctacatcctcacacaacacaacatcaacctcacagcctgttgagacaccataaacaaaaatctcatcaatcatagtacattacaccccaaatacatcccggcactttcaatatgcatgtcgcatacaatctacacaatgtgcttaactaggtacatacaataatttcaaaaaagcctcccccctcccatccattccatccatgagccatttcccttctcgtacacccacccaacaccaatttttttcagaaactcatttttcgtcccatgaatatgctagactcaatgcttgctaattatactaaccgagcacgctcaaagaaaaagaccggctcttgcttagttgccgttgacgtgagggggcgtcgccgctccgctgggttgcttggttcgaagggtgagagggaacgggtactcatcggggtcctcttcctcactgtcgtatcaaggtcagcaaaggtttcaaagcaaaaaatgcagtagaccaaagtaaaacttacggaagcttccacgcgacgtagtcctcagtgctgagtccctcccgaccctcctggagactggcaaagtcgccaggagtcatcatgccggtcctgtccctgggcgagccaggcaccgagaatggccgcgagatcttttgctcggggccaggaatgtagtcctcctcctcgtcaccattgaacgaggttgggtaggcccgtctgagggcgagctggcgagccttgacatattccatgcccatacgcttccagtcaaggaggtcgctcagacgctccgtccggttgcgctggttgatgcgctggcgacggctcttttgtgtaaagtcaaacatgctcgaggtaagctggttgaccgagtcgtccacacccttgttacggcggtcgacgatgtagataccataatcgctcgaattctcaatcaactcctccatgtagcagccaaaaccggaaaggttggttgttatgctgggcacacccatcacggtgcattcggctggcgtgtagccccatggctcgtagtacgacgcaaagacacccaagtgtgtgccacgcacaaagtcgtcgtagtcaagcgggagcaccgggttcgcagagttcaggaactctgggtggaagatgatcttgacgcggtccgatgggtggttgaagagctgtacccgacggatctggttcagaataggatcctcgctgtcgttgatcatgttgtgcgtgacaatagggggaagtccgtgcctcttcatggcaaagagacggcgacgaagcaagacacggtcctggctggtgaggatctccttgtcatcaggcatcggctctccgtcgtgccatttgagggagcgttcgaaaatgcgtctgccaatgttgcgctcaatcgtgtccacggtgtctctgagcgacttgataacggcctggcccttgagggcctccacagtcagcgaggtggtctgggcgggcatgatgataaaggcaacgacggtggtcttgctgccagagctcttgaggcggtggttcagacgagcgagggactcgatgaacatgtctacacccttattccggaactcgtagcgaccagccgtgaagaagtagagagtgttttcaggatcgaaatcgtagtgaccatagaagtgaccgcggacaaagtcgtggatcttctccttggactgttggtgaaggttctggaactcatgcatggcggagaacttggtgacgttgagaccattgggcagcactccgtcgggcttgcgcttcaagagatgctcgctctcgtacgcggtaatgtgcgagacggtggtgaagacatcacaggagtgagccgacgcccgctcgatgcagtaccgatggtagataccgcgcttgccagcctcggcgtcgacgtcaaagtattgcaggttgttgtagaaatcgaccgagccggcgcagaggtaccgaccgagaagcgtagcgtgggtggtgaagatggtggtaacatcaatacggcgcctcttgcacagaggaagggcgacaccggcgagccactcgtggaagtgggcaatgacagccttcttcttttcgtggcacacaaactagaacatggtgtcagtgaaaccgttgctttgggcgggttgtaagacccggaacaatacctctccaaggaaccatgcgacaaggtaaccaaacacaacagcctcgtttgtttcctcgtcattatcaggggaggggatagaggccacgttccacagatccgtcttccactcgttcagataatgatatgcggttttcgtgtcaaagagaaggactcttggcgcaccctcgatcagccagcgaccatacagaataccaatgccacgatccctcatggactgaatcgtcgcagcaagctcggggttggtgggttcgatcgcctcgacctcgacggccgcctgaaggggggtgttaactgcatggtcacggtccccaatgggggctaatgcagggcaggagaaactcacagactggtgattaaggggtccgatgagcgtgtaacggtcgccatattcagcagttgttactggagccttggacttgatcacagagtagataccaccaactgtgcaacgaacaccccggtcagcgaaggttcgagagtgttattgcttgagagcacatatccaacataccacgatgcgccacttctgtcgcaatctcgaagaggaggtggttcctgacctcgcgaggttcgcgtccgtcgtctgccatttcggaaatctgagaggtgtcgtttggcttcgaaagtaactttggcggtttcaagtcagcacaaggcaaagagctgagaggttcgttgatggatgatgcaatggtcgaagaaataggtcagacccaagatgcgggggaggggaaacgggttgcagatgcggttcggccggtggattattgggcccaacaaaatcaaggaaaaaaccgaaataacgaataacgggtatttgaggaagaaatatagttcgaaaacccaccccggaaatgtatgctaataaaaaatgttctcgcgagacccaagggagaggttggggtcagctcagctcagggcggccgggcacagaagttgtcttataggggaaccgcaagcaacaagaaatgtgacgtcggatccgaatgtcgcgaaacgcaggaatcgaagcgcggctgggcaacggcaaagcacgttggaatctcccgaaattggaaagaagtcgagaataggatcacggggagacgggaagggggaggcgtctgccgcagaatggcgctgggcttggtgggctggcaaggctggggctgttggttggacaatggcaactggatgacacagggcacaagcagtgtcttgttgttgagtgagaggggcggggaagcttgtatcaagtagcttggggtttgagttggtttatagtgccctggtggtgctccgggctgttaggaaaggcaccgagggggatggaggtgaaagacggcggcgcttgggttcttgcagggaccggggagcttctcgcagctactgcagtctgatgcacttggtgcccgtaccagcccaagagaacctcttctgcagcagctcacgcagctcttccaggatgccaatggggtgatgcgtggatgccctgcagcgatggaacatcaggtggggacctttgggagctgcttcgctgccttactggactgctgcgggtgcatcgagatggatcgcagaccttctggcgtcgaacaagccggtaatatgcagttttgccgaccaaccccctcgcttctcgaccatcaacgttaggtccttcgttgggtttttttttttgagagactgagagcttttcccaacacaagggatccaacgtttgctggtctgttagagataacgccatgattcatcgattccacccgtctcgcactccccttcagctgcccctcccccgatgcgagtcttcaatcttccatccaagcccaaacaccacaccaccaccgggcagccctactgcgtacctatccatcgcccgcttattggcacaggaactctgctaaccgccaccgttgccaagccagtccgctcggggataaaatcatgaaatgtttgtctttacaattgtctatcacttctgtctggtagagacatggatagcagctggaggagctctatctcttgcgtcattccgttgatcgcggacccccggccgggcttagtcatcatgacgacggcgggcccttgatctgtgttgcgcactgggcatcagcacgtcaaggttccacacgaaactggggctcgatgaaacggcatgtcattgccctggcctcctattcgctggccttttgactatcaacgaacatcaacgacatatattctcccttcaacccgagcgacacatctcgacgcgaacacctcttcccactcaggcatctatgcctgaacatcgcaaattatgttaggcatccagtcactcaatgccaatggcccaagtccgttccaggctacgagacggcatgtgaatggtttgctagaaatccctcaatgcgggcactcatcaattcccaacaccttgatatcgggccatgccgttatggcgagcaacgataagatgaatcctatccagaagactgcctcttgtgtctgatgaagaggcgcggcaaaagttgggtctgttggcgtctacacactgagcctcacgggacttctaaaaatagaacatcaagggagtttcagatgacttccaaccacaaagacttggtgaacaagatctttgtgtgctcggctcctaactcggtaaccgtgttgtcttcttctgacaatgcactgctcgtcatgtcatgaaactggtcatgatggttacggcaatatacgcagtcagagctgtgtggtggtaaaacttgctttgctatgggcttcaactcgggcacatttatttgacaatgatggcgatgtccgattattttcgacatgagatctgctgtgtctcacagtcatacccatgtaccaatcgagagactactgtcatgaaggaaaagtctattttcacctcgacacaacgtcgaagcgtggaggaccagcttccaagaggaacatggcattgtgtccgtggaagacaaagaggtatactcggaaactggcatgtccgtatctgcgccctctttcaactcgaacaaatggaacaaagacatcgtctgagtcacaacgtatataaacttccgcccgcccctgggaagtaagtaatctggtctgccattcaatcttccattcatcaaacttcaacaactttcattcatttcattaccagcgtcactttttgagtttataacagagccaggttcttccaagtatctcaggtaagtctctctgatagagccgcgtctactaatcaccatggggaagaaccgcaacagaaacaagaacggtggaggtggcaacaaccaggggggtaacaatcctcaccaaggtaacaactctcaccaaggcaacagctcccaccatggcagcaactctcaccaaggtaacaactccaaccgcggcaacaaccaccacaacgttaataataataatcacaacaacaagcagaacagcgggcgtaatggcaagtggaacaacaagtggaacaggaaccacggcaataaccagaatggcaagggcaataacaaccagaacggtaacaacagtaacaccgggagccagaatggcaacaggaataacaacaataaccaaaatggaaactggaataacagcaacaaccagaccgggcactggaagaaacggcgtcagcaatactggcagctcattgccggagcagagcacgtgggtcaaagccaagttctcagcatgttcctgtgccatagcatccggataggtctgctagcacaaagctacgcaaccgtgtgtcacgcaaccggaggctacaagtccacagacgagtttatcaccaagcacagagcccaaatccacgactgcgagttgttttgcgtccaaggccggttccaggacccgtccatcacaccacattccctcgccgacaagatcgaacagttcctggagcagcacgcggcattcatttacgagcaatggatcctgcacgaccacctaacccactatcctggcttcagaatggaggactttctcgcttatatccggggcttctctacccactcctgggagcctgtcatcaacgcggagggtgcgcaggggaatgacactgatgaggatgttgtcatggttgacgacgggagcagtcatacgatttacctcgcccagctttgcaaatttgcgccgctgccttacctcactgttaggtttggtcttgttgacccggatgtaccggggcatagttttatgtaggttctcgtcgtttggttttgtaaggtgtgtatttgtaggaggaggtggtataacgaaaagcgcataaacaaaagcatagacggagcgaggctggatcctctgctcaataggggcactcggtatagagagtgcgacccaacacagctaattctgatacttaatcatttggaacgaagtaaaacatcaagaccccattcatttatttgactttgaaaatgtgatgtccatgcccgttgatcaattctcgataccttactgtacccaaatattgaggatgaagaagggcgcatcccacgcttggctggagccatcttattcaatgaccttacaaaggaaccacagttctccagaactgaagcccaagtgaaatcttagcattgtctttggtgatgtgcagctccgggtatagggttagggttactgccatgtcagctggaaggggggtcacggggtttagttacgtggaccgtgcgctgcaacggcctaacttggctggcgcgctggccagagctgaacttccacaaacaattccactccccaaagcacttcattctccgaccaccaaccgcgacgactctcaacgcggattcaagcacactacgccttcttctatcgaagcctttttgcatctcgaaatactctgtcctatccgtacgcgtatctatcatgacggcgagatcggaaccatggagagcccgcaattcaagctcggtgcggggctttgttcttccagccggcagcttggacatcatcaatacctaacttgccagcactacggattcgacatagcgggcgggacagacaccgattcacttgcctcatggtgaaacatggctgggaaagaatgataatggccgacatttgatactccgatttgattcaactctgtttaagcgcttatcatgtcggattccgctcgaccctaccctccatcccccacccagtctgcgacctccgaccagcagcttctgcatcattacacaacacaccagcaagccagcgcccttcctggatcctcgccttgccgtaggccgagcagctacaccattttcgtccaaggtggttgtatgtgacaatcgaagcagggggatgacctggccacaaattgaagtgggctggatgacgccaaaagtgacctacaatcactgctttggtccccacggttgatacacttcatggccaacagtatttgtggctgcttgcaccgcgtcctttttacagcacatgaactacctacaacaccacgccactccaacgaccttctgggaagagctggaatatctgcttgacaattgccccacggtcttgcgagtatttgcagtttgcctcgtggtccaatccacgtcagccatcccaagggttttctgtttttatccaggcattgtgccaggcacatgaggctctcttggttgtactccggtatgatcaggaggatgtcgtctcgaaactgccggggcgcgatgccatgacaccccgacttttctgatgatcaacttttgcattccttccgcagatgttgctgccgtacgtttggcgtatggcacaacaccgtcttgcaaaagctacgccaggaacagagtcccatacactaacagcttcagagaagcccagaattagcccatcacgatggcggaggtcaaggggggaaaaccgacttgtgtgggagcacggtggaaatcgtaaagcaaatctatcttgccgtatatagtttacgtggtgttgcagcttgatgaacaagtgttagcaacagcctcagcatttagatgctgcctggggctgtttttcaagctggggccagggtcggtgggcagggatgacaggttctgagtgggctcaagaagagcctcgatgccttctttgtaaatgcccattctggtggtgctgaacacaacgcttgacaggaagagctcgcctggtctggcgatgatcctcttcgaaggcaagaggagtcgcagggagtatttggggtccaactcctggtgtctgggaggacgggcccgatgacacggacagcgatctgatctctcagttttggagaacttccacgatggtgtaggaggtccatggcgagagctgcccctcacctcaacctcgaacgcaaccgcacaagtccttgggcatttcaattcaacaccgaacaggagctcgaggttgttgcaatttctaacgcatcgccattcagccaccacccaggtcgatcctagccaaaactaacagcaatttgcaaaaaaaggcaccctgcatcttatcagctgcaggctctcggcagatgcgggcttgcttccaggttatcagcatctgaggttgttctgccagagtcgccgagtttgggcaaggcgaggctgtggtttctttgatgggattggctgggagcgcacacagccaggcagaggacggacgggacagacgtttttcagattcccacgctggatttgcaattgctctctctgctctcccaggtcgctgtcggtgctgcgtctacagcggacctgtaggcgctggctgggctgacagctccggcccacagcgacaacccctgtctctcggctatggaaaggccgccttgaccaactgaagtcaccccaactaacccaaagtcaaatattgaatcccgtctcgtgctgcgatggaccaccagcaccagcaccagcacaagcaccagcagtcctcagcacagcgtcggcgtcgaaactttggtccaccgcccaatggcagccaccgtcctctcgaacgccaacaaatccaccctcgggttgagcatgatctcggcatgactacttcacgcagaccgtccgaacccgccgccgccgctgccgtgaatcggtcctctgcacctgctcgcgaacgagatagagaaagagagcgagacaggaaacagcaacaccagcaacaccagcaccagcaccgccatcctccctcaccattgccgaatccgaaccttccaccaccaccaccgccgccgccacctccccctccccgaggccgttccccgcagtcatcaaagtctgaatatccccatcgccgtcgcgaccggagccgcagcaccgattaccgccccagtcgttcctctcgcccatctcagcgttcgccccatagccgtcgagaccgttcccgcgagcgtgaccgtgatcgtggccgtgaccgcgaaccagcccgctcccgcgatcgccatccaccggcggaccgccaccgttcacgggaaaggtcttccaggtctaggaaagacgctcgcgatcgtcagggttctcgctctcgccggcgtgcatcgcgttccccagcatccgtgaagcgtccgcgcagccccagtccatcatccattggagggtcgcagccgaagaagtcccggcgggaccgtagcccaggaagggcagagaaggacgcgccgaaatctctgccaccaaagcccgcacgtcgtgatccgtcaccagcatcccgtgcccgtcgttcaaggtctccggaaggccgtgaccatcggcggccaaagactagcaaacggacaggacggtcaaggtcaccgagtgcgtctcgccggcggagatcccggtctcgtggagcggaaactgctgcgtcccaatcaacacgtcgacgtagcaggtcccgtcagcgatctccccgcgcagagcaccgacgtcggtcgggatccagatcgcgccctcgtagtccagctgcgcggggtgctaggaggcccccttctgttgatactgggtcgcaccgcaagcccagcttcgatctgaactctactcggacgccacacggagccttaccccccggttctccgcgtgattcgagagcagctaaccctactaaaagcgaagcccccaccgacgagtctaacaagacctctggcaagtttgatccatcgtctggttccaacagcatcgaggtcagcatgggaacaaggggcaattaccgcggcggtttcaatccccaacaacagaactatcctccccgcggtggctacggccagtcttcggggcaagggacacctgcatcatcctttcacggctctccgccagcacagtcaccgtatgctggaagcggacgaggatggaatggtgcacagcagttttcaccgccagggtcagtccggcgccccaagaatgcagtgctcgctaactcacacggcaacagccaatattcccagccatatccacacaacaattatgggccgcctaccggtcctcagaatcattatcattccaatcagacacagactccgccatacgcacccacaggcccagcatctcagtatcctgcgggctcatatcgtggtgggcacagaggcggacctggggggttccggggtggtgcattcggtggtggccgtggggcaccgcgcggtggcttcaagagtgcatggaactcatcccaccccgatggacggacctcggatccatcccacaccagcaatcatcagtctccagaggctcatgacaagtcagaggcgaaagatgtgttgatgcaggatgctgataaccccttcaggccatctaaagaattgcaggttgaagacgcaagcaaggaggacaagtcgaaagatgacaagatggctcctccggcaagccgtgctccgccgactgggccccagtcccagacacccaacaagttcagcttcagcatgaagactgcgtcaaagccggtcgtggcagttccacggcccgagatatcgatcaagtttaacgctcctgctgccccacgagagccaactgctgcttccaatcctcttcagagagcaccccctacgaagcccgagcgagacagagagcgagaacgggatagagatagggacagggacagggagagggatcgagatcgagatagggacagggaccgagatagggacagggaccgagatagggatcgggatagagatagggacagatccggatatcccagaaatgctcccactgagcctgcctcggcccgctctcgcccgaacgaccaccgcagacctcacgacctgcctagcaggcaaccagatcccacgcccaagacacgcaaagtgaagaagatgatgaagcgtctcaaggagaagccaaagctcccagaagatctggcgcggtccaagtcggtgttcttccgcagaccaggtaacgagtcggtggtcgggtcgggcacatacggcaaggtgtttaagggggtaaacgtctacaccaagaagctcgtggcgctcaagcggatccgtatggagggtgaacgcgacggttttcccgtcacggcagtgcgagaaatcaaacttctccgctcgctcaagcacaccaatgtggttgagctgcaagaagtcatggtcgagtcgaacgagtgcttcatggtgtttgagtacctctcgcacgacctgacgggtctgctgaaccaccccaactacaccctggagccggctcacaagaagcacctggccagacagctgtttgaggggttggattacctgcacacgaggggggtcctgcacagggacatcaaagcggcgaacatcttggtttctaacgagggcgtcttgaagctggccgactttggactggcgcggttctatgccaagcaccaccagctcgactacaccaaccgtgtcatcaccatttggtaccggtccccggagctgttgctgggggagacgcagtatggtcccgcggtggatatctggtctgcggcgtgcgtgctggtggagatttttaccaagagggcgatttttcctggggatgggagtgagattaatcagctggacaagatacactctgtgctggggacgccgacgaggtcggagtggccggatattgtggagatgccgtggtttgagctgctgaggccgacggtgaggatggcgagccagtttgaggagaggtacaagggggttgtgacgccgatggcgtatgagctgttgaggagcatgtttaggtatgatccgaagaagaggccgagcgcgggggaggtgttgaggcatgggtattttactgaggaggagccagaggctaggcaggcggttgagtatgtcccccccatttgcagcgttttttttttgtgatgggaggttggttgctaattatttgaaacaggctgagagatgtccagggtgattggcatgaattcgagagcaaggcgttgaggagggagaaggagaagaaggaacgggaggagaaggataggaaggagagggagaagaagggggttgccacggccaagggggaaaaggaaaagggggagaggaagaggccgattgagggaggtggggatgctgcgcagagggaggcgaagaggccgcatgtggaggggggttcggggtcggggtcggggtcaaaagcgagatgagcaagcggttaatgcgtagaggatgtcatggtgtacgactactacataaaagtcaaaattgggtgaaataaagggatgtacaatcacggctgggaagggatgggggatagcggttgggttttgtatgtgagtagcattattgttatgggtttatgtggttaagaccaagcggaannnnnnnnnnnnnnnnnnnnnnnnnnnnnnnnnnnnnnnnnnnnnnnnnnnnnnnnnnnnnnnnnnnnnnnnnnnnnnnnnnnnnnnnnnnnnnnnnnnnnnnnnnnnnnnnnnnnnnnnnnnnnnnnnnnnnnnnnnnnnnnnnnnnnnctactattcccctcaccctctcaacaacctcccccgcccccttctgttgttgtctcatcccatctcccccctcagaggaacaactccgactacagctcataatagtctccaacctcccctcagccacactctttttccccctcctactcctctgttgttgttgttgttgttgttgttgttgttccgtcacaaaccccgcccccgacccatgaggcgcaacatgaacctcgtactgattcgacaacgagtaccgactcctagcacaaatttccgctatcctatccaaatcagcactgatatcaccctgttgctgctggcccgcatcctgaacaaaagacctaaacgaaaacgcctccagaggcgggagtttaggttcttcttgtcgtcgctgttccctccccccccatgtccaaccccccagcaagaaccccgatcgcggtttcgacgacgccgaccctgactggtgttgtttcggcggcatggttgctgctgttgtttcttcggatgacagtgttgcttgcgtagtggtggtggtgacgtcaagattcgaactaccagtcgtcgccaccccagaactcaacacacgaccgcgccggctccgacgtcgctgatcccccccaccaccgctatacgtccgaaccaccaccggccccgtcgtcgtcgtcgtcgtcaaactcccctgctcactacccccgctctccacagccgaagggaacctgttgctcaacctcctcagcgcagtcgccgtggtgctgttcttcccactactaccaaccggtctcccctccgccctggccccgtcaacaaaagacgacgggtcactgctagaagagaacaaaaccccagtcacaaaccccaacgggaacgacctccttcttttggatttagtagtagtagtagtagtagtagtagtagtagtagtagttgtagtagttgttgttatggccgagttaagatcgactgccacctcagggttggaggaagatgaggactgcggtgataattcagaggaatcagatccccccggggggccatccgccctattattgtacacatccatcctatatgcacccaagcccagcagcaacttctctctgctgcttaaacgaaacgggtagctttacttctctgcagctgcaccatgcaggtgccgtggtatcagggagcgcgcgcgcgcgcaggcgccgaacgaaacaaaaggaaaagggaaaaaaacaaggagcaatagaggagacgtggtcgtgaatgtagggaggcccgaaggtgtcgtggacgcggaacagattgacggggatggggggggcacggcacagggagagaaaatggggaggggcaagtaggaaaagccctatcccgtccacttgattcgatcgatcagaaaccgcaaaagaagctcactggctgccgtcattggatgacagcaggcggccttgtatgcaagcagtcgtggctgtcgttcaaaggtctgtggtcgaggtcgactgcagtgggagcatgcaccatcatctaagcggggttgaacaagagggttgtggcccaagctttcgggaaacaggggtccactcagcccaacctcaccctccttggagaacatcacacaagcacaggaacagatagcaaacacaagggtgagatagcgctaagagcgcctatctcgtgctcgagtaattctgagcactctcaattgttgagcttttcctgtgttttctgtggtgcgaggcggccaccagccaactcaaaaaaaaaaaaaaaaaaaaaaaaaaaaaaaaaaaaaaaacacttcagcccggttcagtcatcaaaccagatagcaaaaaacgtgtttgattagccatgtcctgttgtaaccagagatacccagaagaatacttaggttgcccaacactaactccaccatgcctccttttgactctttccaagcagtctctcgtcactgatcacccctttatcccttcaatggaaatgtctaggccttcgcctgtggagaagcgccgtcattcttgtcaagaagtggaagcggcgacattgccggggttggctccgaagctgcggcttgggtggttgttttctgtgcgggttttgtcgaaggaccagatgtcgagactggggttgatatagcagacggtgttgaggtctgttcggcagcaggcttctgctcttgggctggcttctcctgcacggccggattgctccgatggggttgtacctctttggtggaagtcctgggggttggaaggcttgcggtgctccggtttcgagtgctgattcgctgaagcttatcggaaaatacaaacggacgtccgccgtcgattggcttcagaagcttcttgttgtccagatacacgtatacgaggtaccagaggtgcaagtaggcggggatcacgctatgtgggtggaccatcagttgattgaccgggttttggtccataaatggagcgtatctcgtacccaaaaatgaggagacagaggttgatacacacatcagttccacaccctgttaagagcgccacaccgagaggagggaagaaaaatccgaggaaaagggcgaagaatgcggtaccgtcgaaacctgccatggtgagattgtcttggcggagctgcagtggtaggacaaggctgacgatggtgatgttgagcttgaagatggtggggagaattccaatggtacatctgtaagttccagatcccttttggtcagataagatccccttccgcctcccaagcgggaagcgccttccatgccgtgcggcattgaggtggatacctattccaagttagccagcgaattgaagtggcagaagtaacttccaccttgaacttgaaatggcctgttgttggtgttggcggaaggagcacaccacccgggtgaacaagtgaactcccggctcggcaggagctatccgtacagtacaatccccgatcccgaacccgaacatgtggagaaagccggtgccggggtgtgggctcggaacgaaatgacggctcgcctaactccccgtcggcaggttgaaagggggccgcagccggggagccttccacagcttcctccccccctccacccctggagaaccgatgctgcaggacccacgggcaaatcaccgtcaacgtcgtcatctgatgctcctgctgtaatctcgtaggcagtagggggcaaaagaaaaaaaaagaaaaaacagctgtaagtgcctggctgaagccacgaacacctcaaaactctgaaaatcccctctgaaatcattgatggcgtttggctgcacattggcttcgactgagactccgcagttttacttacccatcacgcagttatcgctcaggctcaggccgcgtgactccaacacagtgcctgccgatgacgcatatcgcggactcgggcatcaatcgcaactccatcgctgatacgagagagctttttaagacgtgatgcaaaaatcgccaacaaagtgacaaagcgcaaggagaactctaaataatggacaccaacatattgttagcacaccagagaaatgacgcattggactttctgagtgggaggagacgcggtcctgacgaagcttcatcagcctcgcatgataagcgtgatgcttcctccaccagcaagcacaaaacgaggtcctgtggagagcatcaattgatgttgggaatttaggcgttgctttaacttggcccattaccatagtgtccaccctctcttgccaaagcccaggctttcttatagagaggtgtcaacccatccctctgcccctcttcgacagagtctgttacagcctggtgttttcgcgaaacgaaccgtaagctaaactgagctccgactcggcgcgatcacatcagcaccttggggacgaggcaactgtccgatatctagctaggtggcagttactgaggttctcaaggtgctgccccgatctgtcccttgttcgcgctcacgctcacgctcacgcaaacttacaaatcggaacaaaccttcaagacaatcaccactacacgacaacttggaagcggtcagtatccacaacattcattgccctgttgttgagacggttgagactctataacaagtggatttgggtgatgatttgaccgggatgcatccgtcactttttaccaaaagggtatcctattacaggaagcctgcactttttcggtccctttattctccctatcgtttccgctcatactgaacctgaatcctccctgaatcttatggccctctccccgctgccgtcatccttcccccacagaccctactctgctttttttcagctgaatttgtacgatggcaggtacaagatgtgcaaaaattatacaagaaaggtcagttggcgagatgtgctgggtgatgggtggtgcacacgcagtttgtcagttggcactgccagcagccagccagcgtcccagcgctgcccccctgcggagtccaccgtgggtgcgggcatggagtgggtcgttggactcggcaactcccttctgctggtccgcgaccttggtcattgaaaaagccaccgccgttcgtttgctgctcccctttgaagcttgccatccacgacacctcatcagcagaagcaggaggaagccactgtcgtcacaacccaatcatcagcttaattaacacccttatcagcaattaggtttcgctgccgccgccactttaaattgtccccatcgcgctgttcgagttacgagctcgaccacgcctgtcctcggagacatggctactccccaacaaaccccccctttcagaaccgaccgatatgtcgtgatccacgtcgccaccacttgcgacgagcacggtgtctatgtcaccaaggactcggctgaggtcatcgagctcggctggatcctgctcgacgccaacagcatcgaccttcacgaggtgggccaaactccccaaacccaacagcccctgaggaaaaaaaaaaataccatgttttctaacccgttgctcctgcccgtcagcttcaccgcgaaagcgtccttgtcaagcctgtcaacacccccatcacccccctttgcagtgagtttccgccattctcgtcccgccgatgctcaattgctatctcggccgccttgatcaactttgctttgctgaccgtctgtctgctagcgagcctgaccactctcacatgggaacacgtccggaatgcgggcactttccgggatgccatcaaccgtttcgacgcctttgcctccgaacacctgctctcgaatgaccttgacttcgttttcgtcacgctcgaagcttgggacctgcgcgttcagcttccccgtgaggcccgtgacaagtccgttgtgctgcccccctatcttcaacactcgcgcacctttgagctccggaccgaatatcagagatggcagcagcaccatcccgagtctcttccattcggcccctcgtctctggccaacatttgtgctgccctggaagtcgagcctgtccagaatagtgccccgatcaagcacaacctccccttccacctccaggcactggcccctgcctcccctcgccgcgccatggacgaggctgtgactctcactcgtgtgctgaggggtctgatcaaaaagtcccagccagcccacgagcaccctggtgttctcagccagcccatggatgctcgtaccgacgtccgggctttcctttcggaacggagtaagatcctccacatgtcaggcctgccccacgacaccacacagagcgagctggaaagttggtttactcaatttggcggtcgtcccatcgctttctggactctgcgtacccctgagcagtccaagcccactggtagcggcttcgccgtgttttcttcccacgaggaggtaagtcaccgcttgtttctatggagctcccaacatcacccacaccgcccagtggcccattccccccctgtgacccactatgatgcgctatgtctttgttgattcgctctaactggggaaaaaaaaaaaaaaacaggctgccgaaagtctgtgcatgaacggccgtgcattgaatgaaaaggccatcgaagtctctcccagctctagtcgcgttctggacaaggcggccaacatcctcatgccattcccacccagcaagaacaggcctcggcccggcgactggacctgcccgtcatgcggcttctccaacttccaaagacgcacggcgtgcttccgttgctcgttccctgccgttagcactggtcccaccggcgagatgggctatgggtatggatatggccccccggccatgatgggccctccccctcaccacattggccatcacggacacggtggcggacacggcggtggccgcatgggcggctctggtgtcgttcctttccgggccggcgactggaagtgcggcaacgaggtttgcggttaccacaactttgccaagaaccaaaactgccttcggtgtggtgctggccgcgccacggctgctgtggtagctgactctggatatccttccccgatggatgccgggtcttcgtacaacatgggacacggctcgatcggctctgcccccggccctggttcgtttgctggccctggtggttttggctccggcgcaggctacggtcagcactttgctggcccccagagcacgtacgctcttccctctggcattggtggcggcgctgccccgtatcctcctttgaacactcactttggacccgcccctgggtctcactcggctggtccctttgacagccgtgccgtggagacggccttccaatccgctggcaacgggcccgcttctgccggtcctggcaacaacttctacggacaaaacgaaaatgaccccttcgctttcctttcctcaggcatgaacaacctttcggtcagcaaccaggatgcccgtcagaatggcggctcggcgcctcccaacaagtccccagcctaaggataagggggactgagattggcgccggagtccgggaaacatttcaacacttgttttttaggggtctgtgctgggctttttttagaaggctgtactttggaggtttggagggcggttactactactgggtttgtgcgggaggcggcggcggcggcggcggttggtaaaaagttgcaatgggatggaaagacaaaagaacaatgccatgctcacagggcgtcaccgggacggagttttttcaggaccgacaaacacacagcagctgggacctccatgttcctcgttgacacatgggaatcaatacgcccctgacaagaatttcattcaaagctcgataatacaccatggttcaaggttcgggacatgcgggatgggctatacaggacaggtgggcgtgcatagcgaggcgtggacagggtatatggtcacatttctccaaggtcagtggtaccggacctgagacttgctccttttctgtgtgtttccaagctcgcttttcccttcaacgctttctgcgttttttgtttgattcgcagttgctttcttgctttctttgtttctttctttctttctctgctttatctgctgcgtatttcaagtcactcatttctgcggtggaatcaaaatacatttttatggctggctggctggacggggaaggggacgggtacggggggaggcgaagggtgttggctttgggactggggtctgggttggtcggtaggaagggatgggaagcgtaaccggacagcgaaaggggtacggttggggtgttttctttcttcttgtttgtgcccatgttgtgtgtttaaatttactacttgagaattgttgttgtctctgttctgtttcgttcttgttgttctacccaccttatgcatctcacaatttccacataccttctcctcgaggatctcgacctacctcaagtcaactcaaccaactacacctcacatatatcgggtcactcaccttttgctgttcagttgttatacttaccttgtaccctactacttgcttccgttttgatgccagtgtttgtttgcttgtgtcaaccctcagatttgtgggttttttttggacgattttttggacgatagattgctttgctgactgaacgaggcatgaagtggggggcatgatgaaaaaaacgttctgatgcgatttatgatgactgtcctatgaaaaaaaaccctataaaaataataaaaaaaataaaataaaaaggaaaagaaaagaaaaagggccggagcccaatgcaagaaaagcgaatttcnnnnnnnnnnnnnnnnnnnnnnnnnnnnnnnnnnnnnnnnnnnnnnnnnnnnnnnnnnnnnnnnnnnnnnnnnnnnnnnnnnnnnnnnnnnnnnnnnnnnnnnnnnnnnnnnnnnnnnnnnnnnnnnnnnnnnnnnnnnnnnnnnnnnnncttctctactttttttcttcataccaatcttctttttataatacacttttttatatttttttcaatgttaccaaatgggcgatggagttggttcaacagattatctttcattttttttttattttttttaaaaaggtggctggctggcttattcaaccctatattgtgtcatattggtttttttgatagggctggtgaatcaaccttctgaccctgggatttggagctgttgagcgatgtttcactgtgagtatgatgatgatgtttgggatttgggtgtttttggcattggttttggcatgacatggcgataggatacccctttgacaaattaacttattaactcactaactatttggactgttttggtccctttacacaacggtccattgacacatttctcgtttacacatgaacgacacactactcattctcatcactcactcactacccacaacttcttcttcttcttcttcttcttcttcttcttctctcacctcccatcaacattcattcacacatactctctctctctttctcttcatcatcaaccttcttcacagagcaaaacaatcccaataatgcatttctaaagaaagctaacttacaacaaaccgcgttagttgattctctctctctctctcgcgctctcgctctcgcctacctattcgactttcatacatacatcatagattcagcgtacctacatactatgggcaatctctttgcgtaatgatgattataattataattccatcactgttcaataccttgcttgttgctcccgtggagaaacatatatcacacacatcatgtcctgcttagttgtaactatatcattgaacgagataccccttggtttgtttgctttggattgcactacacccttgacagcaaatcccgtgttagggagacaaatatctgcttttcaggggcgggaaacttgaattcttttttttttcaaattttctttttgtctcttcttgtttcccctctcactggggatggtacaccaaggactttttcgtccgtgtacccggaggaggtacgggtacatacatacatgaaccgatatcacttgtttcaataatcaacacacttcatatacggaacatagttaagaaaataaataagaaagaaaaaaaagaaagaaaaaaaagaaagaaaaaaaagaaagaaaaaaagaaaagaaaaggaagaaacaagagaatattctcactcacctacctggaggttacaacctttacttacttacccactccctaacagagagaacaaagacgctcactcactccctcactcaatccttcactcactcactccctcactcacctacctacctacctccataacacctacctacctacctccataacacctgcctacctacctccataacacctacctacctagcgagcatcctcaaccccaacccccccccccccctcccccgccccgccccgtccccgccccgtcccgtcccgtttcatcccctgtctcaccccccatcatgcttcgtaaagcaataatccctcgtctcacacccccctttcgtctaaacaccctactaaccacctgctgacactgggggttgctgcacgtaagatcctcccgtctggcgtcgtgttccctgccgcagacgcagcaggtccaggtcgtgacataaacggtgacgggcattttcgcgaggtcaatgttgtggtctgcaggtattagttggtggtgatggtgattgatggtgatgagagagaagcgagggacaggggattgttaaatacaacatccagggggagagtgacatggagagagtgatgataactatagcgttgtctcttgagatggaaacaacgccattgtccccttggatttctgtacaatttcctacctactctactcgcttcgcaagggcaataacatgccgttagagcggttgaaaggaagccacagacgacatactcacccagaataactagttcaacacagacaagtcctcgctagtcaaaccagcacaccggacacttcacacttcacaacacaaatccatccatccatctggaatggaaccctccgtttcttaacccctactcgctatatcaaattctgttctgtctcgctatacctccctcccccccccctttccccacaacccaacccaaaccataaaaaaacacaaaagaaacaaaaagaaaaccccatgatgcatgcacaacccccaaccagtcaatgacaacctcaaaatattcaaatttcgccacgacccagagagcctcaagagacaaaccacacaaagtccacgcaagaacaaaaagaaacaacgctttaaacaagcaaatcaccctcccccagctcaaccccccacccccaccatccacatcctcggcctctaccccttcacccgtctactcaccctcccgaacctaaccctcctcctctcaaccctcttagccagcttgttcctctcactcaactcctttgacaacatccacgacaaaaacccctctcccgtcttcagattctccctctgggccccaacaatcccaatcagatcctccacaacatcagccacagcctccacctcctcgttacccctgccgggacccttgatcaagaaccaaaagtgtccattccagcttctcgtagaattgctcgccatcttgcctttatctccgaaaggattgaatggcgccggcgatcgtctggtgattaggaccgagagtaacctggataagctggcaggctctcggttgcgaaggaggcggtcactgcccccatcttcaccccagtcgtgatcatcgctgttgtcatgatttaccgccaccgcctccttgaccacctccatcaccaccctcaccccagaataaacgcaatattttcgcaaaatacgcgtcttcagttgccctcttgttttgaattaactcccgcactttggcttccacagaagcgataacaaccctcgctggtaacagcgcaacccgacccggagccctctaagccaactcatgagcccccacttcctcctcctcctccccctccaccccttcttcctcctccccttcttcctcctccccatcctcctcatcattacccccatctcctccaggccccccaccagcaccaccactcccattcccacttaacccccagccattcgccgcacctgtcctagaaggccccccacccgacgtcccattagtcgtcgacctctgccccgggaccgactgcgccctcgcagcagcccattgtctcgcccgctcaggactcgtccatctattaccagcaggtagtcagcaccccttaccttcgacatgaaaaactaaaaaaaagaaaaactcacattttcaccctcccctcatccccacaagtagcatacatccccgcatccctcggattccaacaaaccgaattcaccctcgggctatgcgccatcttcttgtgcaccaactgccccgtcgtcctgtgccagacaaacacgttcccgtcctcgctcccgctgatcacaaggttctcgcccgctcccccaaaccccgcccggataatcacctcgccccccgtgtgccccttgtacttttgaaacacctccttcgtcctaaagtcgtacaacagcgcctcgtcatcgaccgtgttgaccaacaaccactttgagtcctgactcaggctgacgctagtgagcctgctctccagtatcaggtcgacctcgtactcccgacgagggatgtggtagatatgcacgccgcgcctgtcgtccatggccaccagccactccccattcgccgacacgaccaggtcctcggtcctatgccgcctggtccagttgtagagcaaacttccagacaggtcccactcacacagcgacttggccttgtcaagagacccagtaatgaaggtcctcccatccggcagccacccagcactgctgactggctccccaaacttctcgagcgccacgaccagttcccccgtctgcgtgttccacaccttggcctgcccatccatactacagctcaaaagcatcgtgctgtcggggctccacgcaatgttggacacctcagcgtcgtgcgtgttgatcacacgcacgtggttaaacgtctgcgtgttccagatgcaaatacccttggcactaccgcaggttgcgaggcgttcgccgttgggcgagaaccttatctgccacacctctccctgctgcttatccagctccaccatgacctcggttgggaactgagagtgctcgcaccggtgatccgagtagagcgacggcgggtttgtcgtcgtgtgatagagacacttttctatctggttgtttttcagatcgttgagaagcacagcaagtctctgttcggggagcatcaccgagggtgatatggattctgtcgtcccaagtcagcaaaacccataatccaacaacttggaaaccatcaacctaccagatagcttcctcaacaacttccgtctgctatcccctccggccccatcccactcggccttgcgcctcagatcctcctggtcttgacacattagatacttactcaaggtgctgataatatgcggctgatccttgcaaagcggcgtcagctctctcctcaggaccgccaacgccttgttcctctcgcccttctccagaagctccagaaacttttgctgcctaagtctgaacctcatcgagttgcggtccgccccaggagcgagaatcaaccctcccagtccccctccccccggcccccaaagcaggctctccgcattgtcccatctcccctccagcaccgccgcccggaaagccgccacgttcggtgactcgacctcgtaccccgactgctgcgagactatctgggccgcatcggcataccccaagtcatccagagcttgtataagaatcctcgtgacttcctcacggtcgtgaccaaagtaatctggcgggacgccgcctcggaggtggagggacgagtacatgtcctcgttgttgttgttgttgttgttgttggtgttgttggtgttgttggtgttgttaccgtttccggtttcggtgttgcttttgttgcgtctaaaagttgaaccgttggaagcccaaccggctctgtaggatgatgatgatgatgagggttgggaatcgtagtcggttctcatgccttcttctccagttcgtaatctcttgttcggtcgtgtttgttgttgttgaggtaccaaaatgccggcggtggcgtcttcgccttgagaaggcaggtcctcagactcgtcgccccgctgcctccttcctaatatctgctgtgttgtcgtcaggttgggagggttggaagcggcggcggtggtggcagaggtgattccagccgagggggcctgcggagcgggctgcaacaacgatgctatcgtcgaggcttgggtaggactcgcagtggtggtggtggaggtggctgacgtagtgttgagggttgggggttgctggtctgccacggcgatggatgttggggatccgcgggactggggttctgtcctcgcggaatgcctgtggaaatggttgggttaagggggctaggatatgaagaggagaggagagaagaggtaagcaaatgtaatcggcggcgggaattgttgagttgatgggcacgggcaaacgtgcgtggaaagcttctttctatggatgtcgtcgtattgctttgatgtgacgggtcgtcggagctaagatacggtagcggacttgctggctgagtgaggggcaacaaccccaagtggcttgctgacgtgccgtcactgctgctccggggcttgataattgttagtgaaggacgtggaggttgaggccgtgcctttttaaccccgatggtgaagaaagagaaagaagaataacgattgagcgatatgccctctagtgataccaaaacttattttcaaggaggatgttggatttgcaaattccagagcttgagaagaatgtctggggtctctggaaggggggatgttgggatgctgggcatgtgcctgttctgacaagcatccaatgccgcctacatgcggtaagagcatctgtgacctaccttacccgggaagctacgacagcgatgagatggagctacaaggaaagaacgatgtgtatgagctcagtcaatgattgtttatatcataaatcctttgctttgtcgaatgtcattgtaaagtatcaaaagctctgggtgcatatgtggcttgtccctcgtgatcgagtggggacacccactggccagttggtgcctcactgtgttcttcagcgtgcgattggcctggggaacagcctcatactcttatcgcgtgtgagtgcagctttaatgaaagcctagattattagttccctctatcttggtttcaaagagttgcaccaccacctctctgtctaaatcatctcacacaggtaaatccccctcctcaatcacgtctgcaaaaacactcccagtgcaaaaaaataaataaatatacatataaatatatactcaacgccacttgctaaaatgccatgccatgctaataaatatatgctacagctacaacgcctcaatcctaatctactctcccccctccccttcccttcctctcccttttgaccacctcttatatacaccatctcctcatctcatcccatctcatcccatccctctcataatctctctcgcaaaaaaactcctcgtcgtctcaaaaaaaagaaaaaaaagaaaaaaaagaaaaaaaagaaaaaaaagaaaaaaaagaaaaaaaagaaaaaaaagaaaaaaaagaaaaaaaagaaaaaaaagaaaaaaaagaaaaaaaagaaaaaaaagaaaaaaaagaaaaaaaagaaaaaaaagaaaaaaaagaaaaaaaagaaaaaaaagaaaaaaaagaaaaaaaagaaaaaaaagaaaaaaaaagggtataatggactcccaagaaaccaaaaaataaataaaaacggaagtcgtttaagataaaagcgggaatcatgtaatacagagaataggcgtcaaatcaaaaccccaaaaacgtaataatgcaagttgtgcattcctcctctttatcttcatcaatccccgtctctctctccatgtcaaagacgccatcgtggtaaataaactatcaaaacgcccaaaaagtgcagcaaaatgtttgttgtggttgttattccctcatgacttgtcgtccgtaaggtcgtcgtatgtgaagatgatgccgggggcgtgtttggtggtggtggtgtaatgcgtagagtttacaaaaaaaataatttaagaaaacgccgttgatattaaaaagcatgaaaaagagtccaagaaatccaggatgaaaaagccacagatgatacaagcgacgacagcagaatgagaacaaccatgagaatcatatccacaactcgggtggtatccagcaacggcccctctcgttcgtacaacagtggataccaaaacaggcacccgggggaaccaggcatctggatcctttcgctcccacaaaaatcacgtctctgccgggttccccctctcaaacatcgtgtcatcgtctgatgctggtcctcatccgagcattgcagcatcgcatcgttcgattttccttcgattttccagaatgccccttaggtcggcagttatcggcagttgctcgttagagaaaccccccttcgccagcaccgaagacaccgacgctgccgcgccatccgcagcgatcacgctcgctcatcgaagttggcgactgcggtggcaggggtgctggtggagcagcccggggatggaggtggtgaagactctgaggtggtgattgcggcatgggagggtcggccgcttcgccgttgctcccccggctgctggtgttgcttgtgttggtctggaccagcaacaagctgctcgtactgctcagcctcttggtgaactcgctaaagctcaggcgtttggcgctcgagttggattgccgcttttccgtctggcttcgttgcagaggagggggcgagcctgggccgaggttggacagtgaatcctcgcccagcgccgttgagggagaagaggcaatgatggtcgccagctgtggttgggagtgtgttctttgagacatgcctggcctcgtccggttgccagagtagcctgtctggggtcgaacaccgctactcgatgacaatgccattagagcctcatggttatagctaagcggggtcttgatcgagtgagttcttggtggcgggtgaggtcggtctcgtaggtctggtcgtccagaaatgtaattcaaggcccgctgagccgaactgtggtgggatgaaaaccggtcaccgtccaaatccgcctcatcaaatgccccatcgctatcgtcatcatcatcgtcgtcatattccgaggaatcatcatccaagtcccaagcgcttttcagcccagtttgttcgtccagggctgaaactgacgctgaagccgcggcggctgtctctgccttccgcctggcatcctcagcttctcgctgcctccttttgtcatccatgtctcgcataagagcatcaaatcgggccaatgaagtcagtttctcctcgccaggaacttcacgttctgagccgggaatgcgccgcatttggaaagcacgatccagaatggtttcccgtggccctggaggcgatgtaccggcatccataataggcgcaagtggtgttgggcccgaactgacactcccccgttccctcaccggtgagctgagagccgaggaccgcccttgtgccgaagtccacccctcgataaactcgccctggtactcgccaacggtggtggccggggacgggaggtcggccgggagcatagtggtgtaattctggaaagccatatggtgcgtctgaatcgagctcgtggccgacgaaagatcacttcgcttggatcgcagacttggtgaatccgagaaagtcacagggcggtcgcgcccagagtgcgtcgtgtggcccctggtgaatccgggtcgcggtccagcattcccgctgcctggcctctggctgtcgcttaattcccttggacgggtaaaagggttgacaaatgttggcgaagcgggcgtgaccgggctcaggggcgctctgcctggcggcatattgggctgaatgagctgctggatgaagcgagaccagtcctggagattgtatctgggctgctgctgctgctgctgctgctgttgctgttgctcatccagggtacggagcaacagctgtgccggtcctgtgtccttgttggacgtgaagccagccgtacgacttgagcgtcgtttccgcagcttgtccgcaatcgggtctggaataatgttgatgaccagagtcgggaggacaggtccttgtttacgatgggccatcatctgcacctgacagtcggtgatgctgttgattgagtactgctgtgaaggttcttggtcgtcctatcgatgccacatgttaggtcacgccacccttcgaatcggttctcctcgtctttcccaaagcacaactcactttggacttgtagatcgacagatagatgccttcggatggcactctgaacagctccctgggagccgagctcctgttggacggcgcgcggatgataccggccgtccggtcccgctgggggccacccacaaccagatatcgaggctggtgacacaaggtcgtcagtacaacttgtccacttgccggtcttctcaacagcatccttctcaacacaccttccacaacgccctcccaatgatcgtgcccctatccgggggcacgctcaagtatccctccatcttgccgcagttgtcgagaaaggccacggtcggtgcgattgtcgtatcagaaccaaagacgatcgtgacaatcgggagaaggtattaagcattaaagatagcgcgcatcgtgaaaagaaaaaaaggcgaactggcggtccacggttccgctttcttcgtcttctggctccccggtaccagctcgaacctggaagcgatcgctgcaaggggttctattccaaacgaacagcaaccgacaccacctcaaacaaacagcctggtagccggcagcaaacgacaaggagaagcggtggggaacagaaggcagaagggcaagagaagaagaagaggaaggatttctgtctgttgttcagaaaagagacgatatcacctccgaggaggccagtcgggtcagggttggacgaggtcaagcaagggacgaaccgtgcaaaccaggagtgtctggaggcgagattaataaaagagcccaccgtgccaagaggcattttcagtgagcgaacctggagagggggggggagcagcagcagccagcaggtacccaggggttgggatggctagcctgcgactctgaccaggttcaccaggtcgaccaggatgccctcggtttgaccccattggaccaatttccaattgcctgccaacacttggttagcatcactgcagtatccgcagatccagcgaggcaccgacccggtggttctgaccaggagataggaatgttcttgtttggcaaagtgaaacggggcagcattcctctgcaaagggctgaggggagtgaagtgagtgtgacagatcaacaaatggcagtatacatccatcaggtgcctcgtgccccttctttttcccgttcgagcaccccctgtgcagtcgctaatcgtgggagaatgtggagccccacctctggatcaatgagagcgggacttctagagagaaatgggttagggtggtctatcgccgggcttcggtgaaaatggaatccccaagtggcccatcaaattgaccaagatcgacaacctgtgtgtcaccacatcttttttgatctctgactctggagggaggggcacggagggtggtagggttgcagtctgtgcctcgaggacatcatctgctgtaagatggctgatctctgcagagaaacaaccgggttgcccccttccagatacgcctgaatgtcaagagctgtcgtggtttcggaccctggcggtccttgggataaacggggacagatgctgtacattgtctgcaatagccggcgctcatatagataccctgcagcaactttctcttataaagttgctcctgtcggtctgttgtttatcgctcttcccgtcggtgagacgcacatattacttacatatgttgtgccctcaactgcaataccactctagactctcactcactcagatcctgtcggagcggggaatttgatcttgcactcactcactcactcactcactcactcagtccaagtgttggctccgtaaaacggcccctctcgtccctggttataggccatgtggttcggctgctgctggcacggtcctgcaccatgtatgtatgcactatgtatggatggacagtacatgcattagcatacgagccaacgcctatgtggctgcgcaaaaaaacaaaaaggaagcttgcagtgcgacttgtcattgaattccacattcggggcattcttcgtcgtcgtcgatacacatccgctagaccgagagcagtttgggagcctctcgtacacttttgtcccctgcctccccgctccggagttgaccccgaggagaagacagacgtcggcggcagagtgggagggagagaagactcagatctaggttgtgccacactgtcggtggtggacgggctgtccggctgctgaccgcatgttcacatcccggccgaacaaacggggaaaacggccgggaggtcgcacaagagaaaaaaagaagaaaaaaattgcaatatggaaaggaggcacggagacaggtactcgccaccaccacaccacatgagaagcaggcatagtggcgtgctgccggtccactgtcgtgatggtcgagtgcggtgaggagcctgggtgtcgatagcggcatggggctgagagcgagccgcaacattgcatcatgccgccggtggttccagctcgtcgaatcagtttctcgttgccgcttgttttgtatctgttgatccttttgatctctggctcagatgctgctgctcaaaaatcgaagaggttggcgttggcgatcttgagacggtttgtgcatttgcggggttatgctcaattaaccccccgatctggcaggggtgaagaccaggggtgaagaccaggggtgaagaccaggggtaggtgctttctgccatctcgtcgttgttgacctctccaattttcatgtctcgtcttcccagcacgattccgcagtgatgcggcagcggtcttgccgcatatatgctgtgcagtatgcggtgagcaggacatgtctttgccccttggccccattcgaacgtcaacagaacggtgaacggtccggccctcacctgcattccgcttcctcctgaattgtcagtattgctttttctccgggttcaaagaggcccacaatcttcccagtcgagaagtgcctgcagcagacagtctgggcatgaaatggcaccaagtcggacacggtcagtcaagctgagcccaagccgtttgacggagcaaatctatggatttgtccgtctccatgccgcgttgcccgaggtggaaggtgaaggtcaggtcacggtgagacaacaagcttattttcagcgacgggaatcgttcagcttgacgaggtgccgcaaaagcgcctaggcggcgacggcagcagcgatctttgaggcctgcagaagccgagatcgaggtcaatcaacaacaacgttcttgtggggggcccggaagcagccgtatcgtcatggtgactggcgatcatccaagagctgcacctgaaacatcggtttccatgacggtgacaaaaaaaaatggtgttgacaggatcgagttgatgtgtggctgatcaatgccggcggaatctttccgtttcatttggacatcagacttgggaaggaacacctgcagctgcatgagatgcaggacatgaacctgccttcctcacacatccgtaccttccatatcaagtcaccactacaacagccacggcaagagccacctgctattgccacattcatctcaatcttttcttgaccgcccttcagacaactggaaagtctctccttctctcacattctttcggacctatcatcgcagctctttggaatattctgcccgaaatggctgatggcacgcatttgacaaccctctttggaacctagatacgcctatctgcccctctcctccccacccacgcccgtctcgaccagaaacccccgagtcctggtcgatacaggtcactggacttatctccagcacgaacatgtaccggtgcattctatccactgtatctacctgccttgcccgcgttatgggtatgttgggggcacatgcagcacgccatcatgcgccgtctccaataccaccaggatgcttggatgatatcagaaccacagaaacgaagttcaccacccctcctcagctttcggcacaaattcaaaacgacagtgttcgaggccttcgagttcgttccggtttttactagtacgaacaggccgcggtcgttggtgtcatggaagcacgtcgtcaaagttcccacggacctcacaatggtggagcaaaatcattccagacaagcccatgccgtttccaggatttccttccgaaaagtgctctcggaattccaagtcgtcgggctccgctagtaccatcgccgaccgaggttgtccatgttgtaattttaaaatacgcacggctcttaccggttcatcacttggtaaatatgaactgacccagaatctacgatgacatacacggcacctcttatttgttgctgaaaaagacagcctcctcctcctcctcctcctgctccaagtcatggccttgcagcaagtaaatatatatgccaattctccgactgggatttgtccccgagcgccgcaccgaagaagggggatttcaccaccgaaccgggctccactccgggccgttgcgctagtgtcgttttgttgcgcggttcctgaacaaccccatcagtcagagggtgtgggcacggactacgacgtcgacgtcgaggtgtctttgcctttgcagggcacgtgtctgcgtggcatcgttttgattcgaagtttttctgtgtagggttggcgataaggaggtgggctgttgttggggatcgagatacgaagtctcaggtggttttgcctttaaccgagcgttgcggcagagagatcggagctaacacggggtggtggttgaagaaagaaaaagggggcgatctccttcggtagtgtagccgatggggactttttggtgtgtgcattgggattagttctggttatgtaagttatcacaaacatcatcacaggtttgggaagcaaagggggttggatgggtgggcggtaaccatggcatggcattgttggtagctgtcagagattctgggtaagtcttttttggtcgttgggcagaagaagcggtattcccttatttgatcatagcagagaatcagatatgtttccgggtggtatggcacctgcagtagtcctgcatgcgagagctgtgacaacgttggatcgatgctgcttttggcttaggtttttgcttgggtgttgggttgggggttggaggggtgaggggaatgggatataagtgaaggggggtataatatggcgatgatgcctggttggatgcttatgtgtgcctgatgggataggtttgcagttgggtataatgggtgagagaaagggatcatggaagcccaatggacaaagtaagcaagaggacgggtattggaatagatgggaatacgaggtggcaaaaagagaaaagattccgcgcattactgattgctgcagggtccatgtcaagaagagatggatgaaactaactacagtcaatagccttccgggaagcaggttttgtacatgtagtagttggggacggtatgtcttgccggaagccggtgccgatatgcggagcatgatgaccacacggactcagtgtctaactgcacatcagtaggtgctcgttggccgagtgtttatggagagcccggcatccaaggacaatctgcaatctcatctgccatcgggctgtgagctgaatataagtgagatgtacctcccgtacgcggcaactagagaccccgtgccagatagctggtcatgagcacaagctttctctcgagggatacctcgtggttaaggtgagaagttagggtcattcacagattcatcaaacggtaaccattgcaggaggagttctccaaccaggttatacatgcatcatcacaagccctcgagcagatcacacaatacacaggaacacactggagctcatcaacacaacgcttgtcattactatctgctagaacacaactatctaacaatacaagccatcaggaatagccgtatctcctcgagtatcatacagcaacagacaccaaccaaactgccggtgtcgtacaacaacaacaacaacaacaacaacaacaacaacaacaacaacaacagaaaagaaacttatccgtggaaaaagtgtaaagcctgtaaacgccaatcagcaaaaaaaagtatcgtagcaaagaaaacaagaaggaatgataagtagtaagaaagagagagagaatcaccacggtgaataccagtctcttgcctttctgaccctgggactctcccaaaagtcgttggttggggagggccagcgttggcggcggattgtttccatgtttgggaggagggtgccgtgtggtgggtgttggagttggatcctgggttgctgttgaccttgggtggtggtctgctgcttgctggattgttgactcgggaatgtggaaggctgaccctgagtggtagtagttgttgactgctgcctctgcagcttaacgtctccccccaactccctctccccatcccactcatgacgccacccctcctccaacctcatcaacttgcccaccaacctgtcattgctcctccgtcgccccatcctccccacacaactctcttgtcaaccgctccatccggccatgtatcatggacttctccagctcctcccactccgcctgctgctcgtctccgtggcggctgctccctcccctgcctctccgcctccaactttccccaactcagctctctaatctctgacaatgcgtcccccaacgcgcccccctgttctcagtctccgtccatagatccggtttgatctcgtccaacctactttttatcctctccctttctcttgtatacttccttcttctttccgctgttcttcggcccagtcaggattnnnnnnnnnnnnnnnnnnnnnnnnnnnnnnnnnnnnnnnnnnnnnnnnnnnnnnnnnnnnnnnnnnnnnnnnnnnnnnnnnnnnnnnnnnnnnnnnnnnnnnnnnnnnnnnnnnnnnnnnnnnnnnnnnnnnnnnnnnnnnnnnnnnnnncggggagggggtgccgaatgagtccgagtctgagggtgggggtggtggtgtcatgtattggcctgacatgaaggtactaatttcttcgggggggatggggatggtctcgagttcggagtcgttgaagtcgaggtcggaggaggagttggcgtctgggggggagtgttggtggagggtgatgttggagggatcccagaggtgctgttcgggggggaggtgagtggtcgcttgactgatggcgtgggcgccgtgagagggggataggttttgtgaggaagggagctcagggccgaatagaatggggtactgctctgataggggaagggcattgaatgaggctgggtttgggggggcagagttggggggtgaggaccagatggtgtcgaggtggttgtcgtggttgatgacgtcggctagggctgggggagggggggactgaagaggaggaggaggaggaggaggaggaggaggtggtggtggtgctggacggagaacaacagtgatttgggggctgtcgatttccattttgtcatcctcgaactcctcccagccttcgtcgtcaaactcttccgactcagcgtcgtagccttcgtcttcgcccgtgttatggtctgggtcaatgatttccatctccacgtccatatccttatccacgctctcggccatgtcctggtccatgttagtgtccctatcatcgtctatgttcccaggcgcagcctcaacgacctgatcgttcacaaccccaacatcctccagcctgggcagcttcgtggccctaggcggagactccgactcatcactagacaccaccgtagccgccgccatagcagccttcatcctgaacagaacctgccggtgaatctcagccgtctcctccttccagtccaccttcggatccggcaccttgatcttaaacttcttccccttaaaccccatagccgtaatgttatacacatcctccaacttcctcctcgccaacctatacatatccatccccttgttcaccctctccttcctcgccatctccctctcttcttccttgatcatctcctccctctcctcgtccgtcaactccttccacctcaccttcctcgcatgcttgggctgccacatccccctctcaaagggcacattcccgcactccccgttgacaatctcattctcgtgcaaccccgccactcgttccagcccagtcttttcctcctcgtcctcatcactcatgtacatctcctccaaactcggcaccagattatccccagtctcgtagtcgacatgtccatacgtcatcatcccaaacaaacactcccacccgcacatcgcccccagccccctcctccccccctccataacaaccagctcctccggcctcatgagaatctcggtcccccccctctcccacccctcaaactgcccgacccccatgtcataaatctgcacccccatcaccggctccccactccatatctccctattcttcggcggcacgtcatacctcagcttcagctgatgtatccccgcctcggtggtgtaccccttcctcctcaaaaacttccacagcggactcagccccctctgccccataaacaacctcgccagaacagtcgaccccggcccaaagacgggatcgttgaacaagaggaccaactttacaaaaaacagctggaagcggtacagatcatcgtcggtgaggaagctctcgttgcaaaagagggtgagtctcatcctgttggtagggcactctaacaccagccagatcttttggagggtggcgtccgtttccgggagcgtgcgatgaccgtgtctggcgaggacggcgagcatgtcacgcacgcgggcctccctctgcaccacgtgctgcagccagagaaggcctggtacaagacgggttttgctcccgtcgcaattgacgtgcatgtcgtcttcccccagacaggcctggcccggtcgggggagggagatttcgtggtcggagcgggtgcactttcggccgagggggtcggggatgaaccagtgggcgtagacgggggacgagtagatcctcgaggccacgggggccatgtgccgggaccaggcaaagacaaacttgcgcatgttgtggttgagggtgttgtggaagccgcggtggagggcgtggaggttgacgaggtctttggggcggaggtgcttgcagacttcgatgaggagctcgggggtcgtgcagagggttgacagcaggtcgatggtcggtttgggacgtttgggggcccgttgtgccttttgccaggttttgatcgattgcttcagggagaggaaacgttccctcgcgatggcgcggtattccctctgcagcaaggggttgttgttctcgaggccgtgctcgatcagctgtgactcccaggtggcttcaaactcctcttcgttcttgccaaggacggctgcctcatcttcggactcttcctcgtcagaggaggcgaattccttgggacggccgtggtagacgagccggactctgtcggaaaggttagagacggtagggatgattctcccgttggcaacaaccgagcgagcctcctcctcccagcgggtcatgtggaggacgatggaagggacatcgggccggataccaagggcctcgatctcttcctctgttctctcttcgcgagcgacaacgttgtcgaaatagatccgctgggcctcattttgcgggttggcgatgaggtcgtccagatcccagtcgtcatcgtcatcgtcaaagaaatccaaatcctgtatgtcatcaacccagtcgttgtcttcgaggtcgatggcactcatggcgaggtggaggagggacagtcgtcttgtctgtggtctttggtcgtggtaggcgaacttttggaatgccttcggggtctttgtcaaagcagttgtaacagtgagaaaatgtgaatggagacaaggtcattaattgcagaaaagacgagatgatttgtagttttttaactgaatatttctgtgggctggcggcggtgtggtcgacatgcatgtctattcacagctattgtcaatggtcaacaataggagctctcaagaacaataggagcagcttatgcgtcacgagcccacccaccaccaggcacccggctcatagccaaccaacttccagctcttatctctctctacaataagagttcagctcttgtctaaagagacctattcaacccgataaaacagaagtcacaagtaattacaccgcaaagaagaaacctggaaaaaaacaatagggcccagaaagtacattctaggaaaacactactactagcttgccgtctgcggcgtgaacacatacaaaagaaacaggaaacatgccatagcctccgactccttttctacaaccaagaagaggaagaggaagaggaatagtacgaggttggacgaaaatgccaccgtgaataaccatgctgctgtcgctcacacttcaaaaagttttaccaccccgagtctgtcgcttgccctcgccggattgctgcgcgttcctgaccagctccagatactcatcgtacacagccttgggccggggacggtcgctgtcctcgctgctgccttgagacgatgtgtcgtcgcgaatctccaagtccgccatgggcaattgctgagatacactctggttgttcctcttgtgcctgaggacagtgctctggtcgctttcctcctgcttcaccttcacgccgccgggctcgccgtgttttctcttgatgcctttcttgagccctccttcctaggggatagatgttccgtcggcgctccccatttcgttcatctccatctcctggttcggcggcgagatgatgctcttggtcggctgccagatctgcagcaagttgtcctcggccgcgctgcagacgagccaggggatgtttttgttccagctaaagtcggccagatggttagtgtggccgccgtgcatgaacagaagctccggcggtccatcctcagcctcctcgggtgtttgctcgtcaccaataaggctgatatcccagaggataatccggcggtcgtagcctccactgccgaggatggcgtggtcgattgggttccaggccagagaggtaaccgcgtcgttgtggccctcgagcgtgtggatcttgccggccttgaggtttcggagatcccagataccaattgtcttgtcagccgaggcggtggcaacgaggtagttgaccttggggttccaggcgatggcattgatggcatcgctgtggccatcgcgggcaacggcagccgccttggtgctgtcagcggtgcggatgtcaatgacttgcatcgtcacatcgtctgatacggtgccgatccaggacggggtgattgggttgtactggacatcgttgacgacatggctgtggtgggtgtacttgcgccaaggcctcaccttcttgtcagtgccgctgtacgagttcaaatcccaaaccatgacggtattgtcttcgctaccggtcgccaaccagccaggcttgtctgggctccagtccagaccgaaaccttcctgcgtgtgaccaatgcactcgagctggggattgggggttcccgttggctgcaagctgtgcttggtccgatcgaaaatgagcaccctcccgtcgacagcgagcgtggcgatgatgtcgggattttgaggttggtatcgcgccttgttgacttcgcccgggtgatcgatcttttgcgtaatcgtcatcttgatcacatgcggctcgccagatccgcccaagtttccatgtccgccaatctcgccgcggtcctcatcgtagtcgcgagcgctaggcttgaccggctttggcacctcgacgtcggcgatctgaaggtagtttggcttgccctctgcagtatgtgttcccagaagcaggcgatgggtcgtgtaattcttgtctggaacgtccttaacgtcggggaaccactgggtggtcagtgtcggccactccaacgctgtgctgaggatcatgctgtagaggaatggactgttcttcttccagaccttgtactctgccgcaaaagttagccgctgccaagtctcgcgagctcaaccaggagaacacctaccctcgttgatgagtttttgctgcattttctcgtcctcgtcctcttcctccatattgactgcaaaggttgttagtgtctctcgcggcggagttggtgggcatatatagcgacataccgtccacgtcgttgacaacctcggtgggagccatggtggtgattgcgctcctgcagtccgcagatcagagatttggagtcttgaatcgcagaaaggcaggccgaagcagtgaacgagatggttctttgaattgaaagaaaccagtcgcgattggaacagaggtgttgttatctggagtcagaaaaagaagcttctgtttagttgccatgaaactttctgtacagaatgaattcgaagcaaggccaccgccatcgactttctcaacgcgacgcgaccacgcgacgtttaattgatttgcgcaaagccttgggagtaaagagcttgggtctccagaaggtctgtgctcgcacagttagagtacctaggtacctgggtactttgcggtgggggcgaggggcattgtggcttcggccagtcagtcaccggccattcgtcgtttcacagcctcactgtagcccgaggacaactgcaagcagcaccgtcagttttacacctctccaaacttaactcaaccaatcctcaacgtctaacccttccaaatacgcatatcaggcactcaagccccccttgcctatcgcacatctccaggaatatcccagtatcctttggctacaagttacgacaaaagcatcttctctgggacagacagctactttcctcttgttttctttcgccgccgctgcgcatcttactctgtaccactacaaagcgtgcgactcccgccaaaagaagaccgaccgtttttatttagtgtcggcatcaccttcaacgacgacctcggctaccacttctacgactagctttctgcaacagattgcgccttgttgagcgcttgccggcaggatggggtgagtattccatccgcatatctctcggcctcagcatgcgactgacagacatgatccagtgttcccaagtttttcagatggctctctgagcgttacccggcgatatcgcaactcattgccgagaatcgaattcccgagttcgactgcctctacgtgcgccagccttctcgagtcgggagactatacccatgttgtgccagtcgctaatatgttggtgattttcagttggatatgaatggtatcattcataattgtacccacaaggactcggatgatgttcagcaggcccgtattagcgaagaacaaatgttcatcgctatattcaactatatagaacatctcttcggtaagatcaaaccgaagacgctgttcttcatggccatcgatggtgtcgccccgcgcgccaaaatgaaccaacagcgtgctcgtcgcttcagaactgctttggacgctgagagggcccgtgataaggccattcaggagggcaaagagttgcccaaggagccaccgttcgactccaattgcatcacgccaggtatgttgctgccaccagacgtctggttttcggtctgctgaccttgacacaggaactgagttcatggccaagcttacccagcagctcaagtacttcatcaacaagaaggtgtctgaagacaaggactggcagggtcccgagattgtcctgtcagggcacgaggtccctggtgagggtgagcacaagatcatggagtacatccgcaacgcacgcgcgcaaccggactacaaccccaacgtccgccactgcttgtacggcctcgatgccgatctcatcatgttgggtctcctgagccatgacccacacttctgcctcctccgagaagaggttcagtttggccgcgtcaaggaccagcacaaggttaaggagttggagcatcaaaacttttacctgatgcatctctgcatagttcgagagtacttggagctggagttccaagagctcaaagtaccgggcgcaatccccatgccgttcgatatggaaaaggtcattgatgacttcatcttgatggccttctttgtgggcaacgatttcttgcccaatcttcctcgctttcacatcaacgagggtgcgttggccaccatgttcaagatttacaaggaggtacttcgaaagtgtgatggatacatcaatgaaaatggcagagtgaatctcaagaggctagccattctcttggaggagcttgggagagaagagtaccggttctttgagcatgaaaacgaagatgccggctggctgcggggcaagaagatgcttgaacatgacgaggccgagattgccagggctcgtgtcaagggcaagctgatcatcagctcagatcaaaagacgctgtggaagacaaagattcgaaagtttctgaccaaccggaattcgcaaactcttgatctcggcaccggcctaaatgcggccgaccgcaagttcgtccaggatctggctgatgctgcgcacattgagtgggctaccaaggaggacgacgatggacgtcgtcaccttatcctgaccttccctgtgagagacgacgaagacgaggaggacgaggaagcgcagtcggcatctcttcgcattgtgaagaagtacgacagtgcccaagttctcgacctgacaggtgccgatgcccagtccgccatggaggccaagtacaagcaaaagttccaagagtggaaggacggctactacaaggacaagttccccgagtgggccgaggggaagcacgaagatgagttgcgcaagctcgcagaaaactacgttcaaggtcttcagtgggtgctcttctactactatcgtggaattgcgtcgtggccgtggttctaccgctatcactactcccctctggtctcagatgtcgtcaagggtttgggtgcagacctcaacttcaccctgggccagccgttcaggccgaacgaacagctcatgggtgtcttgcccgaccgcagtaaaagcatcgtgcctaccgtatactggcccctcatgacggacaaggactcgcccatcatcgatttctatccccgggatttcgagctcgacatgaacggaaagaagatggactgggaggccgtcgtcaagatccccttcattgacgaaaagcgcctcctcgacgccatggctcccaaaaacgatcttctttccgacgaggagaaggcacgcaacgacttcggtgtggccctcaagtttacgtattctccagatgtcgattttgagtatgcctcatccttggtggatgttttcccgcacatccctcactgtcactgtgtcgaaaacatctttgatcttcctccggtcgaaggtcttgagtaccgcgccggcctcaccgatggcgctctgttgaatgccgaggctttggctggattcccatctctcgccaccctgccttatacggctagccttggcttccatggagttaatgtgttcaagcaagacagccgcaacgaaagcatggtggtgaacctcatcggcaccgagatgagaaccaaggtcgagagtgccaaggtcaagcttggacagcgctgctttgttggttatcctttcctccaggaggccaagattgttggggtatctgatgaactcttcgactatgtcctcgacggaaacggtcaggtggccacccttcaccatggccatcgtgaaatcgaagagtttggcaagaaggccaacaagattgagaacttttacagcaagcgtatgggtatcttgattggccctgtcgagtccctggtcagggtccaaatgttgaagggtctgatcaagaccgacgagggcgcgacaatcaaggagtacggcgacatcccgggcatggagacggactatgcttctcagatcattgtcgacgaggttgccaacgaggacgagcgctttatcgaaaaggccgccttgccgcttgaggaagagttccccgtcaaatcgataggtttcttcttgggcgacttcaactatggtcagccattggaagtatctggctacaccaacggaaagcttcaggtctggcttgccacccttgaaagccgggagcctgactttgcgaagcgcatcatttacgagtcggagcggggcaactcttacatgccatcctacatggtcgccaagcagctcgacttgcaccccttggcgctcagcaagatcacctcatcttactttgtcaagacggttggtgatcttcgcgtgaacttgggtctcaacctcaaatttgagggtaagaagcagaaggtgctcgggtactctcgcaagtctcagaccggttgggagttcagtagtgctgccgtgcacctgattgttcagtacatgaccaacttccccgactttttcgccggtgtcaagaggaacccttcgggcgccgagttgaaggaaaccgatctctggagtgaccctaatctggccacagcccgggtcaaggaaatcggtgcctggctcaagacgctcaagaccaactcgatggagcgcgtccctcttgatgccgagcagctggactctgaggtcgtcatgaggattgctgcggaggctgacagtctcaagctcagcgctattcctactgttcccaagaagatgaatggcgtgcccaggaatgcgcttttgaggcccgacgatgccgaacatcgcctgggcaaccagcacttcgccttgggagaccgcgtggtgtacgttgcccgcaccggcaaggtccccatcgccttccgcggcactgtggttggtatcagccgcacccccacggccaagttgttggatgtcgtctttgacgtcacgttcatgagcggcactactctcggtggccgctgtccgccgttccgcgggcagactgtgccgtctactacccttctcaaccttaccggacggcaggttgttgccggttccaagaaccagctcgctcgccagcccgtcacaccatcagttaccaccttgactactcatggcgggtatcacatgcaccagggcaagcgtctgcaagatgccggtgctccttctcaagctgcttggggacggggtggacggggtggtcgcggcggtggcagaggtgggtacggtggacccagccaggacggcagcaatggttctgcttctgctccgccgatgtatggggctgttccgcccccttccagccttgatgctcctaggggaggaagagcgcgcggacgtggtcgcggcaatggtggtcagaggggagggcaacagcacaacaaccttgccttccgccctgcgcctcagcagcagcagcagcagcagcagcagcaggttgatggtcagaatggagaaaattcacgtggaggccgtggcgggagaggtggctttagaggaacgccttatgctggccggggcagaggtggtcctcgtggtggcgctagaggtggccagggtcagggtcagggtcagcagcagcagcagcagcaacaaagcgtggcgattcctccttccgcgagctagatgttctcggggggctatccctgagcttaacgttaccacggatctaatgggtttggggcgggcacctcatgaatgacgatgacgatgacatacatcaaggcctggctgggtttggtttggacttggaacaatggacaggttggggaaatggtttccggctatatggttctgggttcaaaaaaatgtctagagggcgggtatggattgtcatcagggtcagcgcggaatttctgttgttgaattggtatggtgtatgggtatatatcaacaagcgtatagtagttgatgattgagtattgtcttgttgaagcagcgctgtagggattagaaattggagtagccattgtgcaacgaggtgtcaagttcaaaatgtggtccaaatctcaatcagaagcccaccctctgatggcacacacctctcgacgaaaccgccaacacagaggttgcataagacgggtggttttacagtcttggacatttagcatgtcaccatgatattatgaaagcctgtcgtacactcactacctttcgattgaaagaaaagctggtttgtttgcacaactgtgttaaagggcaattcctcagtattttcaatggtatcgttatgtctcgatatacactgttttctataattttaccacctcatccatcaagtatttaaacccccgtcccccccgaccctcccattggacttctttccctcatcatcagcatcatcatcatcatcatcatcatcatctccattcaccaccagccaaaacaaccaagtaagtcaaccccaccaactaaccaacccaactcctacaaaatgccttcccccaccatcgtaacaaccccttcccctctgcgaccactgcctccgttcagcagtgggaacatcccccttctgctactacaacacccggctcgggtgcggcagcttggggtgtgagcacgagtgctttaagtggaagaaaatgccggtttttgagccggagagaaaaaagaagaaggggggtgaggatgaggatacaaagaagaagaagaagaagaaggggggtgaagaaaacaacaagaagaagagggacggcaagattgagagccttggatggtgtggtatatgaagtttgattaagatggatttgactaccctcccttgccataggtgagtttttgcaagatacacagttggagggaagaggtaagtcagccaggacgtgatgattctttctctccctgggggagagaggggtgtgtagatgccctggatgatgattagctaatatgatagggtttttttttttggtttttttttgcaaacccaaactaattaatcttttgaatttgtgtgataataataataataataataataataataatgataataatgataataatgataataatcgtgatgatgtatgtgaccttccattgttaacagaattaccttttcagtacgcgacgcaaggatccaatcgatcgcttgaaattgtgcagaataattgtgatgatgtgaacttgttatcttgaccttttccttagaaagagtcgaaataaagatggcatttgtattaatattgtgatgtgacttttgggattataatagcatttgggagaaagaatggttgatatatagctgtatagaaacaatctagctagctaggtggtattgtataaatcatggcatatttaaacgctggttgcctgggtgtgatgaggggcaggcatcaccacatatacatatacatatacatatatatatatatatatacatacataccactggggcaagcaagcattgacagccactcttgtagtttttgatggcgatcacgctggtatcgtgcagctgtccgtccgtcctgccctgccggccgtgcgacgcttgggttgaacgagagaatataccaagttacgtccacatacatatatatatatatatactttgcaaattggagactcttgcttttcagcttgggaaaaagaaattattattgatacagttgttcgccaaaatttaaataaaaagttactgttttaccaacccgagaagaaaaatatagtaccatgctcatctccaccagggagatagattatcgtgtgtcctttccctaacaatcgatcattcttgtgttatccactcacctcgcacatcatacattccgagtgctcacctgttcgttcctgacaatcttgtttgttactcccagcgccaaattttctcccccttcttgaacctgtcagtgtaaacgcccctgctcctctcccggcgttgaacccgccctttgggagagaagtcgatgtcgtcgtgctcatcgtagtagtagtagtcagagtagtcgtacccttcttcaaagtgttcctcaaggtcagtagctgtgtacctcctgaccagaagttctgataggtggtgtacgcaggatgggtcgtagcacccggggttgtaggtgtcattgcagcagacaactcctgctctggttgaggcccagcaaggcccgcagaagtggggatggggacgtgtcatgcgagccatgatgccgttttgttgggggatggggggttaagaaagggttgaccttacttgctttgctttggggggcaagtgtgtgtgtgtgtgtgtgttgggttgcaagtggtagttagtctgaagacaatagaacgtgtatgcggtatgtgtgtgtgatgtgacaagttggtctgtgatcaaaagtgagccttgattggaatgatgattgatgattgcgatgatgagaaaagaatggtagtggaaggtgagaggtagaaagggcttaaatacacgagagatagggccttgagcaagagtttgttggcaaggacagcaagattgaatgaacaacagttatcttgagagcagtacaatagctttgttcgagagttgtagcctaagaggtcaatcttagatggtgtgataagtcaaaaatggtgggttggtgatgggattgggcgattgttttgatagcccctttttggttctttgttttgttacatggcggcctgacagtcactccgagttctcaacaaaatcggtgccttgagtaggtatccaagatagcctacaatgttcgagattgtctaaaggccatgcacagacatcgtggagagacatgaaattcgaggactgtaaacaaagcagtcatgcgtataatttctcttgtatatatcatccaaataagccttctcgcacccaaaaagttgttgcttagtccattaagcctctggtatcgtggaatcggatgtaaaacctcgtccaaaaaaaagaagattggtatcatagaatcgaaatttgtgtgtaaaatctttcccaccgagaagcaaatcccccatcaaagttcccttccctttcataaccattctttcaacagttcgagacatctctcatcaacaaaagaaatctaagacctccccaacggcgagggggaactctcaactagtgtgtccgggctgctaatgccgccactcccatcactcaactccctctttaccgcgggaatggtaggcggtgacagcaaaccctcatccttgaggacatccttccccttgcccttgtcctcggtcttctcttcctttattgttcgcagaattggtggctccgcaacaacaggtttgatcgtcttttctggtttgggctgctgtgttgctgttgttggctgaggcgtggcggtggaagcaggctcaaccacaacaccagtcaggggggctactggtatgatcctcttgtctatcttcagcacctccttcgccaaagcccggatcccatcgtagattatgtccggctgctcaaacagcagtagtgatgacggaggctgcgaatcaacccgggaagtgtgcagcaccgagtacgagccgtgcgcccaggcaggtggatagaatgtcgactgtgctcttccctggtttcgaccaataccagacaaatcaagctgctccacatcgtccttttcgttcgttgctgctggtgctgcagtcgctgtcgaggaagagtacgaactcgcaaagaccgtaatcgcaactttcggctttgttggcgttttcgccggcagctgatgagaagagtgatgcagcgaagtccccgaccaaaaccgcaacagcccttccggtccaggtaaccaggccaagttcgtaagtgtgatcaattcctctcttgtgaatgtccctgttgatcctacaaccccaccattgccgctggcgatttgtcgcaggtgcctcaacacaaaagccagcattccaactggggagtcacacagtccgtatgccagggtattcgggtctcttatctctgtgattggtggtgaagaagagtgggagtagtaccccaggaagtcccgctcttcatagccagccacaccacccctgaagaaccaggctagagaccattttgcgaattcgatgggtgagcttgtgagttttggcgcggagaggacaggggagattagatgggttcccaggcaggagtcagagtaggtcgttgagatggcgtgggcgaggtggaagtcgattcgggatggcgaagaggagccgggggacgtgttagttgtcaggtagtgcctatagcccaatcgagaggtcattaatgtattaaatatcgaggccgtggcgtctatgggtgagcggttcgcgggaatggagtcggagaagcccaatcctggcaaagagggtatgacgacatgaaaagcttgatgagtcgggtcggatggggttgtgagggggttgatgaggtgggagagggagaggttagttagtgggaatggtggcagcaccaagagaggaagagcgttggcggaagaggaccgggcatggatgaagtgaatcctgagaggggatgccgattccgacaaggcaatcgaggtccgaaactgggggatgttggcgttgaggttggactcgatatcgcgaaagttgtacttttcaagccagtagtcaatcagcggctcgataacaggctttggctcccaccactcggtcgactttggcagagacccctcatgaggcagtctagtgagctcaagcttctgtcgtgcgaggtggagatgcctcgtcggaacctgtacaacctgtcagtctcacgaaccactctgaaaacaagacggacacttacatgtatcttgtacggcctgacctcatcggcagccggcgatcccaccacagcgtccgccatattatgtctccagtattatacaccaacaaaattaccacgttattattcgcataggtatgtttccaaactcaagaacaacatatatctgctctcgttcacacctcaagatagactgtcaaacgaacgacaaaacgatcgaacaaaaacaaaacaaaaaatagttgggacgagaaaaaacgaggtgtgttccaagaaaggaagaagggtcatcgggtattataagcgcatgaaccacaccaccaccaccaccacaacattacatacatgcatcccaccccacacgctataacacaaatccatgccataccgcattctgcatcaatcacctgccgcgaatttccttagctgattcaactttcatgtgtacagtacatacagttccttatgtaagtaataaacccatcaggtcaacaccagtttcgtcaccctaccccgaacattccccctccaaccaccctacctccctctaaacaccgaacccttcctccaccaagcggtcaaggaaacaaaatgaaatgaaaggagcaccccaactccatccccatccccatccccatccccatccccatccccatccccatccccatccccatccccatccccatcacccggcggctggctggtggctggctcccgccaacaacaaaacaaaaccgttcaggcagggctgatcgggagtccggggtggaagagagcacgccaaaagaaagtgacaaggacagtctcgcagtttcgtcaggaacaaatgctccccccccccccatgtccgctaattccagggtcctggcccgcgtgcaccaagggtccaacctgtggctagtaatcctcccccaacgcctcttattggatcaccacaccttcaatacgccacaccggaccgttatgatcaaaaaagtacatgaaacagtggcggtgctgacgaaacgtcgtagtgcagatttcggaaatgatcaaccaaacccagcctgactgtggcagaaaatgtggctcgttagtacccttcctttcagtgaaaaaaaaaaaaacttggctattgttcctcatctcgtaaccctcccccgagattcattggaccaagactttatgcaagtgctcccaaggcccgttgccactctccccggattgccgagatgccgttgtatgtggtactctgcatctgtggtgtatgtaaaatgtgcttgttgagctactatactgtagtagtgctctctctgcttctgtacctaatgcctatcatgtccccccaatgcatatgatctgctcaacacacacgcaagcaaacttcatcatgactccgatgatcatgatgctcaactgtgcacccgtgttcccaaaaataaaatggttctaggccccttttcgagtgcgatgtgagagtgtgtgtcttcaagccacaccatccagaccacacagagtggcgagtgacgatcaccacaaagttccccctttttcgcagcacagccacatgtcatgataacacaccagacgcgcgctccccctatctgttcagcagaaaaacatgtatagcattcgccatccaaccatcctctccatgctctgtcagagcgtgaagtgagcgtctagttctagctgcctctcggagtccctccagtaggcgcttgacctcccgctcccgcccccccggctcctcctctcaaattgatctgcccaatcctcgacacaatattactccccaccgcgtccaccgcccccctcgggctcgtcaggctcggtccctgaggcgccgtctcctgcacccggaagagcttaatctgcgtcgcgttccatatccccatcgtccccttcgacacctgcacctcgctcgcaaaaatagacccccacagcaggctctcgtaccaccccagtgccagcggcgaccactcaaacgagtgcaccctcgccggggtctggtccacacccacgagctgaatctccctgatcttgtccaacgtcgcaggcagtggcggatcagacgcgaaagcctgccgtgggatcagagctgaaatctgttggatcaacgtcaagatggtgtgcagtggcaactctggaagccacgtctcgatccattgcgttgatggctcaaagatgccggagactgactgtgacatgctgcccaggctggtcgtgctgttctgacgcgagaaggtctgcgctcccgccggcattttgcctctagctttttccgacatgccgcgcagctgtttcggtacatcatcatcgaccggagacgcgacagaggacgcccgtgatggattctcactggggctggaagccgccggtgtaggccgctcctcatcatcactgtcgtcgtcatcatcgtcgccgatagcaaatgtcccatcttcctctggaacatcgcccggtgcgggtgctcgtgaggaaagtgtcaccgggcttctcagactctcgagtgaacttctagttgagtcggcttgtagcgggtcatttgaagccccagaatccttcctccgtcggttacgtctttccatttcttcatgcccactttccagtgtaaatgatcggagggcctcgaaccttttcttgtttctgagtatcgcaaacaccaagtgcgcgttttctacgacactgtcagtatgcaatcttggactctttttttttggcaacaatacttacggatgtattggtgttcaacgatcgagttgatcgcctccaacaatgaccgcagtaacgaatggttggtttcattggctaggagaaacgacggcgaagacatggagttgagcaggtgcataatcttggaacaggtaggggcgcttaacccatccagatagggcgcaatgttgttgatgatggccagcaatgccggatagatcgctgtcagttttccctgactggttgtgatgagagcataaatggactgttgttgtcagtacctcagtgtcttggactggatttagaccaagcaaaacaactcacctgaatgagaaaatcagcatacgtccccctgaaccccgcaatccgaatcgcggggggcagagtgtcctgggcatcaaacgacttgttcaagtttgtcccaaagttcttctctacgctcagcgtctgcagcaagaaggcacacatcctcacgacaccttgcttggaagcatcgttcttgtactccaaggcgtagaacaaaatcaaaatgacaaaatcataggcccttcctgtgtcgatcaggaaagacctgaatcgcttgttacactgggtcacctcccagaacaatattatgatctcaggggcaaagcggacagcagcgtgagcgcctggaatgtacgacccctgaaggggttggttcagcactcgggtcatgccgtccacgatgaactgaaagtctgaaggcctatgtaagcggcctaggtagtgtcggtagtggttttttggtgtcgggagtcctgggttttctgggatggtgtataggagggtggttaggaggaattgcagggtggaggtaaccaagagctgcttgggatggttgggcaccagggcgttgtagggtgctagccaggtagctgggttatatttcagagtctacattcgttagttgtggtcgttattcacagttcaagcctggacataccgtattcaacagcgaacagagcaccgagagaaccacctgcttgtcgggacaagtgcagatataggtgagagccttggtccccgtctgaggcagcgtcgccaaagacaagtacatgctcttgctggctagcgtcaaaagcaaccgaagtatctcacaccgattgctctcatgctctttggtcgtggcgataggtactgtacagccaacgccggtctgccagatgctataagtgaccttgggcttgccatttggcaccttggtgaccgtcaaatcggagaaaaagagcaggtcggtgacggtatcgatcagctcctcagccagaggtttcgcatcctcgtactccaccaccggtgtcttgggtacaccgtctgcgccatcaaacagcacttcactcgcaatcgatgactttctggaccgtttgcgccggggagcccagagaaagctatcctcccagtcctgcaagctctccttctcgtagatataaggcaggaccctcgtaagaacgcgaacgcagttcagcacctctcgatctggggcaagctcgtggtcgggaaaggacgggtggtgacgaagcataaacaggcgcccggttacagctgttatcagcgtctccaggttctcgagcgcattatcgcgggttcgtcggacatcggccggggcaaaaagactgaagatgtcgtccgaggactcggggagctcccagaactggtgtgcagcaggtgtgttagcgtgacgtattgccctatctagcaggctgctggctgtaaacgcacctgagcccagtatggatcgtcagcaggaatatggcgttcctccgacagtctaaagatgcctttcttgaagactagtttggagtcgctggcacccattttggcggttatgttaggtgcatagcatcccgtcgttcggggggggagttggatcggggatcgggatctggatcgggtggtttatagcagcatgttcagtacttcacagtgaccgctgtcaagcggacaagctgggttacatcacagcgggccgcccgctgataagatctaccatacataaccctaacattatttcatttgcagagcttatccccgctaagtgcatatcaatctggcctcaagagaacctccattgttagcagcctccggcgcaacaccaagctttccctttgcgatatccccacgtttcaacatccagtgcgcaaacaccaccacccccccaaccagcaaatgaaccccccgaggtgacacccttattctcacccagggaatcgactcaattcccttcccaacccaccgcgcaagagcgcacccaccacatcacaatgtactcctccctcgtccgcctccaaaacaccttcggcttcttcaccaccgtcgccttcgtcgtcgccctcctaatctccgcctccgacttcctgtccccccgcacccccaccgtcaacgtcctcaaaacaacccagctccaaacggtgaaaggccgtgcggattactactcgtccaaaaaggaagaatacgccatcatcaaattcacccttgacgccgacctctcctccctcttcacctggaacacaaagcaagtctttgcctacgtcacggccgagtggccctcggcccaaaacaacaatgcgaccaaccaggccgtgatctgggacacgatcatcacggcgccgagcagtgaccatttggggaattttagcccctcgaagcttaagaggttgaggaagagcgccaatgggaaggggattgatcctagccggtaggcgccatctctcttttttaagtagcagcaatgggattgctaacgactcaacagcggcaaactccaactcaagaaccagcgcctcaagtaccccctcacccacccgacaggcaggctcgccaacacagaagacgtccagctcaagcttcactacaacgtccagccctgggttggtttcctgtcatggaaccaggcccaggactggggcaagtggaaggcgctgaagaatgggctgagcaagaagtttacgctcccagctatcaaggtgaaggagcaggccaagaagaagaccacaagggcttaggggatctagcttttgttgggacgaaaaatggagttattgatttagctatttgggggtttgcttcaattcattgccggttttgacatctcatttcctcacaggcgctcatagagtgtgaagttgatcactattcaagcccacaccatgaaaaatatatacacactgtatgggaaaagttaacaaaacccaatcacaaaacgattcataaatgctatgccaatcaaaacacacaattcccctttgctcctataccaccccccttccctccgtgttgatcctattcctaaactcctctcctccctacttttcatcccaactccccgactccccgacctacatgtccctttcccgtacagccactcagaaaccatcctgcctcaaccaactgctactactccccctcctccccctctcatacaaccacttgctattcaacgccacactgctcctcttcccattcaccggcgtcggcgtatgcagataactatccctcacactatccccaaaactccccgtcgagctcgcaaagctgttgttgctcgtcgtgctgctcgcgaagctcatggtagaactattcagactattgctgaagcttcccctcctcccggtattttgcgttgccttttgcaggagagggctgaccaaattggcggctttggtcggggagggtgagtaattccccaagggggtgctgcggttggacaagggggaggaggtgtaagaaccggagggggagccggctatggagggggtgcgggagtatttcgggggggttgagatgtccgaggcgggggtggggggtgctctgatggggggaaggccgaggaggtcgcgctgggcgggggtgaggggtatgtcggagaggtcgtccttggggcggactaaggggaggagggcgaggaggatgttgaagagggggattaggaggagggttagggggatgtaagaaccgtaggggagtttttctctagggagagggggttagtaggttgaaaaagggagggttcgagggggaaaacgtacagtcttatcgggaggtgcggaagaagaaatcttctcaggacttgaacgccggcaattgcgacgacattatagacgatttgcaggacgttcttttgggagaaggtggttctggcttggcgctctgtgatctcggccaggcgagggtgtttccagttgccggggctttctgtaaaggcggatggggacgagatttgctttgtgggcgtcgatctgacgggtgttagggacataatgggcgctcaatgggcggcgacactcggtcggaggaactgtctcgcgatggttggcgatgcggtaagatgcgctcagtgttttgagagctgtaaatatcgtcagagctatgttgattagaagttcatgtcgcgattgtcgtggcgacggcggtctatagttgttgacccctgttgatagtggtggttagtaagatgcgaacagccgctccctccttgcgtctcgacttcccgtgtgtccgctcactgttctgggcaaaaagtgacggtcgcgtcaaaacattgaatccaggtccccagttctccaggtcgatgcaaacgggttgcaggggtcctggcagctgtgagacttggcatttgcagctgtctgtttccggcaggcacaacagagctccccccgccatcgcgcatttccaagcaaccgccccgcccccgtgtcctgtccggcccaaaacctccagctcgcaccaaggtcccggatctccacccgtcccggcccggctgcatcttccagacactaacgaacagggccccttacaccaccagcgcggggggccacaacttttgtcttctttgcatcacaaaccaacacagcacagtacagcacagcacaatcaaagcccctcgcccaacatggggacctttgataacctgctgctacagcttgacgagggcgtcacaggcctcttcaagcagtggaatatctggaccagtctcatcgtcaccctcttcgccggcctcatcacctaccaggtctcgacccgccaagatcccgatattcaccccttcctcctcgctcgtcagtcccaggcttcccctgtccgccagcccaaagaatcctccgtctaccggcctcaagctgccccccatggtctgtctcttcacaccggcttaaacgtcaaggaccccggcgccaacaagtgggcgaggggccgtgatggtgatctcagggatatctggcggcagaccctcgccggcgtccaagaaggtgacgacaagggcgcaaagggccgtatcctcaccgtcgagggcaccgagaacgtcaaagagcaccatctcgacgctcttactcggcaaatcaacctcatcggccagcatcttgtcgaccaaggtggcaaccacgtggccgtctacctgcccaactctgtcgagttgatcgttaccctttttgcctgtgccttctacaacttgaacgctatcatcctccccttcaaccaacccgacgccgccgtcatcgacatgctccgccgttccgccgccgacacggtcatcaccgcccctggatctttcccttttgacgtcgtggttaagaactacccctccctccgccaactggtgtgggtggtcgacgaaggaagcaaacacatggactggaacgaagtaccccagggcaccggcagcaaagtcaatgttgccacctggcaagacatcatcagcgactcccccgtcgaagcaggcaagaccctcccccctcttgaggaccagtccgaaccaaaagacatcaccctcttctggcaacaaggccccgggcaggaagaggaaatggtcaagttcaccacaggcaacatcgtctccgccattgcagcccagctaaccgccatccccaccgcccgccgtctcagcccctcggatcttttcctccctgcggactcgctggcaaactcgcacactttggttctcaccctcacggctctgttttccaattcctcggttgcgttcaactcttccgcgtccgaagcgccctctttgtctgcgatcctcagctctccggccgtttctcctactgtcatagctgtcacaccttctgctctgtcccaaactcacaaggaggtctcgtctgctctcaagtcatcaaccataggcaaggacctccactggcttttgtctcggtccttggccgaaagtggtgctttccccgagagtgggtttctgaccaactattacaaccaagctttccgtcccaagttttcgggcggaaagaagttgaggttggtgtacactgctgagaggattaacgggggtgggaaggtgaggttgagcggggaggagctgaatgatttgaggttgtataccggtgcgagggtggtgtacgcgttgacggcggcgagggttgcgggcgcggtgtgtcagacgaatgtgtatgattatcggggaggggagcactttgggccgccggtggcaagtgtggaggttgtgttgagggataaggggggggtgaggaatagtgatgaggagtcgcaaggagaggtgagttttgaaaaaaaaaattgaaaaaaagaaaaaaaaatgaaacccgagagaatatggtttgctgacaaagatgatagattgtggtcaggggcccggctgttgctggaaaagaagctgggttgggggttgtggcgagggtgagggaggatcatactgttgcgttgatttaggggggggtgtggtaagtgatggtttttgtttgaattctggagaaagtgatttgtacatgcttgcatagcacaggcacaatttggaatgaacaacagtctttaggtagacaatgacagcagcatagatgggaaataaatcagatattttttgctcgtggtatccttcaatgctaatcctcgcgccctgcgcccatatttatgcccaacataaatgaccaaaaaacacacacattaagccccgttcctatacaccatcgccccctggttcctaaacataatcgtatccctcctctgcatcatcatcaacgccctattcagcgccgcctcgctataccccttattctccaccatctccctcctcaagctcgccagactagtgctccacccaatcgccaatctcctcttcagctccgactccacacgggcgacctcctcgttgagctcccgggatccttggttagaaccctggttgaccgcgtccatggtcgagcagaggaacagcctgatcgcctcgtcaacgtgctcttctgtcgcgacgggggagagggagagcttggcgagggactcggtgatgcggacgatggcctcgagctggcggacggtgatggggatggaggaccgggcgttggcttcgagttccgaggcgtggacttgcttgcggatggcgacaaagtgggacgaaagcttctctgctgccgcgtccgagaggcggggggcgcagcggctacacggggaagttagtattgcgagggcaaaaaagggggaaaaggggggacatacctcttgcagtagctgatatacctcctcatcttctcaacaggaatctcgctctccaccgccctctcatcctgcatccccctcccgcccatgtgaatgcccattacatgcttggctattctttcgtccttgccccgttcgtgctcatccttgacgatgaaaatcatgtcaaacctcgacagaatcgtcgtctgaaagtcaatattctcaccaggggtcttcatatcatcataccgcccaaaaatagggttcgccgccgccaacaccgacgtcctggcgttgagaatggtggtgatgccggccttggcaatggaaatagtctgttgctccatggcttcgtggatggctactctgtcttcgtctctcatcttgtcgaactcgtcgatgcacaccacaccgccgtcggccaggaccatggctccgccttcgaggtagaattccctcgttgactgatcacgctggacggaagcggttaaacctgctgccgaagagcccttgcccgaggtgtaaatcgcgatgggggcggcttgctggacgaatttcaggagctgcgacttggctgtaccggggtcgccgagcatgaggacgttgatgtcaccacggagcttcatgccatctggcagaatcttcttgctgccgcccatcaggaggcacaaaatagcctttttgatatcgcggttgccgtagatggagggagcgatgcaatcagtcatgacattgtacagatctgggcggcgggagagttcaagaaactcttgctcctcctcttcggaaaatacggcctggcccttggcggttgagtcgatgtcggtctggatgcccactgcgcggaggtaaggggtgcggatggccacggcgccagaggtgtttttggagcctttggattggtagatggagaagatgcccattactgtgcatctggatccggggacgacacggttggtgaggtagcggtcggcagagatcaagacatggcgggggagttcaccgaccgggacttggtcgggtgcctcctggagtttgatgatttgctggtcgacgaatttggacttttcgtgaacgacaaagtaggggtccatgggacacttctcggttgggtcatttgggacgcgagcgcggccgcatgttcgggggagagtgacgccgctgaaaccgccggatacgtgaagatcttgtgcgtgcttgcatgttcggcattcgatgtggacttctgtcgcctttgaggacatgaccgaagcaccaatgacgatacctggtactctgaccagcctcgagatggtgagggagtccaggttacggatggaaatatcttcggcattcgagtgaaggaggagttggtgaggcgggatcttgacatttgagtcgtgagggaaaacaattcgatgggtacaccgctgcagggcgagctcgaagagggggatgatttctgctggctccgtcaccagtttgtgggcaatctcttcgttgaacttgatcaggtcgccgatgttgacatcgcaaaagtatgttttcagcagcgcatggtcgcgcaattgatctctgtaaatgtagacattatcgagtctgaagtcgagaataaaggcctcgagaagggcgcggatggcactgttggagtcttcattttcggcaaatggatcattgtacaccctgctggcaaaaacggattggcgatccatgttgatgaagacttgttggtggtggtggtggtggtgaggtaatggcgggcggtgaagttgagagtatctagagctatggaggggccaaaagttgagatgtctacaaaaagaatcaggggtttgaaaagtcgcgtcgcgtcgcggcccaaagcgcgtcgttattctagtagcgatgggtttaattgccccggtaaaggcagggtacccagcttgtcgggtctgccaaggccaatcggataaagaaatagaccccgttatgctgttagatgatgtggcctatgcacgtaccaagctaccttaagcgtatgcctgtgaattggtgatgggaacgcatttggcaggctactcctagccatctctcagcatcttcctgtgacgacgacggctctacgacctgccctgaagctcgaaaaggcactcgttactgacctcctcctgaccatatactcggcgacgacatacgaccccgtttttggagcattgccgcgctttcatctgttgtatctgtcctgtcagctacagcatgataccccggtgatctgtcagcttcgcaactgttgttagttaggggatgcaccttggaacccctggatggtctccagcaagatcataacttcgccttgcggccggggaacatcagtggggttgcgcatccatcatcatgttctcaaaccagggtgggcgcaagtcggtcgatagcttgtcgtcgacattgtccgccggccatcgaacggagttcccatttcacgggtatgcgcttaccccctgtctcccactgcgcggccgccggtccacagctaacagcttgacagcaaaggaccgagcagcccacaacgccaacgtagagactcgacagcaagctccatctattcggtgggcggatcgctggacgcctccgccggttggaccagcgccgtcttcgaatcgggtcagaatgccatctccacgctgttgcaaccccctatagtccggacaggcctgcttccacatacgagcgcccctgcttcgagcgcgcacaaacctccgaccgcccgagacatacctcccgtgacacttacgaatgtaccccacgtcgatgcttccgagttcagaccatacctctcccaggttggggcgttatatgagcagttgcggcgaatccaagccgaggaagacgagaatgcgaacgcctcgaaccgacgaagcaccaaagctgacgaggcgcccgaaaccccggtggacgagggtcatttgcgccctgcaagacggcctggcttgtcgtcgaggagaacttcgactgcatccatctcgtccctcacctcgatagactcgcccactcttcctcggcggcccagttccggtctcagaacccgacaagcgcagggaccaccacctttgtcgaccgttcccgctgtatattttgaggaggactttcaccttgagaatccacggacttttgatgtagtcagcgagcgatccgaggtggtaaggcccgcgccgggggatgataaagggggaccgaatggacaagctgcggcgcctcggaaggctctagcgaccaatgcgatcttacaggagaagctctcgtggtatatggatacgattgaatggcatctgattcagtccatctcgacggcatcaacgacttttttcagtgcgctgggttctctgcgggaactgcactcggaagcggccgactcagtagagaggatcaaggcactgcgcaaggagctggaaaacctagacgaagagattgctacaggggggctcaacatcatacaacaacggcggaggagggaaaatctgaagcagttacacgacgccgtcacacaactccggaaaatagtagacggtgttgccgtctgcgagtcccttgtggatgctggaaacatcgatgaagctttggacaacatcgatggcttggagaagctcatcgctggcgaattgcccgagggtggcagtcagtctggagtgagtctggtggacctgcggggtgccacagctctccagggcgtgagcaacgatttgtctactctgcgattccggatcggaaaggcatatgaaggaaggtttctcaacactctgcttacggatctccaaaaccacgtcaaacaggtgtctgcgcaggaggtgctcatgcgttggagtagtgcttcgatgcgagcccgcggcgcccacagtcgtgaaccatcggcgttcccgtcttatatggcggcgacagacattctgaggatagagctgttgcctagtctgacggggctgcatcgggccaagttcatcactgtggccgcgactgcatatcgcgaggcagcgatgaaggagatcaaagccatcatccgacggccgctgcctagctccagcgatgacgacgacacggcgtcgatgatgtcgatgcagtccagctcgacgatgaaccgaggcgccagtccgcggactcagcaggaccggtccatacagttggctagaaacctgcgagcattggaccctctggatgccgaaaccttgctggtaaagatctacattggtgttacggaggctctcaggagattgagcacgcagatgaaggtcttgttggatgttgcaagcacgataggcgacgcaggtccatccgggctgaagtcgccaccgctcaggtcgccccctatgagtcctccagcaagaccaccatcgagagctgcggtcgaggcccaggaggagatccatgcggctgtggatatttccaattttctcgggcaagcgattgacgcagctcaggaaaagattgtcaaggtgcttcgggtacggtctgagcagagcaaacggctggatcttgtctccttcctgcggtactttaccctcaacctttactttgccaacgagtgcgaggccatatctggacggagcggcacggcactgaagacgctagtcaatggtcacatcacagactttgtcaaactccacggcgacgcacaaactcaaaagctcgcccagggcatggagtcagaccagtggaacgcggctgacttcaccgagaaggacacggacctgctgagtcggattctcgagtgcagcaccagagatgctgccgcgtggacggagggcacgcaggtctggcatccccatccggacgcgccgcaggaaaggagcgaggccaacggcggaggagatgaaccagacgtcgtatccgcccaagcaaacggcggcggcagccctgctgccacgagaagcagaacccgcagcgctgtaatcgaatccgagtcttacctcctccccaactcggccatcctctgcatgacgggcatggagaatttcttgcagctcatcacctcgatcccgtccatgacaacggacatttcgtcgtccctcatcgcctacctccagcttttcaactcgaggtgcaagcagctcatcctgggcgcgggagcgactcggtctgctgggctgagaaacatcacgaccaagcacctcgctctcgcgtcccaggcgctggctttcatggcggctatcatcccgcatgttcgggagtttgtccggaggcactgcgccgggtcggtggatacgtctacgatgggggagtttgacaaggtgaggagggactagatggagcatcagaatagtatttatgacaagctggtaggccgtannnnnnnnnnnnnnnnnnnnnnnnnnnnnnnnnnnnnnnnnnnnnnnnnnnnnnnnnnnnnnnnnnnnnnnnnnnnnnnnnnnnnnnnnnnnnnnnnnnnnnnnnnnnnnnnnnnnnnnnnnnnnnnnnnnnnnnnnnnnnnnnnnnnnnnnnnnnnnnnnnnnnnnnnnnnnnnnnnnnnnnnnnnnnnnnnnnnnnnnnnnnnnnnnnnnnnnnnnnnnnnnnnnnnnnnnnnnnnnnnnnnnnnnnnnnnnnnnnnnnnnnnnnnnnnnnnnnnnnnnnnnnnnnnnnnnnnnnnnnnnnnnnnnnnnnnnnnnnnnnnnnnnnnnnnnnnnnnnnnnnnnnnnnnnnnnnnnnnnnggtttttctcggtcggtgctggtagctattatggttataggggtagttggtttataggaaaaaggggatttgagcgatgttgcatattgtgaaacttatggggaattggggcacacctggttggcatgtcataatcagatgagatgctagatactggtcgaaaacctactgtaccttttcttcgactctttttgcggactttggcaggttttcttggataatgaggtagcatgtcaatatgacctgtttacacctttccattgttccaaataagtttaagcgtaaaaaaagagaaattctaggggggcattaccccccatggggttagggttacatatggtccctgacctgccttgtatattattaaccacattatcaaccacatcaacgctcacacccttgcaattaaaggctcgacaaaagcctggtaactgaagccctcgtggaaggcctgacaattgaaggcctagtaattgaagccctggatgaggtggtgtgaagttgaaggcttgcattggtgcgtgggcatcgagcattaacaccacggcagtatatttactacaatacttccaaatataagaatacactgtgatttttagggcacaaaatgcactgcgatgctggtgataatggaaatgaacgggtgtgatgggaaaggtatgttgtggtatggggggtaatgcccccccttagtaaaagggtaataatgcccccgtagaatttttcttaaaaaaaaaagaaaaagaaaaggtatgtaaagtataataatcccaaaaccagattcccagaaccgaataatgaaccgatatatccaaaaatgccataacagtcataaacttcaccaccgccctccctacctatagtatgaggaacgcactccccccaataaccccaagaaccatcgccgccgtcacaaacccggccgcgaccctctcccccgtggtgatgggcttgtactccttccccgtcatccaactccccggcccatccgcacccccattcacatcccccttgctcgtcccgcccgtgtcccccgtcacaggcacatcaaccctatccaccaacgtcgacgccaccgcgctccaggcattcatctgctcccccaccccgttcatcccgtcataccccccctttgtccagctgacccagccgtccctggcctgccacgaaagggttgctccccaggtggtgcctcagtcggcgaacccgaacaggccttcgccgctgcaatagcgctattggtcagaagcggggagatggactcgaacgtataaggcgccagctgtgtcgtcctcgccagccaacgagtgagataccccttgaaactccgctgatcaatatcgcaaaatcccggaggttcacaaaactgttcaaacatgaccctctccccatcggtgctgttggtgaagaacgtcctctcggcggaagccaagtggctgtcgaggcgtcgtttccagatcgggttcccatcggtaaaattatacatcaccgccgacccgtggatgaaaatgcccgcgttgtacgtccactggatctcgtcgatggagtcacagctgttgccctcctccggcttgaccgtcacgccgtctagcacgtcaccgtcccgaaaaaggccggtctcttcctgccaggtgtagatcttggctgcccactcggcgtaggtgacgttacccgtgaagcgagctagtcgggaggcgatgttgaagaagcagccgttggagatggagttgcggtagttgaagccgcggttgaagcggaagatttgccaggggaggccgccgccgcagccggaggactcgttttcctcccagcgttgggcccattggttgaagactgcttgggcgagggcgaggtattggggttggtcggggccagggtcggggaatttgagctcggcggctgtcatggctgtcatggcccagaagccttggtcgtcgttgcccagcgtgcgggtttggttgcggggcatgaagtcccgggtgggggcggcttggtggaggatggcttgctttgtgatgtcgttgtaggtgtcgtcgccggtgagctgccagtagtcgattagggtgccgaacatggcgcctgcttcccaccagaagtaggggtctgggaggttgccgggggtgtcgccggggaggtggccggtgtagtattttgtgaggccgaagggatttcggcggcggcggctttcacggaagctggaggagggggggtggggttaggttggtgatggttaaaggaggaaaggggtaaaggggtgactgaccttcatcacttattaccatgtcaatggctgtgacagtctgcatcaacaaactcgccatcccaaggatgcctcctaataacctcatgatatcgagtgtatgtgatgtatgtgtaaagaagaaaatacaacaaaaaagaatcgaagaagcccctaccaagcaatgacagagaaacaaaccaccaaaccaccaacagcgtcagagagctcaaagtatacagcgaagcaactgatagtccatccgtgaataggtatatcagtaggtgcccagtatggtcctgtccgtttgtccagcctcgaagcaaatccgaaccgtcgaatcagtctccccttctcttgtcctacaacagttggtctcagccctctagcaataaggttgatatcaacccttcttttcaggcccccaaattccaggccttccttccaacttgtcgcttagaaactggcgcgcggccggccgttggttgagtgagaaaacagccaaaatggtaacctcgtatcgtcagacaaaaagcccgtcccaagtaggtcgaaggatccttcgaacagtaacaagattaccgagcgcggtgacagtgggagtcgaaaaccaagaaagggcacagcctcaaagaacgtatagtcgaaagggaaatatagaagtcgcaaaaaaagcctaacccagaggtgtgtatatctgtatataaaaaacgaacgctcaccgaccgtctaggtgggggttgttacttcaaatcgaaacgaaggagaagagagagaaaagagaagaaaaagaaagtcacacctctaagcccatgaaccaaaatgacagatggacaacaggcggtggtgatgtagaagggagaaggagaggaagtgaaagagagagagagagagagaaaagatgagatggaagatcacagatctgcccagctgccaaagtttcacaaacccccatccagcctagacctggatggaaaaaagacaagagggaaacaaaacacatgaatctcagcccaagccaagcgcaactgcaatttggcttgctgctgacgcccggttgacttgacatgtcgaccccaaacctgatgtgtttcaggtgccccgttgacgttgtcccggagggctgtgcaaggagagggccgacccctgtctcccccccaccgccgcgaatcgccatcagttgagatctggatgtcttggcatgaaaagatcttggatcaatcatgctacatatcagacggttgttagctagtgatatctagaagagaatacgtcgagactgcccatgccagtttagaaaggtttctctttgctaagtcgacccctgattgatgacaacacaatgaccaccactcaagcatgccaaggctcgaatgtttccagaccaatgtctgtcaagtacgacttcacttgacccagagaaattcttcataacctcctttttgtctatcctctatatacatcataacagtaacaagatttgcgctgaaaaaacacgcaacgaaatgggtatcctaacactcctcaacctacggcaacttagtgcttgcacccgtgggcgcaggccttgtgcttcttgctgggcttgtcgccatcctcctccgactcatcgtcgtcagactcatcatcctcgccatcgctgatgtcgtcgctctcctgggcctgctctgtttggttgttagtattctacattctgttcactgctaactctgtcaacgggggccacttacggaagtacttgagggcgttgggccagaggtcatcagcaatggccatggcaacggtatcgccatcagggaaaatgtcaagctcttcctcgtcctcccaatcctcatcatcctcatcctccttcatctcctcatcctcctcgaccttctcgccggcctggcgcttcttgcggtcctcggcctccttcttgagggcctcgatgttctcctcggcggagactcgttcgccaatgaagccgaagaagcagaagaagctcacagaaccagcgtcctcagcttcgattttctccttcagctccttctgcttgggggtgagctccttcttctccttaccctccttcttgggggcagccttctcctcctcccaggcagccttggcaagggacaagagaccgttggtcaggtccttgccgtccttccacttgatatcgacaggctcgctgacatagccgacgaagccgtccttgccgtggcgccaccagaacttcttctcgaggaccttgtcctcaaagtagtcattctcctcgaactcgaacttgatggagacgctgcgggggtctccgccctcaacgggggtgtcgatctcgaagcgcttgacgtcaatggacttgatggaaccgaggaggatctgagcatcggtgggctggatgaaggcgtcaatgtcctcgggggcctgctcgataacaaggggccagaagtgctcgatcttggagacgacctcggcgcgctttacgtagaggtccttggaaaggttgtactggtggcggactgggaggttcaaagcgttagtatttggcagtcgcaagggcgcagcaacggtcgcgggggtggagactcactaatctcggtctcgacatcgtcgaactgagcctcaatttcacccagctggtcgtaggtagcgaagatctcttcggcggtgacgatggccattgtgtctgatttgaatgggtaaaagactggggagacgggtcaagagtgagatgtgagaggagaatatgcggtgaagaagtaagaaaagaagtgccgtgggacagagagttggttggctttttaagctacaggtaactgatagaccctcgacaggcgcaaaaaaaaaaaaaaaaaaggttctgcccctcctcgtcgcaaggcagcctaccagcagagtcgcatcaatgcagcgcggggtcctgcccttccatctgccccgccaaaagttgtgaactggagcttggcatccacacaactgcgaaaagatagtggggcagcaagaacggcggagacccgggaccctgccaagcaaggtggggccgttatgcgttcaacggcgagctctctctgccagcctgcccggcccgaggggtatccatcccggaggtctttcttccaggcacgccaggttcccgctcattaacatttggcctctcaaacttcttttctgtatgcgtttctataaggtgtgggcaattgtgtcaaaagctccttctggcccgtctagttgtgagtgctcgcttgacagttgctgagagtgtgccttctcatcatacaatcaccaatcacgaaacatacaggcagataggtagccacacgattgctatctcttccttctaaccttagcctcagccctggctttgacacagggctgtcgggagctcatggcggggtacccccaccataaagtgccgttacgcaatgagaagctctcacagactacgccaatgacagcgtggaaatcatgaacaacccccgcggaacctccatggacataaatggcctataaaaagccctcttgcccctttttcaagcaacccgtcctcttataaacttgttcatctcatcttgaagccaaacacagctgtcacaaagcaaagacacgaacgcgtggagacaggcataccaacagcagctctttaccgccagtctgcaacgctgaggcccttcccttccgctatcgggctgtgtttcatcaaaacaagctgctttatcagtttccgtctcctcgacgagcttatctctccttttcgcaagcaccttcgccagcagccagagccacaatgcattgtgtcattgttccccgaagtcgggaccgttctttacttctgccccaaggttatcaacggccttggggtttgaggggggttgctctttgtccagtcggacgctccgcaattgactttctcttagtcaacagatggcgctccttgccagcaactgccagcgcgtgaccgcatcaccttcccaataactcgttttcaggtgtcatcccgagttcatctgctgcctgaccggtgagcgtttgggtaaagcggcggttcagttgccgatggaaggattgatgtgacgacgaaaaaagccgatccgaactcacccgcttccgggatgctcaccggccaccggagctcatttttgagaagtaacaatcgggttttgatttttgaactcgaaacgtgttttcgtaaattttgactcacggtggcggtaaagctaccgagacacagtattgagccttgttcgccatcaattgggaaataggaaggtgtataaaccgcccccaggttctccaccaaggaacaaccctatttcaacctaccggcactcaagtagacaaacctgcctcgaacttgccgaaattctcgatttagttcagttcgacattcaacagggccggcagaatgggcggcgtcactttcatggagggcaacccggaccggaagttccccgagtcccgggtcctcatcatcatgaccggcggcacgatttgtatgcagccctccgctgatggcctcgtcccaatgagcggctttctcgaacttgccatggctccccgaccttccttcaacgacagcacggctccgtccagtaagtataccttacctttatcaccctcagttctacacgttgactaaccccccatcacagccaatataacagcctacacaaaagaaggccacaaactcaccctatcctccctccggacccccacctcagcctactgcaaacacatccgctactccatcctcgagttctcccccctcctcgactcctctagcatcgcatcagcagggtggacagacatcgccctcaccatccagcaaaactaccacctctttgacggcttcgtcatcctccacggcaccgactcgctagcttacaccgcttcggccctgtcgttcatgctctctgatctcggcaaaccagtcatcctcaccggctcccaggcctcaatctttgccctccaatccgacgccgtcgacaatttactgggcagtctcatcatcgcaggcacattcaccatcccggaagtctgcctttttttccatcacactttgttcagagggaaccgcacaacaaaagtctcggcctcaagcttcgaagcgttcgactcccccaactctgaccccctggcgaaggtgacaagtttgggagtagatgtaaactggggtttagtccggcgcccaacccgcatcaaagaattcaacgtcaccaaaaccctcgacacgactcacgttgcctcgcttcgcatctttcccggcatctggcctcagctggtcgactctgtccttcgtgtccctgacctgaggggtttggttctcgagacgtttggcatggggaatgcgccggggggtgtggatgggcatctcacaaaggcgatcaaacaggcggttgagagggggattgtcattgtcaatgtcagccagtgtactaatgggtttgtgagcccgttgtacgcgccggggacggcgctggggagggcgggggtggtgtttgggggggatttgacgacggaggcggcgttgacgaagctgagttatttgctggcgttgaaggatagggggacggttgggttggaggaggtgaaggagatgatgggacggagtttgaggggggagatgacggagttgagggttgcgagctttgttcacccggctggggtggtggaggaagatgtggtggggaagattacggctgcgggtaggtttttttttaattttttttattgttgattttcacatttctcttgagtggttaatcctaactggtttatttttctgtctacagaatcagcctttacagccctaggctacgcaatcagcaacggcgacctccgcaccgtacgggagcttttggaaggggacgagttcaaccaccagctcctcaaaaaagcggactacgctggcaacacggccgttcatcttgccgctgtcgggcccgagccaaagatcctcagggaggtcctcgagcggggcgctagcgtacacgtcaggaaccgggcgaacaacacgccgctttatttggcggaaaaaatggttgccagcgggacgacgccgaagagcgaggagtgtgtcggtttgttgaaggaggcggggggccatctgtggttggagaatgaggagagcatggctaatagccggaggggttctgtggggggcagggagaatggaaatggagttaacgccaaaccagccgaggagaagttgactttggaagtggaggctcctctccttggtgacccagagagttttctctgggggggtgcgacggagaaggtccgtcaggaacacgacgctgtgtggaagaacgcgatggagagagttcgcaaggagcaggattctgtcattgaaagagcacgcaaggagctggataccaaattgaggcaggaactcgcaatggtcgaggctgagagggccaggctgctgaaaattggggatacgccgaatgtgcagggtggtgctgacgatatcgagtcgacaacgggaaagatcatcaactgaggagtatacccgagctgggtggtgatttggttggagatgttttcttggggtctgaatcttgagacagcgtacatgcttcatgtagacgtctatgcccaagtttttggccatatgatatgtggtttcgtttggttggttgaacatgcaagaaattatctaccgatgggtagatcgggtccgttttttgggtcttgtttgcgggtagtatctagatagatcagatgctcaagagttgggggcggccttttcgtgagctgctctgttttgttttacatgtcagtagatgtaaaccaatcgttagttttcaaccacgaggctgcagcctgaagaccatcaatgggggctaaaagaccccatatctaccggcaggctaccgatgtaaaggcctcatcacacgcagacgcaactctatacatgtgcacttttcactcacttgcagcttacaaacctatgcatacctagggagagcggccgatcagggggggtagtacaaaaacttgtagttcgcttgaggagctggcttggttcatgagtagatcttttcccacaccacctcagatgcagctcaccctcgatggggctggttgcctcgcccagcttcggcacgagtaaggtacccgggctttggtgttcatctgtgaggtgggtgttcagctgcaaggcctgccagatcaggattggaaaatcagaaagtgggccggttggataggtggccttgtggaggtggccgccggttgatgtaagtgacgactggatgggaaaggaaggctgggcttcgcccatatgtgcttcagggtgcattcatctacaagattttgaactttagttgaatcgaggggaatggccttatttcagctcaaggcggccgctgaggctggagatgacggttttgtttatggagggaatgggatgcctccagtggctcgtggttgttgtggctgttgctcatgcctgacgcatatccttttgcctcttgacccggagtgtgcctggatgactaggtagatatgagtccttgaagagttttcttttttgccttgaatcctacgtggaaaattagttgaggtgatgaggaataagaggagccgatgctaagcttgaggttcctacagccttgcatgataggcttctgagagtgctgggatggtgtgtggtggtgcataaccgaggcacgttgactaacggaatccgcccaggatgacacactgagtagatagtgccttcccttctaggtgtcgaatggtggcccaggtgatgacttgcaggcagtgacaggcaccggcaacctctttgtgagggattgcggtgactaaatcaagaagtgtcatcgttatacttctttcaataacaccccttgctcttggttgagcctcatctatcgcagagaccaccttctttgaaaacaagctatcgccacatgaacattcggtcagaaaaaactcactcacatgccgcatgaccttttcgactttgctgttgctgcctgggccatgttcgaccgagatcaccggcagcccatatcattctctatgtcaggtaggtgttggttccatacctggtactgtttcacttgcaaaagaagggttcaccacaggacgtgactaggttctcggtgagtgccacagcatacgatgctgcttttccactcttgaagctgcttgcatgcccgagggtgggggacgctttgcagcagagcgtgcagttgggcctttgttgttggttcgacccttcatccaccacaccaacgatcgtccagaatcacctctcggtcccctgcatcagggccctttgggccgcaggctatcgggcttgtcgaaaagcagtcaaaataaagcgggaaaggcagccattccctaaacttaccacttccctgggtcacccggggctggtatcactttacccaagtcccacaggagcgatatcaccgtggcctcactgcgggtcggactaggccggcctacgtagcgacctttggtgttgtttctcctcatcaccggcctccgccacggagcgcgttttgcggggtttacactgcacaggcaagcaacactgcaattgtttgtttgttgtggtctgttctcaaccggtccagtaactgcgcaagtggttctctatggattccagaggacccgggggaatggcttgtactagaatatcaagacgaacgtgggttaagcatgtgacacagcagagacacaagacagaaatctctgccacttctttgcgggagacaaaacactagccatgctgctacccgagcacctctcccccagaaagttgatctctgtgtggccacaccatttctcgtgaacgtattgccacaagagaggcaagcacgatgagtttggcacccgctgatccagaaaaccggaaaaagaggacaaagactggcatgagtgagtgttttccccggtttcttctctgtaaggctgatttgcggatttggatgctgcccaaagggggtagttaagcatggcccgcgtaatgggtaaggcgacctcttcctttcttcctacctaggtaggcttcatgcacgtctctgctctggtttctcggcctaggagtattaaagggctctgcttcctccagactttcttcttctggattgattacttgcaggaaggttctcgaccgcagccaacagcttgacagaggcctcaatacctccagaaccaactcctcacggcccatttaacagcggctcgttggtgaagtcggttttctcttctctcttcttctttctctacacaggattcttcagacaatatggacttctcccacctccttcggacggctctgcctccatttgttggtaatgtgagcgcagaagacaacaatgccacccagaatatcgtcgaaaccctcacgccactgctcggtttgcagttcaacccatttttgaatctgttcatgattttctacgacttggccggcggtcgcctcggcacactgggtttaaacccagcgtatattctgacctcatttggactggcttgggctttcaacaagacgtggttgcatatctacgcaaacgtcatgtcaattctgggaaggtattttaccgcctcggttcaggtcaacagcggggataacatctacgaccacctgatgaagttcctcgccaaccggcaggacatgaccgaatctcgctctctgacggcagagacgtggttcaagccaacatcagaagaggcggacgaggcagacttgttccggaccaaaatctcgcccgacggcgaaggggtcaacctcaacttctccaaccaagagtccaagtgcccccctcgttttacgcccgcaatcggactgcacaacttttggttccggggcaagtatttcgcgctgagccggcagcaggagacgctgcacacagacaacagctggggcggctcgcagtacagggacagggagtcacttgttctgtcctgctacggccgttcgcctgagcctatcaagcgccttctcgagcatgcgaagcaagagtactacagcgaacacaacgccaggaccattgtcaaacgtccggcttcacagagcatgaggagctatggtggccggcacagctggtccatggtggcaaatcggccggttcgccccatgaagacggtggtactggatgagaagcaaaaggtgcaagtgctttacgacatgaacgagtacctccacccttctactccgcgatggtaagtatttctctcacgaaccgcatcatatggaataatattctaactctctatttcaggtatgcaaatcgcggtattcccctccgtcgaggctatcttttccacggcccgccagggacaggcaaaacgtcgctgtcctttgccctggccggtgtgtttggccttgacatttacgttatctcgctccttgacccgtctctaaccgaagaagacctttgtgcgctcttcaactcccttccgcgtcgttgtgtggtactgctcgaggacattgacacagctggacttgctcgcccgggcgactcaactcctgcttctgaagacggcgacgacagtgacgagaagtccaaggacaagccaaagaagaaggacaaggattccaaagacaaaaagtcttcggaatggaacgtcgccgacttggcccgggagctcaagaagcagtcatcgagtgaatctacagataagaaaggcatttcactctctggcctgcttaatgctattgatggcgtcgcctctcacgagggccgggttttgatcatgacaactaacaaaccggagacactcgatgaggctctcattcgccccgggcgggtcgatcttcaaatcgcctttaccaacgccaccagggaacaaacctgtgagttgttcaagaggatgtacgacgccgaccggaccgccaccacgccttttcaaaaggaggacagaccccagtctaccaccaccacccgtctccgctcccgcctcgccttcttccgttctccctccaacaaaattacaaggaccatctccgccccggtggttcgtcagcttcccctcaatgacaactgcggcgagaaagacggcaacctaaccgacacatcggtcaccacaacagcagtcgacctcgactccgacctctgctccctcccctcctctgcctccccaacaaagatatcttttgccccggaggaagtcaacaagctcctcgccgaggagattgacgacctgaagcccatcaccccggaagaactcgacaagatcgcgcagggctttgcctccaagatccccgaggggcagttctcgcctgcggaactgcaagggtttctgctcaagaggaagagggagccgagaagggcgctgagggaggtgggtgtttgggtcgaagggacgctggagcagaagaagagcaagaccaaggtcgtcagggtgcaatgacttgaagacagaaaaccagaaaggggcaactttgctggatgaattctttttgcttttttacacttaatattctctagtttgttgtcttcatatttttcgtaccatgcggactttctttgagcagagcggggggcacagatgcatacacgtgagcaaagattgggtttcagcaacgacaggatgttttttctcgggggttaggttaggttaggtaggtaggtaggtaggtaggtaggtaggtaggaaggaaggatttggatatggacatggaaagaggatggatggatgggggggcgttggggtttccttttcctttttgttcatgacggacgatcggtatctatctattgtgaagtttcgctttgtcctcttttagaaatgcagaacatgagaatatgaggtatatgaagttccttgcaaaacgactctcatctccaaccattttcttgtactccaacttgccccctggtctaatcgagtggacttttcatcatgttttgctttgcagatcccatccctcctccttcttcgacacgcttcctcatcctaaacataccggaacacaaaagctggtttggtcccgtttgccgggttggtccccaggccggggccggggccggctcgtctcggctttcggcggtccccaccacccccgttctggccccacccctttcaccccctcccacccggtcccgtccaaacttatcacacaatgaatgtctattcttttttgttttctcaccaacaaatcccgggccctcctccgttttgcctcgcttatcccgctgcccgtccagttggatcaaagaaaaaattcaagctagaaagtagtagcaccggccgctgccgagattcatgcgttagctattacggacctaccgaacctgaacctcccacatatgtaaaaagttcggacgacgtaactccgggacgggtcagcaatgggggagtgtcttgcgactgggaagtggtcctattggtgggcttgcaatcttgcatgaacaatgagattccctgaggatggtgttgtgggattttctttacatccactgcccctagtctgatattttgttgggttggcatggctgggaagtttgaaccggcaggacggctcggtagagatgactgatttggggttggggtttcttgtgagtagtgtctccattgttactaactggacggctcggtacctatggccaacttgggactggggcatagttgtgggtgttatgatgtacaggatggtgcggtatatcagttgttagctatttgtaagtctgaaggttgggttgggggagatggcgagggggtttcctatctgacgatggagttttgtcccgtaggcgggggaggaggaaggttggtaggtaggcatcagcatgaagctgctgacacacctgatcgtgatgaatggtgctacgccttgggatggatgagaaacggtgagatggccatcaactccgttgtcttactttcagtccgaagaacacgtcgatgataatcatgctcatcccgtctcaaaccatcctcccaaccggcccgatcacgacccagacttacctcatgtttcaaccgtctgcctacttccccggtcacagggattgaagctgacccgaacgcacaatcgtggcgtggatttatgcttgacctgatgtgccttgcagatcctccacattttcttcgaaacaatcgaaactttgggaggaaggaaggaccggtcgtcagctcctactgcaagtgcggctgggaccgctacctgccttgccttctgtggagcgaggcttcggtgttggaaactgtggcgttctttccttcaaaagtgtgtggtagctgcggtcgggagcactttcttacttgctctcctggattgtaggtaaggaaggaactttgcgatcacctcaacatagagaatacaagttgtgtcttcaggggaaaggccgatcatgaatcttcctcaagagattcaaatccaatcatcccaacttctacaccaagccagctcggaatcccggcaaccagtaacatcccatagctctaccacctcccctcattcaggaacaggaggccccaactgccgtttaaggggtagaattcccaaggtggcacaggtaggtggccttacacccaccccagcttttcaacctcacgttggcctcaactcaggaaccactgactggttggatcaatcccccaagcctcaacagcagaaaaaacaaaaaaaaaacaaaaaaaaaaacaaaaacaaaaaatctggatggaagaagacggctggctctgttacgccgcggggtatctgacctaccgcgcaacaaaagaactacttataattcctgctccaatgagaagctctgaaatggtcttataccagcacaatcaagcaccaccaaaacaaaactacaccaaaaaccaaccttcctaatccgtcctaactgggattattaccccacgaaaactatcgtgcaggaacgcggtgagaggaaattgttcgttgacttgtctgtgcctgcataatcgcttgcgttatgcctatacatgcttttaatccgccaacgccaaccaaacgtgggaaagccggggagcgaaaatcatgcaaggtagcaagcgagcaatcgtctttttcttcatccttctgtcgtaccgtgatggtttgttttactgttgccgttgctctcgcttcacgggtggggtaaaaggtgatgatgcgcatttctatggaaaatgtgatgataagaatgcaacggtgatcatcacgacaactctgtaacggtggctctcccaggaaatgaaatctcgcgtcaattatttcgcacagacgttgaccacccattccgttgattcccgggaaaagttggttgaagaagaaaggcgagttgaaacatttccaccccctgaactcctgaaactaacacccccaccaccacacctcaacctgaaagggagagctccctatcatctcgccaaggaggggttgaagaaaccaaagaagaaaaaaaacggtgacaatacgacaagcttttcttccatcacgagaaaaacgacaatgttgcagtgtcaaagacacaagcgataagtaaaaccgcgagcgtggtgatcctggtggacgggaagggaggggggaggtgaaacatcgtgaccgactcggcggtgattgatccttgaatgagatggttacggagactaagttcactgtcacgataaaagtttgtaggcaaattgcttcaaaatatttcagatattctttgtgcctgccttgcttattgtggttgcaaaaaaaaaaatgcttgtatccttcccaagtggtatcatatatgtcattccaatccagcccaaagtcatatcccaccctcctagcaaaatcaaaaacgccttgcccttcaagggggggtttatcatcccatcattatatgcccccgctttgtagtcccaaatccaataaactccatgccatgctgatagtattgtcggtgtaatgtgtgtgcgtaaaatgcaatctgatccgataccttaaaccctcccagtaaatttcacactcctcctcctagccgacaacccgctcaagatccccctcttctgcctctccgtatttggcgatgtcggcgagaggatatcactcggaagacctggctgcgatccactcatgacaatggcgttcttcttgacagccctgaggatgtcgttgtatgtgatcggggtctggggtgtcttgtcgccaaccctgctgctgatgttctccttttcctcgtcatgctcctcgagttggtcgtccaagacagagacagagtgctgcaacgagctcctcttgatgctggtagacggtcttggctggtgtgacacactagaccccgacgtgtcaagcgtaggtcggctcttcttgcgagccaagctaaacgacctcgtgacacccttaaagatctgagtaggcgtccgtggtgttttggcagcctccccctccagactgtcaagcggttttggcaccgcctccagcgagtagtgagatccgttggcgtaagggtcaatgctcagaaacgggggaggcttcctcttgttggtgagaaggtcagaaagcaagccactgctgcttcgcctgttggggttgctgctgcgggccgagaggctgcttgctggtgtgattggtcgatcaccggaagggtgaatgggtgctgtcgtggatggtttgagagactcagactcggacgactcggtgctattccttgtcctgcttgtgttcacagaagacgagctcagtgacacggaacgctgttttctgagagaaaggttgacgattgagggtttgcctgcaaacaccaccgagaccactcttgccgtgacctcctggctgcctcgtcgggtagcggctgtgggagagtcggggtcctcgatgctcgaatcatagtcatactcggaaaaatcgtcggcgtcggaggaggcgtcctcctcggaggaaaggtagatgtcgtgcggtgtggtggcctgtccttcctctcctcccagcttcagtccgtggttgtccaatatccttgacaccctcctcgaactctttttgggaagctcagggacgtcgttggagggattggtgcgaaccctcttggggctcggagccagtgtgtcggggtgttcctcgtccatatcgtgatattcgtcaaagatgggctcgtcaaattgtgttgctgtttgcttgtttgtatatgcaatgtccggttggctgttctcctcgaggtgactgtccaccaaagacatgaccctccagcaagactgtataatgtaattcaagcaagtggccaagggatatatgatcttcgtgttctcgatccctaatatcgagctctcgtagtgggggaggggggcgagcagctgaggatcactggaatggggcgtggactatggtatggagattggggagaccagaagaagggtaggatgttccgagagggcgggagggtttattttaatgcagagctacagcaggataaggtgacggtccaaggccaagaagtgggtgtaacggcctgcaagaaccgggcccgccgtcactctcaaccatggcgtttctggtcggtcggctgggtggtgatggatggagggctggtgcatcagcagagcgtggtacgtacccccctctccgttttccctgatctgacggaacggatgaacggtctgggctgccctgtcttttgcacttgcatgacaagcaagcctctcccaggcccagtgaccacacacacattcccctgcccaacccctgccttcgtcaaaaccccctgcccgatcgggttgccaaggatcgcggccaaagaagaggtttgagtcaaatgagtgtgagtctgcccatcgctgccttggtctgtcttgacggggaaaacaatactttcacataccaaacatgggccttcgatgtcaattctcaagtagttaatcatcaaatggtgagtgatccgaatgagagtgacagcgcaaaggacgggcgctggttggccttagagtggtgtttcaggtaaaagctccttctctcgtcttcttccacgaccgccaagccttttcttcgacacctgaacaaccacgcgcccaccacaccaacgcaacgcttaattagtgcacacaacgatatctgcagtaggacctgaatatttctccattattacgaaccgacgacaacttcattcttgtcttacacgtcaggcgcatcctccaacggagcatctcataattccggctgctggctgggggaggtaggtagtcacagtgtacattcattacatcaactccatcaactgcagctgcaccactatcaacagcagcccaatccggtttttggtcacagccaccaccaccagagtttgtatctttgatcgccatcaaccccccctcttttttcccaagttatcccgaccccttcaaagaattttcctgtcctcttcatcgctcgagagttttaccccccactgtgcccggtcattggtagagaacccctcatgccactcccaagaaggggggcccattgtgtcctaactttacaaatgattggacatctccgcaccattcaactcggagctgggcggcaagctccaaagcaacggtgaagctttcctccaaacgacccctccggattggagggaatttgatcgtctccttgcagcaaaaaaagtcacgctacacgcttcccttccttttcgagtccgaaagttaaacgaagaggcgaaccgaaaaacgaaccacacttacacacacacctcttttacggagcatactcggctctctcctccggcggctggacaagtttgaactgtctccattgagttgacagtccgggatctaccagtgccgttcatgatcgcccgtcaaacacatctttgacccctcgtggggggggggggaagattcccaaagggtcattcatgccctttagcctcccagccccggatcttcctatgctttagtcgtcgaggttagttatctcggccgccgctcaggtcaatcagccagttgccacattaccgggtacattccaacccgcgcctttttttcctcctccgatttttaaacagtccaaagctccaagcccgacagctggcccgacgagggggcaagtaatgtcttgtgctcttacatcctgggacgtgcgaattaaccagtcttgttaaacttgatcgtgcagtttgacacacagtggctgggccgcctactcagaggacatcatcagttgtagagaggcagccgtttggactgacctcccgaccgaccgagtgacaacaccacctcacggttacagaatcatcctccgttttttgttgaaatctgtcccccatccgcggtataaacctacacattaccagataacggagcatctgccctcttcagcccgccgccttcgcggccgcgagaaagaaaggggtaaggcatcgtcggtcggcgctcctttgtaatcagtttttttgcagtttgtttgctcgaaagatcatgattgttaggcctcttgctgtgaggacactttgtgcaatactatgactcgaccgggcgtttgtggtggcgggcgtactacagcaatccatccatccatccatccatcccgagatcatggaagtacagaccaactgcaagaaccccttacctgtgcgttgcattctttttgtaacaggtcagaaaagatctcggctgctcgacacacacttcacaaatttagacggaaggattgggtccgtgttataagcggtcccttttgtgggtgatggatgtgtcgacaagatcatgtcccggcatatcatagctcgatgtaggtaaagatctctaaatgtgtggacccgagaacggcaagcctatgtctatgtgcctcaggatcaccttacgcaaaacccccaaaatttaatatcacaaacggcccttggaagatggcttcaataaaaatttcttctacatgtaagccaccaagaacgcgaacgcgcaaaaatgtcaaatcggcggctgcgagtgtggtgctgagcgtcgtgacaccgcctcgttcggtcggtcctgtacgatggctggacgaggcatgctttctgtcattcccgagtccagtggcgtttttgtgacctgcaaatcagggagtatgtactgcccaacgcctcagcatgcaggctttcagctggagggctccttttgtcaatttctttctcgtgcttttctcaattggaaatttgggatgagagagcggtcggacaaggctatctgatggcctgggagataggggaagggtcaaaggtgaggaggttttggcggtagtggtggtggtggtgggtgtcttgtatcggcagtggtgtctcccggccttgaccctgtggttgactgtttcgaatcttgtcccaagcccgtcaaccttgtggacgaccgactcccctcagcgcgtggatggtggtggttttacgagcttccaatcgtcctttcttctatggaccagtatattcggcgacagtgggaactcctgatggccgccctgtcccatggttagccgtctcaccacgcgcgagcctttcttgcccatattatcatcagccactcatttgggtagttgcctcggttggaaaagtgcgatgaatgtctcgctcagacaccatttcatctcaaagtcaagattgctttgtgtcgaaacgcttttgacattttgtgacgcttcagatcgcgtgtgcgacgacaactattgccatcatctcctgcatggcgcactgcatggtgaaccgcacggcggctgggcgcgctgtaagtcgtccgtttctaacggtctcaaacgacaggccaccagcgatgttggagtaatgttcgggagaccaatgtcaccctcggcggcaggggaaacaatagagagagcactgtagtatcttgagatgtttgatgtgagtcgagtgcatcatacatacagatgatctctcggattgatttgaagtcgttgcttatcttcataaatccattctttgttcttcgaggtgaagattcccaacttcaaccagagcgaaaccgttgcgtcatggggcccaagcttctcctctcacaacaaccaatcacagtcgtttcttttcctgatttagactgcaggaactgtcctgatgtagcctaacggctatcggggtttcgttggcgttgctaaaaatgtttcatcagtggggtggcaagcgacgggtgaaccaaagaccctgaaccctggatctcgggctcccgaactaggacaagggttgtgtaaggtaagtatctttcaacatcaacaacaatctgtcagaaacatcaacaattaccgattctgcgagtaataccgaggggaacaatgacagctgagtcagtgatactaacacaatcaggatgtttatgtgtacccaagatgagagccaccaccaagaataacaacaacaacaacaacaacaacaacaaagatacctaccggcaggctgactgcggatgcggctgactgactgggtgggctgaggccgagaagcttgaaagaaggatcgcagggttgaaagttgggagtcagatacggcggtcatcgccccgttctgactgttcgggctgtttccttttgggtgctcggtcaacactcagcaagagataccattctctaccccatcatcaccacaatcatcgccccacacacactggaattctggctctactaatcgaagcacaaagacggcatgtgaacgaccaaaccaacacgatgtctcatacagtcaaagtctcggcagtcttctgccgtcaaaaagcacctgttctagacttgatgtctcgtctcggccttctcttccctatctagtcctaccgacatgtcatcgatatggcatccttccagaccgtttcctcttctggtgttaccgagctgaattataccccggatctttcctccggatatttcatggtgtcgacaatagctatctagcgggtgattaccatccccgccgctgaaggtgccgcatgttctcccgtcccacgccgcacacaacggacgggaagacaacaggaagcagcaaacctcgtccgtttttggggatttctcagcctcataggtttctctcccaggtcactctatcctgaaaggtcaggatgtggaatcagttcctccgatctggtcagctaattcagcccacctcatggtcggaatctgaagaaaaaacacaattgtcccgaccagcccagcccttatctccaacatctcttttctcgaggctcccaaaagccaaacctgacacttgagcatgttagttcagatatccaaagtcagccccgtagccaaggcggcccgaccaacaagccttttcaacggctggtctgactcccgaacaaggaccctgatacacacaagcgagaggcgcaattttcccctcaaactttggaccaacctaccttacctccctcgcctgctactcagatttcttgtctttcgcttttgggtagttggcagtttcttgtctgtcgggtcggacctgtgtcagccagcccacccgggttgccgatccggggtgatttaagtgcttactttggattgtcaaggatttgtatgccccagcggtagtggagctgttcagccgctcggtagcatggtagcatatgctccgacggggagttgtagagagatggggtgttgtgttggcctggcattggggatgagtttggattatgtgttctccatgagcggttcgggatgaaggtagggaatatgttggctttggatgatgagtcttgggtaggacatgtgtagtatcaagtccaacttcagcctttgggtatgacagcctcatatttgcaaggctggccaccagagggaaaaccgtcagcagtgtgcaagtccgaatatgagtaattaaccaccagccaaaacggtctgatcagttgtttgttgagaacaacatcttgataatgggctccgttaagggatatgcatgcacatctatctcgcaggtagccctcctcttgataaaatcctgttcctgtatcatgacatcctccactctcaggcacaaccagtccaatgggtgatcacctgctgctctcccatctcggaaagttttccaacctcacaatctttcccgcaaaggcaacaaccaccccgaaacctgctatcccacataaacaaccacatcccatctcatcaaaaactattcataacggaacgtcccaaatcagcaaccaatacccaaattcctgtcgtcatgatctccaatcggtgggtgttggcaaatgtgactgtaacctgcacactgacgtaacacacccaacgctccaaccaacaatacccaaatttgttatcgtggcatttcgcccaaaaacgtcaacccatatcaagcaaatttagccagtatcaaatctataacttctgccagctatggattgtcaatgagttaatttcacacgattgtcattgaacccctgatttatcgtcgtacagttctgcacgtggtactataaaatctgggttgagatgaaaatcttgggttgcatttccttcgccaacgaaccgctcgcaaagtgatgaatacctaccaaacaaagcggtataagaaaagaatgatcgcctgacttttgttccgagttatgtactacttgatcaacaatccctttaggtataccatcatatatcaccaacagccttccctcttctctcccaatcgaaacattctcgaagctctttccatttgaatgccctttcccgcccctccaaccaatgatgggaatggtgagtgtgcgtgctccgacagcactgaacatcacggcccgagactttgatatatcaccaccgatccgtaggaccccttaccgcaacaaccaagtcaacaaaacaccggtcaatcctcgaccatcaaccggaccccgaccaaacacatcatgactcgcacaacaagtttgccttttcatcaagtaatattaagactgtgtatagctggcactcggcccaaccggcgacgagcccacaagtttagtacagggcaacaatatacagcgtgcgaaaagaaaaatttcaaaaagctgaaacaatgaatgcactccctcccccccgaaacagactccggcttgttgtttttttatcaactccgaatgtggcaagccaaaaaaaaaccccggctcgcccccccttctaaaaaaaaaaacccaaccgcatcccaagatgacctggcagctccggcgtcgtcgctcattgatgccaatcccataaaagccatgcgtccgtcgtcttgacataccataccgcccaacccgccttgcccattagaaaagctacacagcccttggccgccatggccgcccattcagccactttgcccactgcccgtgtattctccccagggcgagtaatcatgagaagccccgaattcgtgatgcaatgtgtaattttccccgcgtataactccgtagataaataccgagatgtcattattatgttttattgaggggattaatgccccgagtcccaagcgcggaaaagaatgcgccggaactctcgagtgctgcactcttccttcgtctatgctcagtcgttggtgagactaactgagactcagaaactcgggcagaagcttccatagcatggatcaggaaggatgcgttcacaccaacacagcctccccaaccgagctgatttaggccttgcgggagcgagtagaagtgccattggtcttgacaccagtggccttgacgtccttgccgtgaatgatggtgctcgggtcgggaagaggagcctgggacattctgcggacagccttgcggccagtggggcgcttcccatccttcttgtaggtggcgaagtagaaggagatgaagaggaagaggtaagagctgagaataccgataccggagaaggcagcaaactcctcacccgcgcacttgccggcggagggcatccagggccagtaagccgaagtgaagtaagtgtacgacgcgaagtagacgaagcctttgacgccaagttagtaaccttgaccaaagaggaccgggaaaggccatgactcgaacttaccaagatcaatgacgaactggataatctggagacgggtgatccactccttccaccagatcttgacgccacgcgcgctctggaagtagtaccagtacatgacgacgtggacgaggaggttgaggcagatgacaacccatgagacggcagtggaaccgatgagctgggtgtagcagaggagagcggtagcgccgtggtggtagcagtgaaggaaggtgagaggcttcttcttgaggaacaggaaacaggtatccaacagctcgaggtacttggtgaggtagttcaactggttaccgtcagtacaaaggcccaattcggccagaagcagcggtcaactcacgtagtagaggacaaccatgggctgagtccagccgccatcagcatcgcagatggcaaagaagagacccttgcgaacaacagtgggaagcatctgctcgatgaagagagcgaggaggatgccggaaatggcggtcaggtaaaagttgtggatcaggaagagcgtcctgagcttgaagggctcgcggctgcgcatgtactctcggccaccaaagatgatggcatagtagatgacgatgaagatgctcgtttccttcagggtagacatgggagtctgaccgggctggaagcggaagtcatcggcagggtagccaacaactttctcgaaggccttgttgaagatgggccagaggtggatgccgaatggccggtccaacgttgggaccggcagctggtcgagaatcgaagccattgtgaagacaaaacgcgattaaatctatcgtaagttctcctgaaggcgaggaagagcagtcagcacgaggcgtcgggagaaggggggagtacaaaaacacggtggactggacggggtgttaagtgcttacctgtcacgtttttgctcggaacacacggatgggaacaagagaagggaaatgccggttcagcggcagcaaacaacccaaagagaataagagaaaagaagaaacgtcgcgacacccaagcagcaggaacgattaagctgagtaccttgggggggggggggggggggggggggatgcgccgacaaagaaggtttgcggaaggtggtgatggtggaagtctggggcacgggaaaccaaatattttcagagactggactgccctggcgcaaaaggggaacccgcgaagaaggctagcctcaaccaccttggctcatttccagttcctgcatgtgaagtctcattttccagctgacaatttttctgccggcccaatcatcgcttggcatctctcgtctcaccttcagcgccccaccgacacctcgacagaccccggacctcggaatcgaggagtggccttgtccgtgtccggtcgagactgtcgttgaaaaccagagcagcggacagcctgccaaaaccacctgttacttcacctaacgaaacagttcggacacggagccagacgcttcatgtgccagcacgagtcgtacggcatcttcatgctcaccgtcaccgcgctgccttcgtctcggcgttgccccctttccactgcagacgttgcctgactgaaacccacatctcttgatctctcggccctatcgcaggacgagcagggtggacactgcttcgttgtcctgttgcccaggccgccgccaaatcaacaacaacaaatccctcgccattggccaattcgcagtcaggatcggcgggtcggcgtgccgtgtgcttcgaaggccggaaaggccggatgccaagcacacggagattggacggcggcttggtttgcaacccaactgtcccggtcccggtgccgccggttccgggtgtgtttcggagctgtcgatgacgtactttcattgcgggacaagtgaaaacaaacttttgtgatttccaaaataaagagaggcgtgttggcggcggttgtaacttgagactaccttgggaaattttccttataaacaaatcaccaagtcatgatcaatgacatcgacttgatgctgacttgcagattatgctacaaccgaggcggcggcgagcttcagccacggctcaaacatggcacaagccacacaatggttccgcagaaaagctggagaaatcggtcaattgaatatctttgaatggcggggccgagtttcaacggtaaagctagtggattaagcagaaagatatgcataaccgaagatggttcgattctattagccgtcattggctggaataccgcaacccacgcacacctccaagcttctgatcccgagttgactgcatcaaatcaatcgtaaccaagccacttccccggcccagcccaccgtcgacgtcgagcttccgctgcctcctcccggtctcggatcctgcacagaaatcccctctctctcttcagaccattcacaatgtcggcctctctcctccgcatcgccgcccgcggcacctccagcgccttcttccgcaccgttgttgcccggccccagcctatcgctgtgcgcgctgccgtcgccgtccccaagaccttcagcacatcgatgcgcatgcgctccgagcacgccgaggagacctttgaggagttttctgctcggtgagtgctggactggctgtcgagggcaccctggaagagctttcggaaagctctgaagctagcttcctcgacatgacgtgacccttgtgcttgaaccccatatctgggcctcagacaccagccacagctatcttgatacggcccattggctaacatgaagctttacacagctacgagaaggagtttgatagcgttcaggatgtctttgagctccaggtatgcctgccatctgcaagcttgccagcgtgctcttgctaacccgaagctttcccccaccttgtagcgcaacctgaacaacgcttttgcctacgatctcgtcccctcccctgccgtcctcgccgctgccctcagggccgcgagaagagtcaacgacttccccactgccgtccgcgttttcgagggtacgatctgctctcccttttttccatgcgggatattcctgcctcggtagacaagatgctgatattgtgatataggcatcaaggccaaggtcgagaacaagggccagtacgagcagtaccttgctgagctcaagccccttcgtgaggagctcggcatcgagctcaaggaggacctctaccccgaggaggctaactaaatgctcgactattcatcgacatactttcttgttctttcactagacgacgaatttaaaaggccaacctcacacgcttcaccacacatccatagactgcacagctggcttggacactttgaaggcaaaagctggctgctgccggttcggtgtgagagttcatcattatggataccactgaaacccgtccaccacatctcatctctctgccttgatagaaaggaaggagatagataaaaatcaatgtgtatattttctgttacggctgtgtttttcttgcatgtagtattgcggttgtccctgcctcgccgaagacaataagctcggacaactttttggggttcggacactgtcgtggaattcaagttcagtcatgatgcacttgcaccgtagagggaacagctaaaagactaaggtcatacgcagtaacaggctcacagtcatggcaggctttcagggtaggcacgagtatgtatttttcaaccgttgtcctctatcgcgggccaactaacaccaggtagtctcgaaagacatttaacaccatacaatatttaacctgcatcggaaacattgatattgttcctttccaacatgaactattaacctcatcttcataacaggccagccgctcttctctttgcctcatatccatcacatctcccctccaaatttattattcccaggcttcctctacccaaaatttcacaacccaaccatctcctcccccaaaacagtaaaatgccctccagcccccgtccacccaaacctgacaccctccaaacaaccttttctcacacccaccaccctcggcgtcttgatctcctcctcttctcctctatgtcccgtctgacaactagcattaaacccccaggtaaccaccctcccatccaccgtaacagcgaccccatgctccgcccccgcctcgacccatctaatcttgtcgttttccccctcccccagcggcaagagcctcaccggacaggtcacaatcctcgccctacccctcccatccctaaccacaaactcctcctcccatttttgtcccttttgtgctgtcaacgtgtcgatatctacccccgtggcgaaagagtcaagccttccccaggagtaaacactcccgtcatccaacaagcaaaggctatgactatttcctccggttagatattttattcttcggccgtttagtatcccctctaggttggtaacccgggttggtgtcgaaatgaataacccccccccatcttctccccggttggagacgagggctcctgtttgggcgtagttgtctaatccccaagcccacacctctccgttttcaccaacggcaaaactgtggtctggtccggcggcgatgtcgatgatgttttttagttttattttcctcggtgtgactgcgcaggagagaagagaatttccgcgttggggaagacggcggccgagttggccttgctcgctgcctaggccccatgtgtagacttggccggttttggtcagggctaggatgtggttacctcttgcggagattttggttatgggttcaggcagggggatggggaggggggtgcgttggatggcggtttggggggtgaagagagagacgccttgggaggagcgggtgcagccccagccgtagatttggccggtggtggagaggaggaaggtggcgctgtcgcaggcggtgatttgggtccattttggggggtttatgtttgggaatgggacggggtggggggtggattcgagggggttgatgtctggttccgaagaggtggtggaggagttgtcgtcgtggagggtgaggtttttgaggtgttcttccagccgggcggagctggtgtctcttcccagggcaccgttgtcgttgacgccccaggtgaggatttcgtttgtggaggtgagggcggcgcagtgcataccgccgacggcgagttggactactttgtttttgattgtgggaaatgatccctttttgagggatttctcggatggtgatgggcaggagaggaaagggttgagtgttgggactctgacgtctccgacgcggtggttggggccgaggccgagctctgcattgtcgttgcttcctaggcagtagattcgaaggtatggagtgttggcgggctcctcgtcttgggctgcttgttgatgaggttgtgttttgggctttttggaagggcgagaggcgtttgctgggtcggcatagatgatggatcgtttgcggctagatcgtcggggtgatgtacggtcaccgtccatcattagcaacttaaggaggtggcaagtggttcacaagatgggacagtggtggcgtgaatgtgctgctagagggagacttcagtctggtgcttgggagtgtgaagaaagagagaagtgtgtatgtttcatggtgttcaatgatcaagaggactggaaatatacaggataccttaaatattgcttaaatttgatgagaaaacattgattacaaagactagattcaaatctcccaggcaagtaggcatccactgaaagagcgagcatagagtgcgatcgtttgtcttgtttggttaggtaggcgttcggatctacaccatggtggcagagcctcggactcagggatcaaatatcggttttgagcactgataatatgctgtaaacgcaataagctggtacaatgaggcccagatcaagaactgaggctctcccagtcttagcagcgctcttttcaccacaccattctgtacattttctaggtcatttgatccctgtgatcattcgaagatatttgaagtcaataaagctgacaaacactgattacaaagacaggaaggttgtgtcaaaaagaaatagtcaaaaaccatgcacccatccgcctccagccaatgagcgtcccccacttacatgcgcccatcctgtttgggacttcatccagcaatgttgcagtcaccgagaaaaatcgagcccatacggttcggacagcttctgtaggtaggtacctatctggtaggtttggatttctgtcttttcattttgtctacctaggggtctaaagcggctgagaccaatgaccatagcactcgagccatccgtcctggttggacacaaattcatctaatgtttttcatcaaaccacgcattaggactttcagaaacatcgtgctgtctatggcagcagagaacggaaacaacatttactttagattgatcgtcgagaagtaactcttgagatttccatcccggtctttgcaacggcagctcatatagaacggcgcttgcatcccacattccacacacgagtcggcgtacccgcccggaacactgtgaatgaggggtcagtacccgggtaagtacttgtggatgtggcaaaaaccaaagcaaacatacaccccgtctgtcttgaacagattgccattgaaattcgagatacaaggattcagatccagctttgaccacctcatggtgttgtacgtggtctggcactgggcgaccatccagcgctgctcgacaatgaagaaggttcccgagcagctgctaaaccagtgttgggcggtggcatgatcggcttcggccaggaatacagctgcggagccgagtatggtggatagtttcatggtggaaattatagaatgtggaggtgggtggtaagttgagaccaaagacagagagcaagtacggagaacatcatctggcggcgttgtctcttatagctgagcagaattgtccaggagagatatctcatcgagacccctgaggactgcctatttccacacatggtactacaagaatttacaactcgcatcgagtggcgctttcaccaacagcatcatgagcttacgctcgctaacgatacttggcaacgcagtagtgttgttgatgcagtgcactatctgccaacagacatgtaaatcctcaagacgatgctaccttgttggcccaaactctttccaccaccacgcgctcgagatatcaccagatacaattcaggcggggcttcttccagccgtgatccgaatgcctccaaggcgtatcctgttcggagcgtggctggcaaagacgtgaactttaaaatgagctctcatgtgtcttcatatgatacaactctactcactatacaaatctactcttgctgcccaggtgcctcctccccatacacccaagtcaaacccttcttgccctcctttgtcttcctcaacagaatttcgctcacaaccacctcaacaccctgcttctgcctcctctccctaacaaaatgctccaacacctccgctctgctcttgaccttgccctcggccaccttctgctccacctcctcctcggtaggcacgccaaagttcttgaaaggatacttgtcgtacgtctcctcgctcaacagcttaaacttcggccccttatcatccaccaaaaagaacgaacccaccagctccttccaatccttcttctcagtaaacctctccaggctcgccggctgccacattggaaccctcctgggcttctccaccaacttagccgtaaccccctcgttaaaatcaggataagacataaacttggtcgcaatcgaatgctccctcttgaacgcctcagcaatactccacgtcttcccaatcctcatctgcttcaacgtaacatgcaccgacgtcgggctcctcaaatgcaacgtgttcagcgtcttcgtcgcccactcccccgtaacctcatttttctcctcctccctcaaagcatgcataatctcatccaccgtgtcaaacccaaaacacctatcaatcgccctcctcacctcccccgcaaccgccatcggctcctcccacggcagtcccgtgacaaactcctcaatagtatcattcacaacctccaacctcctgctcatctggtcatagtccttaaacctcaactcggccagcctgctctccagcgcgttcaagctcgagctgtgcagataatgcgtcgcaacccccgcataaaaagcattcacccccttcaactgcccgctcgtcagcgccaaccaagtccccacctcccccgccatcctcggcaggaaaaaactcgcgcccacgtcgggaaaaaacccaatcgtggtctccggcatagaaaacaccgtgttctcggtggcgatcctaaaaggggcatgaatgctcaatccaaccccaccgcccatggtgaacccgtccatgaaggcaatgtatggcttgttgtacgtggcgatcagatggttgagcttgtactcttgggcaaagtaggcagccgacttcgcagggccatcaatggtagggtctcggttccattcgacgagttgctggacgtcaccacccgcgcaaaagccctttcggccggcacctttgatgacgatgacgttggccatgtcggatttggaccactcgaggaggcggggtgcgattttccggatcatggacccgttgagggcgttgagcttgttggggcggttgagctcgatggtgcggaggccatagagggattggaagaggacgtcttcggggtcgtcgttggggcagggggtgaagtgggcgtaggaggaggaggacatctgggaggtgggttattagtttaccagaatagtggtagtggtggtggtgtcgacactcagacgaagggaggggaatgtaccattcgtgattgtggttgctgctgaggcagcagcttagctctgaggggcatggcggcggcggctctgaagatggaggagcttggtctggcggcagcgcgacatggagccgctgctctggcaagaatcgcctggggaaacatttaaaattgaagtaaaggcgattgccctctggcggtggactatgacggggaagggacccagagtgataactgtgccaacgccttttctccctcggttcggttcttcggtcgtcgtcgtcaagctttcttccaacaaccacagctttttgccaattgatgacccgaagctgcccgcgcaaagctcaagcaagtgtttctttcgggccagggggccccggtcaaaaggtgacgtcggatgaatttttccgctaacagctggtggccagctgcccctcacttacaagcacatcactttctctttttggacagtttcttcttatcaattgttcatgatgatttcatacactcattctatgtccctgaaaattcaaagcttctcccacccgttcgaatcctcctccagctttttgatccccgtcaagccctggaagaagctcgccaagccccaagcacctgggtcaggaacttcctcaaacccagaaccgccaatgtagacggtccttccaagactggccttcatccccttggtgccttcagcaccagcaactgctgcctctgctgccttcttaacatctcctgtctcctcaagagtgttgacaaacggatatagagcatccacaagtgtgcgatctccaggccgagctggtgtgtattttgagagggcttcacagctttggcgaagtgcggcagcccaaaccttggctgatgcctccttttcgctttgtgatgttgttctcaaagcagcaacaagagcgttgagaaagatggcgtacaaggctccagatgtgccgtccatttccatctcgaccactgggatgatgttggcaaggtctatcacaacgtcgccagtcaagggcttgctcgagaggtggcgcaagatggctgttgctgttagcgcaatgtttcaacgtcaagaaatggtgataaactaaccttcagcacccctcttgagaccaataccgcagtctccatcaccaacaatagtatcataccgcgtcacatcaggttccgccgcaaccaccgcctccaacccccgagtgaacacctcctgagcagccttcgcatcgaccctcaacccactctcgcctacctcctccccattcgatgcatcctcctccctcgtagcctgattcctctcctcccaagtcaacttcgatatctgcgccggccaccccgtagcctcacactcatcatccaacaactcaatcatccccggtcccccgatatccgtattcaccacattcaacaaactaacactaaaccccaacccattcaagctcgtcatatacgtcccactcaacaccctcaccggcttgatattccagtcctcacccaactgcttcaccacctcagccacaatccctcccaattccagtacactcaccccacccaagttattcaccaacaaaaccacctcattcgaattgacattcacaaaacccctctccttgtcattcctatccagcatcatcctcagcatctttcccaccaattgcttcagttccattttctccctccccgccccggcctcattatggattcccatcccaatctcaacctcatcatccccccaaacttctccccctcctcctccttattcaccgcccgtcccggtacatggaacccgcccaagactagcccccaacannnnnnnnnnnnnnnnnnnnnnnnnnnnnnnnnnnnnnnnnnnnnnnnnnnnnnnnngagcgcatcattaatgtggggaatagcccattgccggcaattattttgatgttctagaattagaatgagagtagggagatattccggaaagcccaacatctttggttgcggcctgatgaaagttgattgattggcttttaatgcaaggtacagcaagtgtggcaacaatatatctcctgctttttcttggaatacatggaccaataataagctgtcttcgtttctttcttttgctacgcagacgacccaaaaaggggtatttacaaaacgagcaaaaaagccaacccatgtacaactcagttaattacctctcacatccaacctctctctatcgccgtgttttgtctattcccgctataatatagagaaaaacctctcatatccccaaccccctcacacacccccaaagcacaaccggcacaacaacattatcattcccccccgtcaacaccgcctccgtcaagctcgccagcaccgaacaaacccccatcctcggcgccttctccctcccccactccctatacaacctcccaacatccaacacccccatcaaactctcatgccctccaccaccaccaccaccaccaccaccacctccagtcgtcacagtctcccacccccccaacctcaaccacccccctccgacccccaaccccaaaaacaccgcccccgcaaacgccacactcccctcaatactcttcccccctccccaaagccacttcctatgcccccacctcctcccaatcaaactagcagccgcatctcccaacccaacacacacaacgccgctcaccatcgccagttccctctccctcacctcccaccccctaacatacccctccccctccctcccaagaccagcaagcgacagccacaacggaatagcacagccaatcagcaaaaaaatatggctaatcaccaccggccccctcaaatccctcccatccacatacggagtgaggaatttcgcaatcggtcccgacaaaggcggcagctgactcgctctgatcaggtccagaagtagaaatatcgctagcatgagtgacaacgccaaagcgatgtacgtagggtcgatgtaaatcgtaggcaagaacatggccaccatcataaagtgaaacacctttcttctcgtgtccacctcgcagactggtgatagactaaagactgtggcgaggccgaacgcaatgatcgtcagccagtagccggagaggacaagtctcgtgttggcttctccaaacgaaaactggcggaggtgttggatccagcccgaggagcattggacgtcagaaggctcgagacgaaaagggaggcagatccatttttctaggtcgtgctgcaccacctggaagcggaactgtgagagcccgccaaagagataacccaacgcccagcctatcggttcgttgccgtctagggcgtagtactggacgtaggtccggatgccgaggaagatgatgaggatgatgctcgtgaggacgtagctcgagtacatccacttgcgtagggtggcttgcttatgggtgagagaaaagaaggcgcgcacgcttgaggacgcagaacgtttgcggcggccggacggtgtgctgctttttgagcgtgggccgggctttcccgtggaagggagagtgtgcctccgaggtacgctttggctagcagatggcttggcaaagctgagcttgacagcactggatggagcgtcaggggttggggggggcacgacttcgttttcgctgaagctgtctgcccggagggtggtgggcttggtggtaagctctcgatctgtagactgagccgagtcggagaacgtgttcgtgaactcccctgtagacgatcgctgccggcgggcgtttggtgatgacagcatccgttttagctgcccgaatccaaagccccctttcgacggtatctcgctcctcttgaaccgccactttggtacacgggccagagagatcccccattgaatgacctgaccgctaagaaccatgagaccaatgccgcctccccataaaacagcctgcaaaataactgcctggggagaggttgctagtagtagtaggtttatgagtgccaccgacagcagttggagctcggctaccaagagactggtcgtggtaagatggtgcaagataagacacaaagtctggtgtaatggatacagcaagaccaacacttcagctgacatctcgccctgctgggatcctggggttgttgccatgagtctgtccagaaacagcggagcgcacgagaacagccagtgactcgagctgaggctctcccaataccgtgaacccgggaacagagccctgggcaatgctgctatgccgagaaccaaatttggcaatacgacacccttcacattttgtgccaccaaaaaggatattagaactggcgtaaagaatggatagagaagtggtgctggatcgaacgttgccggaacacgaatcggcaaagccttggacggcgtgccacgacggtaagcccatagggccagtctcagcggatacaaagcagctaatccaagcagcatcgctattacagcaagaacttctgcggccactccgttagccgggttacaatatctgaatctattagggtacatactcttgccgtatatcctaacataaggttgagcgtctgggttcaaaaccacgatgcccccttggaagccaagcaacaacacttcagctattcttcgtgttacttccttgcgccggcgcactctttctgcggtgaccctcttttcgccatggtttatacccaacgccgtcttcctgccctcctcctccagaactgccggcgagagccagggcgtggatgttccggaaagcggttcattctttccacgaaggcccttatgtagccttacttttggtgcgggcagacccttgaggaaatgttcatcgtcggcttcggtcccgctgtcgctcggtggtgttgagtccttgccaagggagggaaacggctcgtggctcggaatcaggcaatctgacggttctaatagctcgaagctccgacggtggtaaggatgaggggaccgagagaggaccctcaaggtgtcgagatcgtcgtccgcattttcagcggcggtttggtttggtgggggttgcaactgctcaggcatggccaatctcgaagagcgatctggcgcaacatgggggttttgcaagagctaggcaggttccgaagctggattagatattgtccacagtgttgaaaactgtcgttgacatgtttggccacctggttagtctgctggcgccgttgacgttgacgttggagcgttgtcaggcggttatcacatgcccgaaagtagctaagaggtgtcctgtccgtccccttgaacgcacgatgcaattactccctggatcccggcgggccgtcaagccactgatgacgggacggaggtggtcatagcttcaagggaatttgacgcgcgatgtggctcaggggtggcttgtagctgtgtgtggagggctttcaacgacattcgattcaagacattgcgctctgactgaagacagtgtttgatgagataaagaattgtgtttcagacatttgaaaccacaggcaaggctctctctcggctggtatctgtgcttcttcaagcattggcaagttctcctcaaggctttgcttggatggtgggtaatgctctgtttttagatgaatacgagatgagagcctgacactaaaaaagatagcaacatttgatctcatctcgtcaatatcaacacgacggcaaaagacacatcattactggtatttgtttccaagcacaatcgatgttgactctgacgatagcggagggcctatggtaccggaaaaagctcgcataaaataattctcatgtccatggcggctgggcgaacaccatgtcgggatactacagtctttatcaatgacgttgacgactttccagaatccacagttagggtatagtgtaattagcgcagttattaaccaactttgtgtccgttaccgccttggctagcccagtatccgaagttgaaacatgtcgaactctggatgacagacggccggatttcccacctgttttggggacacgtgtgtacgctcttggcagcggctcatgaggagaagaaagcatgcggtgaaactgaagcctctctggcagtgtctctcgcctgccgcgtcaacacctcccatttgcgaactggtgattgtcgacaatcgaggtggcgctagtccagactgccaagaggtggaacggcacatcttgctcagctcgctgcacctcgattcggtgggacagccccgatcgtgagccccccaccaaccactcccgctgaagacgaggaaaaaaacgaatggctgacagaagagaaggaggctgcagtccgaaggctggagtggcatccatcccgagcctcaaataccaacacgaggtgagatactgacccaattgcctgatcagtcagtcctctgtgaagctgtcgagcctttgtgtcttttgtccgggcggccggactggcgagaaggctctgtgactctgtcactctctgttctcttctggttctgttccaggagctccctgccaggctgttcccgcccctgtggatgttggtggggacaattcacacccctgccagtgcggcgtcatcaaggcttctgcgagctccctctctgcatttcaggagccgaacacctcgatggtttttgtgaacttctaccgtcggatttatatccccaaccagcccaattgattattaccaaacataaccgccaaccacccccccccctccgcccttctttgtcctgttgccactgccacgcacatcagactctgccacagcgcctttccagccaagctgaacatatcaagctttctgtcgnnnnnnnnnnnnnnnnnnnnnnnnnnnnnnnnnnnnnnnnnnnnnnnnnnnnnnnnnnnnnnnnnnnnnnnnnnnnnnnnnnnnnnnnnnnnnnnnnnnnnnnnnnnnnnnnnnnnnnnnnnnnnnnnnnnnnnnnnnnnnnnnnnnnnncagtctgtcatacatttgtcgtagtgcctgcccgatttccctgcttggacttggccttacctgatttctgcttgtctcaactccgcaaaccaaaccaaaaccccagacgttgcatggactggatcactggtcgctgactgtctcgtccagcacacaaccacacaagcagtctgatactgggcatctcctagactagtgcgagtgatacatcggcggcaagcttttccataggcgcggagattcagcgccatacatcacggtggactcttcctgcagctattcggcaccccccccacctgatcgtctcctcttctgcattatcaaaaacagccatgagtccttcaagcccagtcggtggtaagccgccttcttacgagccagttcccgctgtcgacatcgacgagaaggctgccattcagacaccaaaagatctcgaggacggccaaccacaacctcgacgcaaaaccatgactttctgccgaagagccatgttagtcttgggcctcacatggctggtgctaaccggtgtggccatggccggccctcacccgcggtggaagatgccgtgccatcaggccgaaggccagcaagaggtcgccgatgcctcaagggattcatcattctcaactctactgaacgcggcatcgcccaagtctcttcacgaccttctccaccggtacttccccgagaagttccaggacggtgtctggccatcggagcgcgatgccgttgcggccgttcaccaagccaatgcggctttggcaacgtccattgtccaactggccaagcgggacgcgaactcgacctcgatcgaaacctccactagcgtgcctgaacccgagcccacaacttcaacgtcctctacttctgtgcccccagttgagaccaccaccaccaccccaaccagcacctcggtcatcactcccagcagcaagccgtctcccacgcccactcccgagcctactcctactacacaacctggtacgtccctcacgagtcccacagggaacactcttcccccggatgacccttcttcttctgtgccgcggacgactgttggtgcgtcttccacctctatggcttcgtcgtcctcttcgtcgttgtcgtcgtcctcttcatcgcaggtgttgtcttctgcggttgatggaggtacgttcggcttttttttcccccagacgttttgctcgacgttttgctcgttgatatgaatttggaggtgattgctaatagtcatcatagaaacgactttgacgacctctaccatcctgcctgatgaggagacgtctacttctacgcctcctcccaacacgaccaacacgagacgtacctctagctctatcgtcaccactttcactcagacctccaatggcaatgtcatcactgtcacatcgacgacttttgtctatgacatcccggtagagacgacgccagcgggtgctgaggagccgactgttacccctagcctccagaacggggctcccgggatgcagaagcagcaaaaggggtcgttgttggcgggtgttattgctgcgatgggcatgtttctgatttagtgggtggaattggtgcggacgcaaaccgggtgggaatgggggccccctgtttgttttctggcgggcattgagctggggtgcttcatggtggcggctcttttctttctgatggtggttcttttctttctgtcgttctgcatcgcaatgggtcttggttttattttcagggtcttggggttcatcatttcctgttttcttggcgagccgtactgcgtcattcacggccggcgcaggcatcacattcattacgggagggatatacacatggtaacaaaagggaaacatatggcatagatggaacacaaacacacgcacagagagagagaagggagggaatgtacatatatacgggtattataattggtggattagagggatcaatggatgggtagggagcagctttttgctgtagctatgctgacatgatgatagaggaatactattgacattacaaaaagagacatgagtgagattgtgatcctacgaattatatctctctccatcattcgaatccctagcctctgccatgttttggcaactccaaaagtataggtagtgattgcgcatgatctcgctttatttattatggccgctatgagagtgattttgggtatcgaaaatagcatggagaagtaatgtaaacaaggtgtctctggtgaatgtctcgagttggaatgtgccccctttttcccggacattcaacaacaaacaggcgtgatgtgatttaaccgggcccaatctttggcatatcgtggtgctcgctcagcctggagaggtgggaattcagctcctcgacgcgctgcttgtgggttttgaggagctcggggcggagtttgcccgaggaggtgagttcttgtaactattgatacaacacccgtcagttacagcattgaaggatgggatggtggtgggggggggtggaagcataccctcttgcgctttgcctctaggaacctgcgctctgcttctgtctttggggggtcattatcatcgttctccccgttttctggtggtggttcttgggatggtgagcggcgttggggttgtttttctgagtcgggggtgggttcgggtgttggtttgtctgctgggggaccggtagagaggttcttttctaggtcggagggtttggatttggattttttcttcttcttttttatggcggcagggttgttggagacgccttttagtttgagggtgccggggactgcggcgcggtagtcttctgagggcattgtgggcgggggttataggggaatggggggatgtgggaggacgggaagggtggtgatgatgggttgatggttgaactgcggcgactggagaaggcggtggaagatggcagggtgcgataagattcagataagatacagacatgtgtgtggggcgaaaaagcgggcgccgtgtcgcgccgagaaaaaaagcacagacccggatcccactgaaaagttttggggtatatctttagattttgcggtgcgaatttgacggtttcttctttttcttctttagatcaaaaagtattcacggagctgccacgaccgtcgctagtatcccacggcgtctggttgcctgaccctcgtttgagagtcgcgctccggagattgaaatccttgataggaagttttgcaccttttcctctgtgggtgttaaatgctgaatgattggagacatttttttttgtttgctgttgatgatggggatggaggggctggttgagggcttctctggacctggattatcaagaattacgattgattgctgtgattttgctgccaagtgctgcgattgctctgctatcaatcaagtcattgccgtcaagctgtgatttgcaacgtttgttgatgtgggcttctcgtggtgtcgttggcattcgcgatctgtgatccaggcccgggctgcccaacttccatcactgtgatgattcttgaacacttgctgctgtacgtgcatttcaacgcgactcttatctggtccctacgctctggtttatttttgtgttcgtcactggcatctcgacgtctcagactcgtcccagctcagtccctcatgtggtcgcgtctcccgcttcctcaccgacgacgtaggaatgcttctcaatatgcccccattcccgaaccaagacaccacaacatagctcgggacggccgtccaaatcactcaggcgtgggaggtaacagtttcaaatcagagatgggtgatcgagtgattctgttctggcatataagccacgatagacacgaccaccatggcgagctcttgttctcctttttctttcctcaaggtttggatcattcaaccgtagtcgctctctgtgttttttcttgtttttcttgacagacaccctcttttgacttcagtcactctttttgacttgttcttctactactacactctttttagactctttaaattcatcatcgtcatgtcgtaagcttccttcccccctttctgtgatatatatcgactggttgtctaatgatggagagtaaaagtgagtggataggcaccgacggactatactccgcctctctcctctcctgcgacccccccgagcctacttttacccgtgaatgggtcgtcaactttatcgctgccgacgcgagctcttcctgggatgctgcttatacgattatgcaagagttcactggcgatgccaacctctggtctgtccccgagagcgggatcccccccaactttgtccagactgccgtcaagtgtgccgggtgcgccgagccgactgttacgatcacttgcccgaatgttttggggacggaggctgctgttgtggtgggcaatggtgtttgggctactgttgcgcctgaggctgaggttgaggctggtgctgcggtgaatggtgagccgggacgggttgcggctgtttcgcggggtgaatgggagggggatggtgattgggagcttgttgcttctggggaggggcctgactttgggttgagcggtagtctcttgggtgagtctggggatgggaatggggaggaggctgttgttgagggtggtggtgcgtcggctgctggtgttgctgctgccccggcgggggttaatgtgcctactgggacggaggagaaggttgcttttgctactgctggggcggggagcttgacgctcaagagggggttgatgtgggggcttgctttggggttggtggctttcttctagatgactggggatgctttgagacgggcgtttctttctgttaggtttgggatgttgtgatgtactttggcagcaacatatggcgtttaggagacaacacacgatctattcttttctatgaaagacagtctttatcagaagttgacgccggtgtatgggctttggacactgccaaagccttgcggacaagctcttcccaaggcagtgctgccactccttatgtagcagatcttcgctgctgcgcaagcatcacttgtacagtttggactcctgatactactcttcccttggtaggtgttgaacagactgaccagccctttgtccttttccatagcttctgtgactcgatgccaaaacgtggcgtttagaggttcgccctcgggccagtctgccgctggactgtaggcctcgcgtgtagagtattcgagttggaagactggcccggtaccattgagagtagtgaaggtgttgacgtcagcgtagtaagtgtaggcttcgaatatttcccatgtgccagtgtcgacttcgtacaggcggtaacccgagttcaggttggttaacggggtcaatgaggggccggtccatgccgcaacaagagcaccatatgctgtttgtaaagttccattgttactgtagaaaatggaaacttgatctggcaggaattgaagtcagtttggaggctcttgtagcaatatcaagaatcaaatacgtgccttcatgggtgtgaccgaaaaacacgttagcaattacatgcggagagtatcgctcaatgatttgatagaaagcatccgaccccccagggagagcattttggccctgccagccggtgggcacatggcccatgatccatacccgttggccttcgtcctcagctttctgaagctcttcgacgagaaaggagaaaattcccgagtagtctgggttgtcagcatgtagaaatgcaaaattattggcttggtaccaaaaatcggtgttgattgtaataatcctcaagcccagcggatggccaatagagtagccgccgtaatgcaaagaagcttgggtctgagtagcattgtcaatccaaccatagtgctcccagagcttggagatatgatcgtagtgccaggagaactgttggccgagaggcccgttgcggtcgatggaatgaggactttcgaggttggttgggactgagtcgtggttctggatttcgtgagtaacttgaccaccttcactagagataaatggaggagacaacataaaaactcacaccaagtgccacatagatgggccccccgatgtatgccttgaacatttgccaaacggacacctccgtggagtgtacatattctcttccgctcacactttctatttcatgggcaaccaagtcgccactgtacaaagtaaacgctggtgggttctcgattgaaacaccagtcaggggctgaatggattggagcgcggcaagtgctaggtagtagggagaatcacacttgtaagaaccaaaaagtggtgccggctgattgataacagcttgagttgagttcaagttcgcaaagttggttgaggagatcctgcaacacatcccagcagtacagtttgcttcagaaccagttttgtatcgggtgtccaggtgaaggtccgacaggtgcagaaccttgactcttttcccgctcctggatggtgttttggttttttccggccttggttttggaaaatggactttatatggaacgactgtaggtggagggcagaaagtaggactcagccaggcgcagatatactgtccatccagtcccgatacattggcaaaagtcaacacctgtgtccatggagcgccgtaagtggcggcctggtatgtctgctcacacacagttgctgtttgaaatcctgtcccaatgcaaagggatatcataacctcaggcaaccacgcaggcgcaaatctggccacggtttgaccgaccaacagggaagctgtgcatttggagcagttgtctgatgtgttggtttccaagatggcccagattgagttgatggcatcgtggactagggtgttggcatctttgtatgtcaggttggccagagctgggggatacagaattgggtccagaccatgagtcggtgtcctgtctgggtttgtgaggttaaaagggaaggtcacgtttgacaccgggtcaataatcacgggttgaggttgactgtccgtggtcggcccaggggtgactgatatcaagacagtcaaggtcagctttcgaggatcacccgagggcgtatttttgtgactacgaaccatagtagttctgaaacaccgaagtcggaaaagcagcaggtacggtgaacgcagataggagactcggttcgccatcagtgatactctgcgtagatgacacagtagtccctgaaacaaccgagccaggtgatgtccaggagggggccaagagaagaaagagatgagtgattggccacatttccaactttaacatgaatcaaaccttttttgggtgtgaggggcatgacgcgaactacatacatatctgtgatcccaagtccctttgcacaggtgagtgctcgtgtagcctggcttgtgtgaacggctggtttctgagcgtttgtcgttacagccgagtctcaacggccagaactagcttcttgccgatgttgcctgtctgctgcctgctgcttgatgaagaggtcatggaataatcttctccgcagtctaaagctaagatgtgattcggcctgataggtagactcctctgatatcgtggctcaacagagcaggcgggccatctactcttcattgtcgactgtcgacagtcggccatcaatcttccaagccgcaagggagccactgtaagctggcgggcaggtgaaattcttgagaagaccttgaattaacctgacccgcgaggagagacctatatgttatctaccttgcagcccacaaccttttccatttccgttcttttgccagcaccattttccgccagcaaacaagcaagtaagtaaaccaaccggggccggggccgggcttgcaaacaaagaaatagactgaccagcgccgtgagcgaacccagatatcccagcaccaagaaccgcttcgacgcgaaaacaaacgcttgcaaacccgcaaccagagacttgcttggacggcccacagccaagcgaagcgcctgagcacgtgacctcccagagacctcccgggctaggtaaggctgaccaatcaacgcgtgtactcaattgacaggacccttgccaaagcgtggccaactcggtgccaaaggcccggctgtcgcagccttcccaaatacccaagacaatcaccaaggcgcttggtcgccggtctgtaatacgagttcgcgtcccgtcgcggaagcccactggcagccttgcccattctgtcaaaaggttgccaatgcctgccagaagaaaggccaagtccaaaccgcccaaagccagacatcgcaaggccacacgcgatcccactcctgaagaggagtaccaagtccgcagcatcctcgacgagaaggtcgagcgcggcaagctcttgtacttgatagactgggaggatagccccgaggggctgacctacgatccaacctgggtacttgatgattcctgtgctgtttagcttgcctgtcaaagctgcttgtctcgttcaattccctggggacgcgctaaccgccatggggtgtttcctcttcttaggagcctgccaagcacgtaaacgaggtagccatcaacgagtgggaggccgagaagaagaagaagaagaagaagctcctcgctggggaaggtcaggagagcagaaagcgatcagcaagctctctgcccgaagccgccgaggacgagaacgaggaagacgacgcgagaccttcgaagagggccaagggcgacgactcgggctatacatcgccagagctagagcttggggttgaagttgataatattcctgacaaggcagggaggcagcttgtactggatattcatctgccgtcacaagtggatcctaacgactatcagttgtttacagcatctcagctctcgtctcaaaacagcagtcagctcgattccacatcccataccgatagcaacgaggcctcatctggaaaggttctcaaccagcgaaccatacctgattcccaagccactggcgagtcggagctcagttcaacgatcccggagattgtgctggctagccaatcgcaaggacggagagtgggttccctcgagcgtgaggagcaacaagcgttggattctcaagtcgcgagcgaacaatcgcagcaggcagagtgtgagcagcaggtcgaagagcaccagcagaaggtggggcagagccagcaagaagagcaacagcgcaaggagcaacaaaagtccagccgggaagaagaacctcaagtatcgaacacgttggaccacgacgaggggacgatatcagagtctctgataccatcgcgccaacctgatccatcacatcaacctgtcaaccacaacacgccacaggcgtttcgagacgagaataaccattcacagagcagctccgtgtcggggttcttgacgcagcccgactaccctcacctcagcaacgacccctttggtggagtggagtccgctgtggctgaggcttaccaaggcagcgaagtgaatcgagatagtcaagttgcgattagccaacaacgccgcacgcctgcacccatcgaaaactcctccatcccaagtgtgagcaacgcgccgcgagctgattcaccacaggtcacctcaccagagatctcgagctccagttggcagtcgcagcaagcgcagttggtagatccatttgtgccactttcgagccacttgaaccaaattcgaactcaaagccaggagtcgagccaaagggtcgaagagttcgttcccgaaacggcgcaaaaagagaggactctggtttccaacagcgaacaccacaaaaccccctgtcagtgatacccgcttggccagagccgcaagttccggttctgttccgccgcgcagttctaccttccccactactcaatctctccctcaacgatcagaaactgaaacattacgaccagtctccaacaacattcgaatcaaaatggggccaacgccgccatctggcaagcagtccgacgctgtcgcagatctgagatcagccctaccagactggatgctgcatccagaacctgaaccagaaccgcagccagagccagagccagagttggcagtccaccagtcgcataacccagagccttcatttccagtatcggaagaggctcagtcgcaacctccaccacccccacaacctcaacaatcttcatttcccgtttcggaagaagcccagttgcagcacacagagcctgcagttccaatgtccgacatgacccatttacatcacccgcagccgtcaatcttatccgaggccggtccaggtccaggtccttctccccccattgcggtaccaatatcaagccggagccttcctcggcgtgacgcagtggaagaattgcgagaagccatcggtcttcacgatggcagtttatttgaggccccacaaagccactaccctgaagaagccctcacgctttcttctaccgagctccctgttatcggcagccatcatcagcacaacaccgagatggagtatgagaatttaccaacgacagttgctccgtcggatctaacgacctctgtggatctctcacacggtgtaggcgaaggcccagccatgtcgaaccctctgttctcggttcacgatgtacaaccactggggaccgccgaggtggattccgatcacgacgcggcacacgacatcgatgaaaactctattgagcttcgacaattcgtggtaactctacccatggcggccaacacccggtcgctctatgtcgatgttattgctcaaaacctgcaggcgatgactgagtttggcgatgtctactgcgaaccaggcttgcaagctccggacgatgctctgacggccaagattgatgcctttttcaggcgattgaacgacctggttgacctcccagcattcgacgacgacacattccatcaactcaactctgaaggcatgctgaagcatgctatcaattccaacagcaagttctcctttgtctatgagtttctcaagacgctgcggtggctcaacgaccgcatcttaatcgtggcacgcccaggaaggaccctgaaataccttgaggaaatcgtcgcacaagaggttcccttgtcccagctgaacaagacgtatgcagtcttgagtaccgagtcgccggagcacgtcagcgaggcggccagggtgattgtggcagaagctggccaagatctttccaagattggcgggcaactcgatgtcgtcattctcttcgaccatgaagccaggcaggtcgacctgcctcccaagctcagttgcgaatcgacaatattcctgtccctcgccaccatttgctctttggagcacattttactacagctccgtgaaatgccttcgtatcccgatatgtcacctctggagatcagcaatgcgctttgccaggtgaccgcattgctggtcaggcatctcaaggaccctgaatacgcacctccacctcatgaggttgccgccgcatttgccagctttctggaaaaccccgagaacgatattgattacgtgtctcaacccctcccaatcagcgtggacgagatgtgggagtcacaaccccaaactcaagctgataatggcgagttgggtcgtcggaagcgtcccttggatgatgaccaagacatgatgtcgaagcgtcgaaagaccacgcgagcttcgtcctcggtgcccatgtctgagctgctgagagacactttagcgcgccaccctgttaataacgagcggtcggcagagatggccgaagtgccggttgcccagttggagggtatggcgtaccaagtaaggaaactccccatgaggctattttggagacctaaaactaactggcatttccagatattcaagcttgagaaccgggttgacgatctcagcaccgtgaacgcgaagttgcgtgcacatactgatcctctagagaaggaacttgagtcatggagaggcaccctcaacacgcttcacgtgagatatacagaagctctcaacgaccggtccgactttgagaaggaatgcaagcaggccaacaaggtcgcggcagcagccacggagaagctcgagaatgtcaaggccgaggtcgcgtcgctcaaggagcataacaaggcgcttgaattcaagcttgccgaggccacactggcgatggaacagtcaaccgtccccgacattgcccggtttgcccagctcgagaaggaactcgccgaaaccaaagccagggcagaaaaggctgagaagaaggctgctgccttgtcaaacgaagccgactttgtccgtcagaattaccagaacgcctccagttatcaacaggagcagaaccacgagatgaagaggctcagggaagagattgcagttctcactacgcgggccaacgagaatatcgtcaagattcagcagattcacgcagccaatgagctggcttatcatcagcgtcaacttgccgaactacaggacatggtccgggatcgcgaaagggagctggatcttttgaggacggagaatcaacagctcaagagcggccgcagggaaacgaggggaggaagcaccccgcgcagcccgcggataggcgctatgggaggggtgatgcccagcccgagacctggaagaggtggtgctggcagcagggggactagtcctgccgctgcggcgagttcggatcctgccgtgcctggtatggcctacgcgccggctggggcgaatgggcggcggcatcaccttcgcgaacaccttcgcgattagaagaggagggtaaacgatatacgtttgatgccccatatcggtctcttgccattgcggcaagcttattcaccagtctgcgcttatttatcatacggccatcagttttcagtcgtcatcggacaggacgaatggcacaacggcaacgtggaagctcaaggattgcttggtttactgtacatatttgcgtgtttaacttgcatttcgtgtaattgggatggggagttttcgggatactggggaaagcattgtattggggcaaaagagtatatactctgcctcttattgttcaggcgcagtttacgcagcatcaaaggggaaatggagcgcaataatcgagttttatgtcgttggtctcggctgttttgttttattggttgctgcatttctcgaggaaaactatcaaggcagataagggaagactataccgttaggatggttaggcatgaaagttgtgctgggtgcgtgctctgccggagagctgtttgagtttgagggcagacatgtggtggtattgttttgttgcaaatgattgattagttaacacccgtgagtagtcgatacgtattagtgttggggaataaaaatgagtgtgtgttgagtgaaacaatcgaagttgctagttgttgtgtctgccattccagctgatgatatgagtggcttgtgtgatcccaagtagaatgattgagtaaatccaacgtgacaccaccaccatactggacaaataatcatcactaagacagcttgattcgaagctggtactggcatgaggttgtggaaaccttcggtgtggctgaatgatggcgtaactgaaacatggtcgtctgagtgtgctaaaagaacatgagcgagtggcgtaaacgcccatctcttgtggtggcatcagcatctcctcccaaatgttggagagaaatccgatctctccaagttcaggggtaaagggacgatgagggttagggttacacaactgctacagctacaacaactgtaacatcttgtctctgaatatcttctgatgtccgaaaaattcaggcaacagtagaatttgaggtacgatagctgttccagtgctttcttcctttcctcgggaggtttctttcacccgcgtgggctttcacctgattacaaagccaggcaacctggtgggcttccagcgtcgttgctccgagggcggcgggcgataagagggtgataaggcgcattgcctgccgctgagacgcccaacgtcactggcctcgccgcctcatctgcagcctgcagccttggtgtctttctggtccctcaaggtgcagcagctgagcaagctcaagcccctccaagggctctatcggtcaacgaattcctaggacttttcgatctctttcctttaagctttcgccttgttttcctttcgacttttacagctagagaagaagaagagaacacatttcacgatcggattccttataatacagtttgtttcccttccgagcaccccagtaatacaaccttgtcggcatcggccccaggacaccaataccgatattccaaccgcttttgaaaagccatggattacgcacggcttcgtgcgcaagccttgagcaatggtgacgacgaagaagcggtcactgtcgatacccgcgccctaatcgacaaggtcttggcgagatactctggggagtggacgaccctccgagagctgatccagaacgccgccgatgcacaagctaccacagtcaaggtcaagttcgagacaataccctcgatcagcgtcccgcttccacagacgacgaaccagtccgagctgcttaaacatgccgtccagaaccataccctccgacgattggtggtgcagaacgatggccagccgtttacaaagacagactgggcgagactgaagaggattgcggagggaaacccggatgagaccaagattggcgcttttggggttgggttctacagtgtctttgccgactgcgaggagccatttgtcagctcggggagcgaggcgatggcgttttactggaaggggaacgcgctgtttacgaagaagtattcgctgccgcaggagcaggtgaccaaggacacggcttttattctggactacaggaatacgacgacgccgctgccgaatttgctgtcggttagccagttccttgctaccagtttgacgtttgttgcgttggacagtgtggagttttggattgatgactggaggatattgtcacttcagaagaagtcgtcgccaagcttgggggttcctattccgagggatttggagacgagagcacagggggggcttatgaagctgaaggcggccggccgcacaagcacacagattgatgggacgtttatgagtgttatcgggtggaagccccaggcggttgcggccaataggaacaatgagcagcatgtttctgagatgccctcactcaggagtttcttctcgaagcttacttcggctacttcccaggcggcgggactgagaggaaaggctgctagggaggagcaggttgtacaggattccattgccgaggatctcacggctttgtcgacatcgaccatttttcttcgggttactgcagctacgatcgagacgaatgttggtgccaacttttctgctgagctagagcgagctaccaagaaaccgccacctaaggagacgaagttgtcgattttgacttcgtcgtatgatgagactgttgcgtcggagatgtctgcctccagccaggctgccaaggtggccgatatctttgcgtcagttttgcctagcaagaagccgggtggtcgtgtcttcattggtttcccaactgcccagacgactggtgctggtatgcatatttttgcgccctcggttatcccgactgtcgagcgcgaggctatcgatctgaatgctcgatgggtacggacatggaatcaggatatgttgcgcgtggcaggcgttctttcccgtctcgcttttatcaacgagatggcggacctggatgagaagctcaagcgactgtctaccgacaacaaaaaggggccaccgctggctgatgtggagaagttcgcgccagaggctctccatatcctcaagacatacacctttttggactctacgcctagcgctcaggtgggcgagctcattgaagaggctttttggactgcctggaagcgtcctacgattgaggtgttttcgtcgagaggtgtcctgtccacctccaaggtccgaaactcgtctgaggtggtcagcaagtttgttggaggaattccggttattctaaactcgatgaagaatgatctgttcatcaaaaagttgatcgagtttgagctgatcaaggatgtcaccgttgacgatatctgtcaagagctgggctcaaaggcgatggacaaggaccagcttcgacattttattcagtggatttcgaatgccgctgccgctgtagattattctcagcccgaccttagacgactcttggatgttgctgtcgcgactgttagtgagggtggtgactcgggtgagatagtcacactgggcacgattttgttctaccacaacaagaacattcctgcgacgctcccagtgccgccgacttgcttgccacatgcctttacggctggtattcctgaggtcaagcttcgcgctctcgggtgggagcctctggggattgtgccgtggcttcggtttttgattgaatctgccggacaaaaggaggagcagaatctgatgaagaatgcttcgttcgcggttcaggtcttgacggtgctttcaaagagctgggataacctcagcccaagctcaaagtcctcggtcgagtcggcgttgcggaacatcacggttatgccgaccaagatgggcatgaagaagccaaacgaagctttctttccctctgtcaagttgtttgatgatctgccaacgctcgaggggtgtgccaatgtcaaggagaaattcctcacgacccttggagtgagaaagacagttgatctggacaccatcttcacgcggctgttgagtccaacacctacttctgccggaggagccgcgccacgatggagccatatggaacttattcggtaccttgcttcggtcgaagctgatatccctgctgctgacttgaagaagctgagagagtcagctctctgccctgccgaggatggacctcgtggcatggagcccgcaaagggcacgtcacgtctctacaaggtttctgagctattcgagccaaaggatacgctccgggctttgcggttgcctattatccaatggcccggacctccaggtagcttcagggccaccagcaaagaggggcgattcctcgccacgcttggtctgcgaccttatccttcggtttctgagttggtggacatgatggcttcaacagacgaggagcttcggagaaaatctatgacctactttattcagaaccactcggtcaatgggtatgctgtctttgacatctccaagactcccaaggctatcctcccgattgagggtgatgagaaggcgctggtttccccatcgcagtgctttgtcaatgagcgggcttctgttcttggtcacaagatcctccggagacagcttcatgaccatgcgccgaagtttggtgttcggcgcgaccccgacatggcgcgttgcgtcgacaggcttttggccaacccgcccaaggaccgcagtaatgctattgctctctttgagtactttgccagtcggctcgcggaccttgacatgagcgccctggcaaagctgaagaatgctgccatcgtcccggtggtgagaaagaagggcacatcgtttggattcggcaccaaggcagaggagtcgattgtctatgtcaagccccagaactgttaccttggaaactcgaccacctacggggacatttttgactttgttgactttggtcagaacgccaatgcgttcttgttcaagtgcggggcgcggacggagccgacaaagcatgagattgccacgctggcgtgcagtgagccggcccggctgctgagtgtgatgcagagtccggataggtatctgagtctgctgagatcgctggctgatgactggagcacgttgaggaaggataaggagttgattaggaagatgaggtcgtcggcttggttgctggggtcgatggagttggcgactagtaagccgaaggagtcggatgatacgagttatgaggaggaggatgcgccggtgaagcattatgtactggctgcgccggctgatattgtcattttggatgattacatcagttacaggctctttaaagattcgctgctgtgtgcgccggaggatgaagcccttgaagctttttaccaggcacttgggtccgagaacttggggagtcgagtcaaggagcatattctggttggcaccaagagatcgagacaggatggagcagagtggctgagaaagcatgtgattgagcggtccaagatcttcttgcatgaatatgcgaaggacaagcgggagctggtcaagagggatgcgaagtggttggaagcgaatcttcaggtcatttctgtgtcttcggttggactgaggcggtcgcttcagggacacaacaagtatcatcaggagaagcgctctgcggctagcacccagggcgacaactgctggatcctatatgttgcggctgaacataaagatgataagccggacatgtaccaggtcgggcaggccatctgccaacttttgctcaacaggccgaatcagtcggcctacttcttttttgagccgttcctgaagcttgggttgcttcagttacgggatcgtgggtacaatgtcgatcgtatcctgcgtgccaaggctgctgaggccagaatcgcggaggaagcgagacgcaaggctctcgaggcagaacagagcaagattcgggagcgggaacaggagtgggaacagaatcgtgcggcagaggctgcgcgtcaagagattaagacgcccactcgtgatcagatgcctggtgccttccacgattcacccgaagatgaccatgctttggctcctccgccgcaacaacagaaatacagaaggggcttcttttctgatttgaccagacggctgggactggacaccggggatgacggcgagcaacaaaggcaactcgaaaactttgcacctccctcccaacctgaacgagacaccaaacgccctgtctcctctggagaaaacaaaacccgcaaagcagacgacggccgggtcacctccccagcagtcgtccagcaaaacctgctcaacgcgatcaactcgacccgcgctcacgactcgaccagcctcttctctccccctaccgagagggaagtcaaagaaaaggctgtctactgcgacaccaccccggcacaaaacatcactttcgcggcggaggccccccgcggaatgcgagtctttatctccaaagacatctccactgacgcctcaacctttttggcgaacaatatcgccgaaatcaagcagtttgagctgttgctgagtgactgcggggagatttaccggttgccggcgaaggcgctacatatcttttatgatgaaacgggtgggacgattgcttttaatgcgaacgggagtgtgttttgcaatttgaggttttttaaccagcttcatcgtgctgtgggggataatgggataggggtggggagggagttgaaggggcagaagagggtggaggctacgacttggtggtgggttgtgttggcgcatgagctggcgcataatcttgtgagggagcatgatgcgaagcatagttattatacgtaagttctcactagggggttgggatggggatggatgaatgggggctaacattggggatgacagggagagctttattcagcagtattttccgagcatgatggccaaggctgtgggttggatggctgagggtgggaatgctgggagtgcctccgggggtggttcggttttgccatcctcggggagacagcagggtgttcctagggctggtacgcagcagagcaccgctagtactgctgctgctgctccgccgccgccgtataccgagggacggtttgcgggggcagcagccgagtaaacgggctagttattggtgaggatgaggtgagggtgttgttgggatagagtatgcaggacattggagttctgatttagacacagagggctagctggctatacatgagcacggagcaatggtttctggattcttttgcgagaatttcgggatgggataggatgagacttgatgggttcggataggaactggattagtgcataccgcagtaggtaggaatacatgtaaacattattagatgaagatcagatgttggcgtcggggtgtgctcggtgtgttgtttgtgcactgggtaagagcgggaggcgaggatgttttgtgttatgagagagagtgtggcgctaggatattgctttgcccctgacaggcacaagacctccgtggtttcggggtgggttccgcataagttcttccagtgtcagcttccggactcttgaacgacaggtcacggtaggcatgtaccttgtgggcggaatggcagttcggacatgcgacgaactttgacaggaagcttattgtgcattcagtctcggtggttgctcggggtgtttcttatttctagatggcgaatggttgtcatcaggaggttgatggcactaggtagtgagtgtgtgggcatcacggtgtcggcaatagtacacacaagttaggtatccaagtacgtaggtgctcaaccatccctgaattgacaacttgttatgatttatctatttcgggatgaacttacccccacacaaaacacacctcttccaccacgctcacacttgtaaccgagagacaactctttcctaggagagtattctgtgatcagaaaggccgattactaccatgtttttttttgtagggcgtacctaatgtgaatgatgggagtttgaatgtccgacgttagccatactgatacgttaccccgcttcgggcgtcattgaagaaaggaaagagcggggcaggggggatgggatgtaaggggggcgttagtcgtactcggggggggcaaatgccgagtgaagaccgagaatgccgttcgttttgaagtaccggaaaccaccaggcacgggaatgaactgaccgagcggttgaagagagacagtgcgttgcagatgtcactttgatgatgggaaggttttttggtgaggggttagtgaggaccttgaggggttgaggtgacgggatggtctgtgtgaattgggcatcggatcggagggtcaaacggcgaactacaccaatgatcgatgtatggcctagaggttgacctcggctctcaaccttatcgtcattgaatccttttcagagtgctttgcctgttgctctggtactgatttcatactctggatgagagatactcaacattcaacggttgagtcgaggttctttcttccttcaggtgtacacagtaagtccagtcctcctagttttcaagcgtgtgacattcccctaattcatccacccgtccattgacgaataggaaaccgattggcaaataccatcatcaactgtatgaattgggggcgttgtctggttctgttccacattcccgaatcccttgttttttccctccaaccaaccgccttcctttcttcctttccaagatgaggggaatgaccgttagaggtcgcttcgggagtcgatcgaacgtgatacacgatcggtttttgctgagagcgaagaggaggagaaaggcatggcagatgatcacgaactaactaatcgaactgctaatcgctagagaaaggggggcaatcacttggatgcataaatactcgctgcttctttccctcttctcaaaatatcaacccccttctcttgctcattctttcttcaatctcaattcaattactcctcggtgcttgttctgcgtcaaggtaacagtaccaccacttacacgcaacagatatacatcgtacgtcccgtcccgtcctttacaactcccgcctcgccgagtccaaccatctcagaatctatataaagagatcaactcctctcccgccctcccgtttgatcctcaacctgccggtactcttggttcattcaacttctatttcacacacttcttcttcaacggtaacaagtcaaaatggtattcttcatcccccgtctggcctctcgttcttcttcttcttctgccctcctcccttccctactacgatcctccctttcgatccctcgtcccgctgctactcggcttctcttccaacaaacccgcctgctaacgacgcaacgtgaaaaggtcaaagtacttgccgttctgtacgatggtgggaagcacgctgaggaggtaactaaaccgcccctttccttccttcctttccttaccctctctcctcttctcaactttcgcagtatggaggaatgtcaaatgcggggtctggtggttcaatctggggaagcacaccacacctaccttagagtggtctcggcatacattcggggaagtggggcaaacatgcaatggcgggatacccatcccgtgccgtgtgttcggcgccggtggcatgtggggtgtgtaaagggagtcgaaggctgacggaacacaaaaataggtccccggcctcctaggcaccaccgagaacgagctcggaatccgcaagtggctcgaggaccagggccacactctggtgacgacttctgacaaggagggggagaactctacttttgacaaggagttggtcgacgccgaggttatcattactactccgtatgtttctctctctctctctctctcacacacacacacacacacacacacccaaaaaaaaaagggggtctgatgagcctcacaagatgttgatgctttgatacaaaaaaacagattccaccccggctacctcaccgccgagcgcctcgccaaggcaaagaagctcaagctcgccatcacggccggcatcggctccgaccatgtcgacctcaacgccgccaacaagaccaacggcggtatcacggttgccgaagtcaccggctccaacgttgtttccgttgccgagcacgtcgtcatgaccatccttgttcttgtcaggaatttcgtccccgctcacgagatgattgagcaaggtcgttgggatgttgccgaggcggccaagaatgagtttgatctcgaggacaaggtcgtcggtaccgtggctgttggccgcatcggtgagcgtgtgctccgccgcctcaaggcgtttgactgcaaggagcttctctactacgactaccagcctctgagccctgagaaggagaaggagattggctgccgcagggtggactcgctcgaggagatgcttgcgcagtgtgatgttgtcacaatcaactgccctcttcacgagaagaccaagggattgtttaacaaggatttgattgccaagatgaagcctggtatgtttttctgatgtcaggaccaagaaggtgatagctaacagatgataggctcatggctcgtcaacactgcccgtggcgccattgtcgtgaaggaggacgtcgccgaggcgctcaagtctggccacctccgcggctatggcggtgatgtctggttcccccagcccgctcctgccgaccacgtactgcggacggccaagaacccctttggtggtggcaacgccatggtcccccacatgtctggtacttcgctcgatgcccagaagaggtacgctctcggcaccaagtccatcttggagagctacctgtcgggcaagttcgactacaagcctgaggatctgattgtacacggcggtgattatgccaccaaggcttatggtgagcgggccaagcttgtcaagaaggatgtcgctggtgcgtaaagtggttgttgagggcggcgaatgggattttttagcaagcacgggacttggaagcctcacacaggtagctgaccgcggctttttatgagatatgaagaatatgatatcgttaattcacatatgggaccgatgcctgtgaagataagctgtgaatactcagcgccggccccgacttctgctgcgccggcgatcgtggtgcctggacctttcgtgcctatctctgctccggcttcgacttctactccggtgtctgcgctggccggattcgcgggtgaatctaggtccatcattgtcgtcttgtcttgatctgtggctgcggctgtgtcgatcatcgtcgcgttctgggctgcgactcctccggcggtgtcttcgctccctgtcttccccgtctggcctgtcccgtcttcgttccctgctgcgactgcgatcacgatgaccatcccggctcctgtgtctcctcctgtgtcgtctttccgagtcctcgtctctatcgagatgccggtgccgatgtctgtgttccctgtcacccatgtctcgcggcgcctctgaccccttcttatcctcctcctccttctcttcctcctcatacataagtgccctcgcaggccccttgactaccctcgccgatggtccatctgccggtacctccaccgcgttcgccccgctggcattcctcaccgggggaggtagccctagagccagcgcaatcgcgtcctcctcggcctccttgatcttgcgaatctcatcgcggcgctcgcgggctgctctctcttcctctgtctcgttcgagtcggcggcggtggcgtcggctttggcgtaccagttgaggtctctgcctttggcccaacggcccacgggggctttgagggagtggcctaggtagttttctctgtgggccgaggtggctacttcgtcccaggagaagttgacgccgccgcgggagccggttttgcgaactgtggaaaggaggtccatggcagttagttgcagggttgttggtgggggagataggtggttggaaggtcgcaacttccggggttggatgtttgtgaatgttgacaggaaggaagtcgcgacgtcagaaagtcgttgaactggggaaggtgccaagaatgtgcatcctgggggcttgcaggctgccccacttacccaacgttctggaaggtggcaggggtctgcggggcatcgggactgcaggggagctgcccgccgctgtttactttctggagctctcttcttctgctgattgaaactcgaaactttacaaccatcttctcgaccaacctcccttgaccgacaacattctcccccttcttctcctacttggacgagtagcttaccttctatcatcacaagcaaaattctaagcggcagtgcacaatggcaaccacctcctccaggagcgatcctctggatgagatccgcttcaccggcccagtcgagttcgaggggggcatccacaacaacagtgtgctctactacttcgctacctcgcccttttacgacaagacctccaacaatgaggttctctttcagcagggtctcaacaatcccaacatgatgcaattcctggccacccgagaggcttttgagggccgcttgcgcaccatgtctggcctcgagttcatcgttgcccaggagccagccgagacaggccccggcgcgggaactggcgtctgggtaatcaacaaacagacacgccgcaagagaagagagggcgaggaggatgagatcgctgtccactcggtatactatattgttggagagcatattcacatggctcccagctttgctgacattatgagcgctcgactcgtaagtttgctgatcttctttcggctgcctgctgggcctcgacacgatgctaatcattgttattgcgatgtacaggcaaccatctccaacttcctcagcaatattcttccgtcttcagcttccgtccaagcctggtctcctgcaactggccgtgtctacaaccaaccctccactaccacggcaggctccaattctgtcaaagctatcacggcctctgctcagcaacaatctcaaggttcaagacaacagagcgacatcggtctccccacaacccgcgactttgaaaaagctctctatcttcatgagcaatacggcgatcagtacatggatgagaaccccatcaccggacggccgggcgaatttcacctctcctccaccggcagagccaaagttaacctctctgcggctgcggctgccaagccattaccagtcaagctcccgacaatcaacaccaaagtggccgacagtcctctcacatcaaaacccacgggcaaggaaaccaaaagccccaaaatcccgggcggtccggggaagctcaagagaaggaagagcagcaaagctgctgttaccccgtcatagagtaatgggaattcgccttccttaaaaggttttcgagaggaaaaaccaggtgaaagtttttaaaacttgagggatgggagtggcactgatttaggggaaaatttagaatttgtttagaatcccccccccccccccccccccaaaccagccatcaacaattcacggccagcaatcaggatttccagggcaatcttcaagttcccaatatgagctcacagcctggggcaagctctcaggtcagtcagcccaataaccagacgcagtcagcgaaccagaaaaataaaccaccccacacccccgaggatgatgaccacccacctctctttttgggctccagttccgcgaaggatcctatttctgataaggaccctgcttttgagaaggacaccagctctggggaggataccgattcgaaaaaggaggtcagctctgaggaggacgctgaccctgagaaggactcaggccacggggagtgctcaggtcacgaggaagatgccgcttccgaggaaaacgccgattctagggagggctccggttctgtaacctccagtccaggaagactggcccatgttttcagggcggtgcgggatgaccgtgaagtgagacttgcctgcccttgggaagaaggttaccttgatcttccaggcgggcctcttcggcctcctggcaaaatcttcaatcctttcgatcccggttggaatcttgctcgcaacagaatggatgcgcttggccatccctattggtatttcgacggccctaaaccggacaacaacactgggtatagattctggagacaagctcaaagagcggcacgagtgtgtatctatcttctatgggcgaggggcccactgaacctagtcactaaggacctggtgggcctcctgaacatggattcgcgcccaactggtgcaagtggcctcccggttttgaagctattagccatcaagtgcttttttactatgctcatggacaacaggatgaaaaggctgacgacgtggccgatgacggatgatgctagttacgctcggcgtaaccaattcacggcctacgtgctctctgatgtgtttctttgttttgaattcacgggccgagagggcgagcccacagtgggaaggatgcggaaagacatgtatacttacgattgcatcaacacctggcactttgaaggtttggcggccgggagcgacaagaggggcgtcaaaagagcccggttctggaacttcaggttggtggaagagttgggaaggcatcttgaccgctttttactcccccctaacccggactacaaggactgggcaaagtatgaacacgacaattgatggtatgcacgtgattggtttgagaggtcacaagatgagagagacagggaaaattgctgcagttatctggaaaccctctgaacgatatggcggataaagtgtttgcgaggccgcccgtgcgtgatgtaaaggacgagtaccctgatgcggacgcggaggagctgcctgttttacggtggatgtggcatcaccggttgattgggagtcgagcgaaaaggattgtgatttggagcgaaaacaaaggagaaggggaaggcgcaagtttggacgagggaggaggtgaggggagagataaaagagagggagaggaggtgggaggagttgagggtgcggagggaggctttcatggcggttgggttaatggaagggggagggggggaagagagtgggatcttttcgtagaagagggggtgtatgtagcggagaatcaaattcggaatagaagcgaattaataatgcatgttgaccatttttggaggcgtgttgataatctttccaaggtctcttcnnnnnnnnnnnnnnnnnnnnnnnnnnnnnnnnnnnctcgtcctccagtatgacagtgttttctttggataggtacctccttcacggcccagtttgggggaatcaagaaaaccaagatggggctggagaagagaggttggaggaagacaaaaactgagcactttggagacgacgaagatcacttacaccttccgaggcggagcattctattctttcctgactggccaggtccggtgccaggaccttttgctatcttgagaaactttagactgcgaagcaaagcaacatgtcgacacttctcgggctaatctttcagataacagtccacatctttccccttctaactatcgggcagagcagagaccagcatcgtaaaacaacagacacaagaaccacaaaatataggcaaagaacaatactgtggaagaaaatggtactcatataatctagttattttccctcgcaatgatacccatattgtattctgacgctaggcagttagcaccattatccaaaagttgcgatatttgaaatagagtaacagctggaaatatgcggagtggtcattcagaaaaagaacaatgtaggtgattggttataatcatggtagatataactcataaacagcctctcttgcgagaattcatcatttgaccaaagttaaaaccgcgggggggtgggaacgtacctttgctgggggggagctattgagttgaccgtgtggaatacacaatgtctatctgacgagatactgggcaagtgttaggaacacagacagaccagagtgatgaaatgaggtgaatgcaaggggaagatggggtgtcaggaatagaacaatgtaggtgatgtggttataatcatggtaagacataactcataaacagcctctttcgagtaattcatcatagtggagatgggggcagcagaagatgaaagaaacgtaccattgttaaggatataccccagttgattatcgttgagttgatgactcggccgaatgagcagttcctcgaatcgtgttagcttggcccagactcgaatcagagtagaaaaggaggaagtaaatagtgtcatgatcagaaatagaacaatgtataggtgatgaatgtaatcatggtaaattactcataaacagcctcgtgagagaatatgcatcatgtggaccagtaaaaaagagtgtgtgtcggggagtgtgacatactatggcggacgagaaggtggtggacctcagtggtcatggtcaagagacgggctgtgttactgttgacaggttagtcactgtgcagtgaagcgcatgaaaagagaaaagtgtttcgagtgtgtccgatcagaaatagaacaatgtataggtgtatgtaaatcatcaaaaaagatctcataaacagcctcgtaagagaaatgcatcatggtgacagtgtgaagaatcgaagaaggattgttacgtaccaaagaaccagcaaatgaactcgtggctgaaacacgagagacgttcaactcgtaggtatctcctcagactactccaggttagccaatgtgttccaggttaggcagaagcagatgagttggcagttgatggtgtaatcagaaatagaacaatgtataggtgataaatgcaatcattaaaaagatttcataaacagcctcgtgagagaagtacatcatggcaggcgggatgaaggaagattgtactatggatacttactttaataaacagcccaaacattgcaaactccatatcaactatcgcccagttagccaacctgcccaacgccaatgccgaagaaagaataaagggtttgagtagcctcagaaatagaacaatgtatggtgttaagtgtaatcatcaaaagatttcataaacagcctctttcgagaaatgcatcatagagcaatagcataaccaacagcgcaagtgaactccttgccgccagccagccagccaaaaacgagagaagaaaggaatcaaaacttacctccaacacgacttccagcgggggaccgcggatgacaacaaataccatctcaaattaagagttatcctatcgctatataagtgtatcataagtcattattactcaacaatccaacccttcccaggaaccttgcgttgtgtcactcttcttgctggcaatggccatcccagccctccagcgccgccctcagcccgaagatatgggatcacccagacctccttcgtcttgccatcggcactttcagagcccttgacctctttgatgggcttgccatacgtgagaagtggcgtacccttggctagagaagcgatctggcctgctgtcaagtccgtcaaagcatgcatcctcgtcttgaccttcttctcaccgtctgcgcctgtgttgccagccttctggaggtaggcatagcagatgtactcggggcattcggcggtgctgagatgagcaagaggggaagttggatgtatgtataccagcctgtcaagaggatcctcaaccttttgatcaccctcaagcgggatgagagggatgtatggaacatcgatcgcacgacgtggtttcctgtacgtctcaggcgggttgggagccttgtcagccctgatggcgacttgatcaatgaagcctgcggcaatcatctgcttgagagcttggacctgtgtagcagaaggagggtccagtttctcctcaagcttgaaattggcgtgttgtggaatgttggtcctcaggagatccgcgatctggaattgcagctgccgaatttcctttaggatcttgaaccgcacaaagtggctttcgcaccaggcttctgtgggctcatgggcaaactctcctacgacctggagcagcttgatggcgtcactcttgtcgtcgaggtagcaaaagttcttgtggacagcattatatgcttgacgaactctcgctcgcttttcctcggcgaccacctcttcattggtacggaagtcttcggtgctctcctctaatgctggaatggcttggtgttcgttgatgaaaatctcaccagcagacagggcggcaaccagagcaatggtatatggcaggcagccgtgaaggtgtccaaccaacaggatgcgtgagaagcgaggtgacaaggggaaaatggacatggacgagcctgttggcgtgatctgcccctcaagtgtgatggctgaaaggtaggacaaaagcttctcagccatgagcagtctttctcgctctgggggtgtcggtaatgacacgttctcggagagctcaagcgctccgacctttccatcacaaaccggctcagatcgatccaacacgacgcctcttttgtcgaaagtgttgctgacgcgttgcagctgccgttggtagcgaaatgagcgttgcgggagggtggaatatcgatacgaccagtaagacagcctctgtttactttcaaagcccaggatggcccaccggatcatggaaatttttgtcattagtaagattaatctgacatttgccgcttgtatctgcgacaatcaaaggctatcaataatacttactaaattattttctttttcttcatcgatgtggtcataacaagaactatttgtgagttttcctgtgtggtgctatcattaacctactactgacccatttaacgcgtgattacatgtctagtgtccacatattgttcctctttctgttttatatgttctttcttttctannnnnnnnnnnnnnnnnnnnnnnnnnnnnnnnnnnnnnnnnnnnnnnnnnnnnnnnnnnnnnnnnnnnnnnnnnnnnnnnnnnnnnnnnnnnnnnnnnnnnnnnnnnnnnnnnnnnnnnnnnnnnnnnnnnnnnnnnnnnnnnnnnnnnngaaagtgacgacatgtgcaagttcatggccttcagttgtagaaccacgccctcgatgggcatgcgagcagctctgggtcggcaaagagagggaagtccctttcgtaaatcgcagacgagaacagcctccagcaatggccagggccagtacgaccggcacgaccggcacgttgttgcgcacttgccttgctgatccaatcgatctggaagctctggacgttgctcacagggtcataccggcgctccttggatctgccacagtcgaagacataccgaataccaggaatagtcaaactggtctctgcaacgtttgtcgacaagatgaccaatcgcgagccgtccgggggtggctcgaagaccttcatctgctcttttgtcggaagcatcgagtacaagggcaagatatgcatctttcttggtcctgtgccggactcctcatcctcaatgtcgaattccttctcctcttcttcctcgtcggaaatctcatcttcatccatatcgtgaaccgctctgtcatcgatatcgccaaagtcgatatcctcagcctcgataggagcttccttggctgaaatcttgaccttgggcccagatgcagtgttcatgccaccgccaaaagcagccttcagacgcttgctgagttgggtgatctcgccttggccagtgagaaacacaagcatgccacctggtggcagctttcgatgacctctgctgattttgcgaaaggcgtcctcgacatagtcgtgccctgtcttcttggcgaagtggatggtgacctcgtgttgacggccctccacgtcgataactcgtggcggagtctcgaagagcgcggtattttgtgtaaattcttcaacacgtaaagtggcagacatgatgatcagcttcaaaggctttgttgtggggtcttccttggccagctcagctctcagcttgaccactcggctgagcattgcgatgaggatatcggtgttgacacttctctcgtgggcttcatcgataataatggcagagtacttgcgaagtgcaaaatcctgggccgcctctcggaggagaacaccatcagtcatgaacttgatggctgtgttgggatcgacggtgccctcgaaccgaatctggtaggcgacgaccttggaaaagtctcccatctcctgaccaacccgtttcgacatactgacagcagccacacgtctcggctgggtgacgccaatcatgccaggagtaggacccttctggtcaccgtagccagcctcaaacaaaaactgcggcagttgtgttgtctttcccgagccagtggcaccacagatgacgactacgtcgttgttgtgaatggcctccataatcttctgttcctcagccacgacaggaagcttgaaacgagcctcctcaatctcagggttccttgtgacggtgacggcatgcgactttctggtgacattggttgttggctgcaactcaatcggtagtggctcttgctctaatgggcggggctggaagttttctggtctgggcatttcgagtatagtggaagttgttggtgtgtatcccagagcttcgtttcgttgctggtgtgcccaagccttgaaagcagatgatctttctttccgccgctctttcatagactcctcgtcttcctcgtcctccgagccggacccctcttcagaactctcttcgtcgtcatcctcttcctcttcgtcctctccactgccagcatcactcatgtcctcatccgactgctcttcacttttctccgacccaccagcatcagactcgtcctcatcctcctcacccgactcctcttcatcagcggagctgaacccgccaaattcatcagatactggttcttcgtgaacgacaggcgcagctaatgagaacttcgacttcacaccgcctctcttttgtctctttgcaagcactgggcggccagagtcgtcgacctcgagtggccgtttcagaccagagccgactgccgatgtggtaggagctgccgcggttgtagaggactgtggttgatcttgcttggcgctggtgccctgctgtgtcgtcctgggtccttcctcctcaggctcgtcggattcctccggttgccgatgttgtgggacctcccccttcttaacagtgcgcttctggtagagcagcgtcaagtctgacttatccacgccgagaccggcatccttctccctgagaacgcggcggatggcttgcttcttggtctccttaacttgaccaattgacttggcactgctgaataaactggtgtcgatcttgttggcctcgagttttttgaggagctctcggttctcatccttcttcaacttgctttcgatgtacttctccagacgtttggccttttttccagtgaccttggtgccatcgggctttagtgactcgcgcaactgttttctcttctcctcggcctcagcctgctgcgccggggtgatctcaacaacattggaatctgcatcgagctctgtgtcgagagtagctctctcctcggcgcgttggcgctcaagatgcttccgcttgcgctgacgtgggacgaatttcttgacggccatctttgtcgcccggaaaccagctcccgtaatgtgtgttttggcgacttggatctgtttagaccacagtggaaattctcacaatctccaatccttctttgagatttcgagacaaatcttgtccgcccggcagaattctggagctaagcaaccaccccacattaaagagtggggccaggcatcacagtgcatctgacagtgtgcgacatcatgcagccatatagagtgaatgagaacgttggagatgtttgccagttacaagactttaagactaaggctttcgtccaaggctcatcaacggcggtagtaacaaactgatcttagtatcttcaacatggacgacacatctattcagcaggagccctttcctgccccctcgaagactgttactggaatcatcaacggtgtcccaaccgaagtggaagcaaccagcttctcagacaagatcatgctcaccgtgtctcaaggtggccgccttgcccaatgggtaagccaaccgatgatacataaacccttattccaatatgtcactcacgttcgaaaaggtgtcagtaccactctcagcaccatcttcagcgtctatcgatatggctcttcctggctcaagcactctgccttcagcacacctgacacccagcacattacttggcggcggtgattctgatagggagacgatgggccatctgtacgccactcagatcgcaagtcatttggctctgcgtaacccagatgagaagagaaccctcttgttagggttaggattggagaaggtggatggaggaggcgaagcgttttttgactttctcgagttggtgctacaggttatctgaggacgaagagaatgggcccaattggtatccaaagatggagagtgttgtcatgggattctgcaggaccgttctttccccatgtagcgaacttctggagctctaggctgatgtattactagagccaaatggcatgatatggggataatgaatcgaagcgtcgtaattcacacaacttggccaagtgaagcgtatctctggttcagaccatgttcaggataagttcgagatctcggccaagacctcactcagagcaaccctaacccggctcagcgaagccccaactgccccacaaaacctaacctttgcccttgcgccaagatttcagggcagactggcgggcccactttacagctgcacgcaccggcaaaaatccggtgctggctctcaggtcctgtgcccaccaaaaaaaaatacccagccctaaaatctacggcgggacccgaaatagctctttgcgaagagcatcaccgtcgacgaattccggacatcgtcactaaccagcagccaccatggtatgcccaccgcaatcgctgtctcacgaggagaagatgctgactattgcagcctacccggttttccaagacaagaaagcaccgcggccatgtacgttctccccgccgaccggaaatgctgtttgaattgattactgactgtgtgctctccaggtgtccgccggtaaggggtatgtaacgatcaatcggccgaccgcaacgaattcacattgacgaataattttccagtcgcgtcggcaagcacagaaagcacccgggtggtcgtggtatggccggtggtcaggtacgacgaaatcatctcgaagtttggatggagacaggacatgggctaactcgacgaaaagcaccaccaccgcaccaacctcgataagtgtacgaaaccatcgccctggggattggatggggtttgatggcgggaaaactggaggagactctagcttcacgcttcaagccaccatgccgccccgcgacaacgagacttgacaaatgctaacgactggaatcagaccatcccggttacttcggaaaggtcggcatgagacgtacgttccccccgcgatcgataacggcttgaagtgaaggaattaggaattgactgtttggatagacttccaccttctccgcaaccacgagtgggctcctaccatcaacatcgagaagctctggtctctcgtcccccttgagacccgcgacaagtacgtcagcggcgccaagaccgactctgcccccgtcatcgacctcctcgccaacggctacgccaagctcctcggcaagggtgagtgatctggaagttctttttgaggaggaatgcgtgggctaactctgtccccaggccgtctccccgagatccccgtcgttgtccgtgcccggtacgtcagcgccgaggctgagcgcaagattgttgaggctggtggtgttatcgagctcgtcgcttaaataggaagcgggtttgggaaaataaaggcagcgatttgacattttcggtcacgagggaaataccggatagtgaacccaatggcatacggatcgggcgttgaaacgttcagctacgagctaggtcccggcgtcctggttggttcctggggtgatgaagatacacacctccagatattgcagcattttgggaatgggatgtttgatttgcatcttccggcccctcggtccctcgaccgttcatgttactccgtatcgaggtgcgaacaatgacatctcctgctgagttacgaacatgttttgatccatccagctgcctttgtgttttggacccttgatggataattccgtcgtcttgcttaatacagcggcactccgcgctttctcttgcagcagtcacacaactaccaccgcgcactgaatccatcattggctgaactgagcggtaccgagtcttcatatcaggtcatcaaatgccaacatacggcagtcttttgcttggtacttggatgctttgtgttactaacctcgacgaataaaactaacctctaccaagtaacccgcacatagtctgtaccacaaacttccgacattatcgtggcattttacaaatgccgagaaagcgacgctcgcactcaggagcgccacgaccgagcacgtatttatcaccatggatcggactgtcagccgtggtgcatgatggcgttgccggcagtgggatgttgagtcagcatatccgcgggagagcatccgtgaggccataggtcctgagatgggttctatgaagacaaatcattcggcgataggtgcatgctgatgaatctgaccatctacgccatgcatgagaaaagaaacaatcggtcgcacaggatagacattcggtataggccgtggaggacagcccgtgttgtttggagtttgaagagctcaccccgcttacgatctgctctcggggtagtacatcgcgaggctggatggtgtttcggtgggttttgcatacgtactgacgggtatatatatgttctgttattctacttgttatccttggtggtgttctatggtttcttcatatgcactcacaccccttcacaactcacttacactaaattatcggggcgccccccccccccgcaattcacttagacaccacaccgcaccgcaccannnnnnnnnnnnnnnnnnnnnnnnnnnnnnnnnnnnnnnnnnnnnnnnnnnnnnnnnnnnnnnnnnnnnnnnnnnnnnnnnnnnnnnnnnnnnnnnnnnnnnnnnnnnnnnnnnnnnnnnnnnnnnnnnnnnnnnnnnnnnnnnnnnnnnaaaaaaaaaaaaaaaaaaaaaaaagggtattgagttagagaggagaggggggggggggaggttggttttggtgggggtggttttgggggtggggggttggagggggttgggggggggggtggtgtggtagggggtggggggggggtggggggggggggggcaggggggggggggttgggtgtggggattgggggtgtggggggaacgagaagaaataggagaagtacgacgaatataaaaagaaatagtggaagatgaataaaagaaagagataaagaaaggcgtgagagtgagtctaaactgggcgatgaacgcccaaggcaacgaatccttcatcaaccgcgggaatttcggacacaggatctaccccgcggggccgtactacgacgaggtgtgggattataactcccaggtgagcagtcactgggatagtttaaggcattttccttatatacaagagaggaagttttacaacggggttgaggatggggatattttgggggaggggaacgggactaggaatagcatacatgtctggtcggaaagggggatcgtcggacggggggtgttggttgattttcacagttggaggctgaagcagttggaagggagaaatccggaggagaggttcaagaggtttgatccgtttgtgggggagacgagtgggattttgctggaggatgtgagggctgtgttgaagtggcaggggacgaaggttaggtttggggatattttgattgtgaggtctggtatgtttcccccgactgaaattgaatatcctacctaggtcatgtatcagttgcttacatgagaaaagggtggactgtcggcttcaacaacaagacccgcgaggagatcctggctctgcagcgtgctggttcgatcagcgcttcgggtttggaacagagtcttcccatgatgaagttcctctgggacaacttttctgctgtggcgggtgatatgccgggtgtggaagcttatccggcgagggcaaacttcaccatgcatgaggtgttgctcgctggttgggggtgtccgatgggcgagttgttcgatctggaggcgcttgctgcagaggccaagaggcagaagcgatggagtttctttttgacgagcgaggttatcaacctgcccggcgctttggctaggtgagtttataggttttgagaaccattggctgtttgcgagagtcgaaactgatgtgggtgagcagtccgattaacgcgctggctatcttctgaggaggaaagcggatggcacctaaattgtgggggtatcagaacacgtagttcattgttgattgtgattgatactaatgaaatagcaacacatcaacaacatacatagaaatcaatggagttgaatcaaactgtctagttgttcaagcgacaatgccctgatagacctgtaagtgataaggtaagatacctgtaacaatgcgtaatgatacgcattcacccatccaattccggaaagcggtaaaggcctgcagaaatatttctcgccgataagcaacttttggtctgacgattgcgccgataacgaccttcaggatccctgccagaccaacccacctccgatttgacgacgccgacgacactcgctcccccttaccggtgcccgatctgacgaccgacgagtccggagaccgatttctttcctctttatcccacctctccctcaacaggccacccagacacaaccacatcaatgaacttcccaggcggcggtgcgggcgggttccccggcgcaggtggtatcccctcggcgggaggatcagggtcgtcagcgacaccaccaatgcccatgccccagggtgatccaaacgtgaagatggcaggcacctcctcctaaccgtactcttctccgcacaccttgtagctaaccccatctcccacagctccaaaatctcatggaatcctgctacgccaaaaccgtcatgtccggcggcgcaggtttcgctcttggcggtgtattcggcatgttcatggcctccgtacgttcccccgtctctccctctccccaattctctcactaatccaccattctcccatcatagatggcctacgacaccccctaccactccccacaaaccggcacccccggccagcccgcaatcccaggcataaaaccccccgtcgacatctccaccctccccctccgcaagcagctcgcccacggcttcaaagacatgggcgcccggtcctggtccaccgccaaaaactttggccaagtaggcgccctcttcagcggcatcgagtgcggcattgaagggttaagagcaaagaatgacttggccaacggtgtagcggcgggttgtctgacgggggggattcttgccaggaatggggggccccaggcggccgcgattgggtgtgcgggttttgcggctttcagtgccgcgattgatgcttggatgaggatgcccaaggatgaggactgattggttctatctgggtatgtagaggctgcggtggataatggaaggtgtgtgctggaagaggaatgtaagaaaaaagaagagggaggctgtattatatggatggggaggggggtctgtgtttgtaatagttcatgtctcatggcattggcgttggcggtttggctttgtttctcatgggaggctgttgtcgtggcctctggtttttggatctagaaaggggcaaaaaaggggcgcgggaggctgtatagacatgttgggctggctgggctggggttggtcgaagaaaagcgatataccatgtctgtggtcacttcgagcaggaatctagggaggagggcgaaaacactccacttggttttcatttttgtctgcatatatatgcaaattatgaggcgtggagaatgtcgactacgaattgaccggcacttatgactacgcctttgttaccagcagaaaaggggtccttatccatgacagtcttcaggggcattgccctctatcattccgtccaaaatgatctcccaccaaggcacgtaaaaaatatctaaaatatcttaggtaaataaacctaaccgaattcccgtccctgagcgtaccagaaccatcatgagtatcacattatcatttccttgcttccatcattactcctccctaacctgctcccgcatttcctccttcaaatcgacgccagattacctagcctcccacacctgccacgatccaaactcccagaatgcatccgcaaaagcctgtgggttgtgggcgatgaaatccgtgcaggtcataccatcacgagctgtggtttcatctagtgagcttcattgtcttggaaaaagagagcttcttcttgacttaccgcagccgctcccgttccagatatcctccgtgatgaagtcaccgcagatattgatattgacaatcaagctctggttcctaaagtgctgctccatgtcgcacctcgtgttaggaaagtccgccaaaggcagtccccagctgctggggtccggctttgctgtcacgccccgactgccttgtccaagagcagcaacgtcgaggttgatgtcagtggggatgtcgcttctgggccagatccaactcctgatcccctcctgtctccattccaacgctaccacacctcctccggcggcattgaacttgggcccaaatgtgttcttggggcctttgactgtgcaaccttcgttgtggttggtttcattccagcagtcctctgctccgatggtgccggtcagttccctgcggacgcgcttcacgttgcagccctctgtggtgtgaagcgcaacaagattgccgtctgtgccctggtttaccgactccatgatgtcaatctctccgttggccggccaggcgccaggcgaaggatcggtgagccaaagggcaggccaggtaccgcatcccacgggggtgtgcttgacgtcaaagatgaaaagaccagattcgtactggcggttggattccagacggacggagtgtctcccagtggtggcattgtcacgagaagtgtcgacccggatgttgatggtgtcttggttggcggtggtgaggttgtagagatcggcatccccaggcgagacgtagtgtacgaaaccatgggctggtgatgttgtcagtatagagctcttcaaacaagactctcagcagctaaaacttacaaggatcgtaagtgttgaaataggtgaacttttcaaaaaagtttgagggcaggtctattactcggtcagtaacccgccctcaataggcaatcccgagcccaagcacaactcacatgtctctaccaactggtagtccaacttagtataattcggatgcgcatcaatgaagggaaactcgtcgctcccattgttgttgttattcctcgtcgcattcactcccaccacagttgccaccacaacaatgacaatgatgataatcaccgtcgcaaagatcagccacgcccttctcgtccacgtcctcgggctccaaaaggagggttccttctcgtcgtatgacatcttctcaagtcttcctcaatatctccgaagtgcatcaaacaatcgaaaccaaaagagaccggctatgactcccaaccacccaaaagtggagtcttgtgtgttggtattttgtccaaaagacaaacacctgtcgaagtttgatgcaattcacttcttcgcatgatgttgaaactccccacacagagaaaaaaacacgagaaagaaggcgtcgtcaacagatcgacaggggggaagcaacgacacgagttcttataccataggtaaggtatctacctcacccacccccccgttcgcctgtgtnnnnnnnnnnnnnnnnnnnnnnnnnnnnnnnnnnnnnnnnnnnnnnnttgctaccccagccttcgattacccatctagacagtgacgagccttcggaaaacactacattttatttccgatggtatgagatatcgggtttaagtccgcgacataaacccgcccctctgctccacatgaccaacgacaaggtaaaccgctatcaaatcacacatatcaagtccaagcagtcagccttcccccaatgtcacacaacatagcttaccttacctaccttatgcttaatatcccctctcccacccgcacaaggaccttgccacaaaggcccgatgacaacacacatataaggaccccccaaaccgttacaccaaaacggttgtgagaaacaccccaggcagcgacatagttgtagagggcatcagggttacacagcagataaaagcccgtatcttctacccacctttcctatagaatgatgatatctatgttgctgtataaccacgtgtaaatatctcgccaacgacactgccctagaaatatatgtccggactacagctgttacatcgtcaagacccttgcagcaaagccaagaccacgactctgataacccccaatctcaacactctcaccagagcctcattcttgtaacacaaaacaacgacaatgaccacgtacaagaatcatatccgctcaattcacatcctgcctacccccgccccacctatcaattcaatctcaacgcgctcaatcatcctcctcctcaaccctagtcctcttactcctcctatccccctcctcctgctgcaatccataccccctcttccccgatctcgccgccgccgcagcagcagcagtctcctgctgcacctccgacaaaaacttgtcaacattaaacggatcactagtatccttctcaaactgcaccggcccctccctcggctcattgtcctccgtccccttgaactttcccctccccagcgcctccccaaacctattccccttgcttatcctgtccatcgccctatccccagccccctcatcatcatcatcctgattaaccctcggtctataaatcgaattaaccgcatcctgcgccgcaaaaagcggcttgtcatacgggttatcctcattgaacccactgctaaacccgctcgattggttgaaaagccgcgagtcgtacatcccctccttggactgcgtcggcttggccagaccgagagcaatcttttccgaaatgtcgcggtccatctcgcgggccatgacctgagccctcctctcggcacccatgcgtgactgcctgagcttccgctcttcctccttgagcctctccttccgagcctccctcctcgcacgctcagagctgtcgctttccgagccagaatagtcagagccgctgtaagaccgggacctagaccgagacccagattgggagcgagatgaccgtctcctgctgccaccccccgccctgtcggcgcgggcctgttgtgccagctgacgaagattctcctccttttgcaaccgctccttctccgctagcctctgctgcatcatggcgcgctgccgtacctcttctctggcgtgtctatcagccacgaagagggcttcggaaaattgagcaaacttgtcgttgatctgaacatcctggaggttgcgaccatcggcggccaacctcttgtcaagaggaacagtgaaacccttcgagttcttccagagcgaaacagggggggggatacgccacgcctcctggtcctcagccgtcagtttcctcggtggcgaatgcataaccggcggcggcggcgtcggtggtcccctcgggatcttcttgtgcttgaacttgggcggctccatcggatccgcctgcctctccaccaccttgatgatcctctcctgcttcttggaactatcccccatctgcgacgacggcgtgtacttgacaaacgtcgggtccctcctcccattcacgttcacattcttgggcttttgcgccgcaaccgcaccgctgaccagcttggcgagggcattcttcgtcctttcggccgtctcctgtaccgtctcctggctaggtctcgagaggtccaactcgcccgcctcggcacgctgtcgtagtggaatcaggtccttgaacgaagtgtgaatgatgcggtctttgctgtgcccttggcgcgcgatggcggagtaatcgaccttgccctcgctgttgacttgcaccacgagcgcattggaagttgacgcgccatcgcctttgccccaggggtattgcgcgacggggatttcaggaaacgcgccgccatcgccgaaatcctcgggcgcgcgaggacgccaacctgctcggtttccatatgggggtggtcctgttctctgtggaggagaacagctgttagtaaccggaatgggtacaaaattcaatgcaatgtcgagctggctgacctttaggacgagctgtgtgctgtcgatttcgttggcaccgacgatccgagggccgcgctgctgtgcccgtaactcttcatcttcgcctgtatattttggttttggaagggcctgagtgaggccagatgctatcgaaaccatcgttgtttattttggagttgttcgcggtgacgggctgtcgcgatactgaggtttgacggagtggagattctggtcttaaatcttgaaaagttccaggtgctgtcgcagcgaggacagagaggacgcagagcaggctggagaggcttatcgtatttttcttatcgggtcttggcactaacagtggcccgcgcttccaatccatccacagtgttcaagatgaactgcaaggtcaacctgacctcggtaacaatatcaaggaaacaagttcaaaggttgagtcttgaaattacaatcatcacacgtttcccgtattctaccagacactataacccagaaaatgcgatatcacgccgaaaagagacaaacaaggaccaccagatataaataacccaccccttcacaagacccatgagccacccctatgatacataatcctcatagcaagacatgcccaattcgtcaagttatacgcccggtccagaccaaacacgcttttatttttgcattccaaaaaaagacaacacccctcatacgtagcccttccgcgcaccctggaagaagaagcggacaataaacacctgcagagctcccatggccatgatcatcagaatctggacgatgctgaagttgacgattctttgttctgtgctgcggacggtgctgaagttgcggttctcacgggtgcggaagtatttctggttgcgggtgatggtggacagctggcccgagagcttgaacagggactcctcgagggctgatgtttgttccggtgacgagccctgcttcgagggaatggtaacgcgcgcttcgttctcgacctaaagtgcaaagagtagatgtcagtatatgcgctgcggtttgcaggtgaagggccaggggtatggcttacagcaatctcaaagtcgacaaacttctcggtgtatgtgctcatctcgttattgaaacagaacgagtattcgccaacctccctggcggtgaagacaaagtctccctgcctctccttctggccatccatgatgtatttcccattgggacccgtcacttcgtaatcgatatcgaaggaaccaccggattgcacctatagaaccgtgtgagtatcaccgccagagagtaagtagtccagagtccaacgataggtgcgcatacggcaaagtaaaaggcaatcttctcgtccttgttctgtgttgctgtgtagaagcacgccctctcgttcgcatgaaccttgtaggtcagggctgtggcgacgacctggctggccagtaggcccaagagaccgcacgaaagcaatggcagctgcatggtgagccggctgtgtgttttcgagaagaagtgtcgtcgagatgctgctgctggtatcgcaacgcttcggctcggcttcaggacaagtctcaatcgcgcgcgccggaccctgccactcagagccaacacctcagccaattgccaaagcgctgagctggacacttttggccggaacaaccaagttcctggcccgctcccatccagggcgccagctgcggcagggggcccatgcacacctggcccaagctctatcctggttcttggccaaccaccggggttttgttccgcccagtgacatcagcggaattagttgcgttaagagcctgaagctggtgcacgcgcggtgaggcctgtttcttcagagcccgaatttacacatattcttccttctcatatttacctagaccaagtgactgtttgttgagttcttcttgctgggaaaccgtttgttgtggccggccttgcaatttcaattcctaccggccatatttgtcgagacccgccatgacccatcaaatttcatagtgacgacacagactgagaaactcatagaaaacacaattacccagtcgttatttgagtgaacctcgctacagagggcatatctcaagatgacgataccacaaacgaaagtcgcgacagcgacatcggtcgctatcagggcactcagttacttctttttacgatgggtaagtgggggcgaagcacagctacgaggatcaagaccattcactaactacctctgggatatctaggctcttgctcctgtaagtaaacgattatgcattgctgattagatggagcgagtttctgacagaggggtgatagccatttcccgcccttatctttgcgttattcgctgtctacctgccatcatttgtgtcgggatatctgcatgagccaaagcaggaactagttgatcaagttgatgtcacagtaacggacattccaatcgaggttgaggttcccgagaatggcaggagaaaccgcgggaccgaaaagctggtggccgaacaggtggctgttgaggagaccctcacgatcgaagacagacccctgaaccccttaaagacactgctctctggtgcccccaacccgcggagtttgcttctgtcagctaccacgcttctcatcaacgctatctgcgtcggcatggtcgctgaccgtctgttcaccgagcgctatcacactggcgatgacctctcttttgccagactcggctttgtctctgaacatgaggccaagcttctcattagagagccagaccagtccaagatgcccgtcaccgtcgaagtacacatcaaggacccggtggcgccttttgacaaccccctgtggcagagcgctggtggtatcaagttcaccaccaacgaaaccgactacaccgccgttgttcccatccccctccggaactccaagatgcgcacctaccaatggcgcacctcgaacaaccacaccggagagttcaccacccctcctcccgtcggccacgctgaagaggccaccaccggccccttcaccttcctctccacctcctgcatcgtctcccgactcccttactcgccgtttgaccaccccttggccatcccaggcttccgctacctcgccaaggtcctccccaccctcaacgcgcaattcatgctcttcctgggagatttcatctacgccgacgtgccccgctactggggaagttcaaagtctgactacaggcaaaaataccgccaggtctacgcctcgcccgactggccttctgtcggtcaaaacctcagctggattcacaccctcgacgaccacgaaatcgccaacgactggtccgccaactcgacgggcgtctacaaggcggcttttgacccctttgagcactaccaagcagctgccaaccctcccccggcacgcagagcaggcggcatcgccgctcgcaaatcggcgacgtattactccttcacccaaggtccggcgagctttttcctgctggacacgaggacgttccggtcggataatcatcttcctgatacagccgaggaacaaaagactatgcttggccctgagcagctggaggactttttggcgtggctcaagaaacctgagccgaaaggggtcaagtggaagattgtggccagctcggtgccgtttacgaagaactggccggttaacactcaggatacgtggggtgggtttttgacggagaggaggaaggtgctggaggcgatgtgggatgtttcgaggaggggggtgggggttgtggtgcttagtggggataggcacgagtttgctgcgaccaagttcccgccgccggttcccgtgctggtggagggagagggagagggggaagtccatgtggaggggagggcgtggccggaggaggcgacggtgtgggagttttcggctagtccgttgagtcagttttatagtccggttgggacttatagggagagggatggggaggatgtgatggtcaagtgagtttttcctttttcttttttgtttttttgttgttttttttttgttttttttgtttttttttgttttttttttgtttttttttgtttttttttgtttcttgatgagaatgttgagtggctaatgtgaggtggtgagcaggtatattcataagggaaactccaagtttggagcgatcactattgagaatttggagggcggtgatcagagcagcttgaagtataggctgtttgtggacggggaggaggtgtggaacacggtgcttctgtcgccgaagggggaccaggctccggcgagggggtcgttttggagtaagttgattggtgcttaggatgggggttggtgatgatcttgtggagatgagattatttccatgcgatatgatcgaaacatctcgaggaggagatcgagaggggaatttgcggaggacgctatctgatgatcttatacacgagagagggggtgcgccagaagaggttatctgttgatgttatacacaagggagggaggcatatgggactttggaaggagaaggacgtctggagtttggtgatttctacggtggatgagatatctagatctagtcaataccttgcttttctgcttggaacaccgaccgtcgtgaagcaggataaaagagggaccctttgtcgcctctagagcacagcgaaccctaacccgtgatatatacctcgttggtggagaacaacgacatgcccgacatgccgctcagcaacaccacctagatataggccctccgtttaaccgacagagcaacaggtttgagcaacttgaataaaccctttgtcttgataatatctcaagaaacaactcatcatgggttcctcacttcgtgtcaccacccctactgccagcaaccctctctctctcccattccaactctcatctgccgaggttctacgaaacaggacaggaacgagcgaatgatccggttttcttggcggagccggctccgtcacttgtaaacctgcggttaagctcggcgctcttgttataataagcaagcggacgtggaaacatccaaagtcatatgatgctttaaatctcactgtaactgactaactgtcgatacgcaaatttttagtttttttggggaattattttgtaacacaatttctccaaaaatgaagtcattcctagctttgaggccagttttgtttaaaagggaactgctgcttgctgctgcaaggtgagtgaaacattgatcgatttgagggagggggtggagggagctcattcgttaacgacacatgcgcgcagcagccgtgggaggtcttttgcactgtacactgccgctgccaccaccagtcagaacagagtcaagctcagtgtgagagggtacagtacgaagaagagtgtgagtgttgggggtggtgggctcaaggtggaggttgagggggggaggaagaagagggagagtttgtaagtcgcgaggataatatgatatggttgagatgctgatgatagttcttgttcttgtcttatttaggccgtacttttggttgaggtgagtatatgcacctcttttcggctgagcgacctgcaatgcacagaaggacgactgaacgacctgcagggacaactgccggtgcgcgagctgcattaatcaggatacgaggcagaggaatttcaatacttttgcggtgagtcttcttgatggccttttgggagggagacaaatttttgctgatgaaaatgaatggtgggtagattcctgcggatatcaaacctgagagtgttagctcgacggcggagggggttgctgtcaagtgtttgtgatctcttaccccctccttcttgaacacgtttggcatgctgatggggagatgttagggtccgacggccatgagagcaattatgactgggatttcatccagcactacgtgaaggaggacaagagggacagaagcgtcacccaggagtacgtcctcatctcaaaccccaaaaagatcgagctaacactccccaagccagcactactggggcgcggaaatagcctccaacccacccaccgtctcctacaacgaagtgatgaactctgaccaaggcgtggccgacctcacagcaaagatcgtgagttctcccctccccccttcccttcccccttccacacatgatacttacacttcctccctcagcaaaaatacggcttctccttcatctcctccaccccctcccacgacccggacccaacccgccaggtcctcgagcgcatcgccttcatccgcctgacccactacggcggcttctacgacttcatccccgacctcgccatggccgacacggcctacaccaacctcgccctccccgcccacacggacaacacttacttcaccgatccctccggcctccaagcgttccacctcctctctcacacccctcccccgggtgtttctgccgagaccgtccagggcggtgcttccttgttggtggacggtttcaacgccgccaaggtgttgaaaaaggaggacccaaaggcgtacgagattttgactcaagtccgactgccctggcatgcgagcgggaacgcggggattacgatcaccccggataggttgtatcccgtgttggaggtggtggatggggagctggggagggtgaggtggaataatgatgataggggggttgtgccgtttggggaggggtatactcccgaggagtggtatggggcggcgaggaagtgggatgagatgctgaggaggagggagagtgagtattgggtgcagttgacgccggggagggtgcttggtgaggtctttgatgctcttaactagggggggggaagagatatgctaacgatgctggggtagtgtttgacaactggagggttatgcatgggaggagtgcgtttgaggggattaggaggatttgtggggcttatagtaagttctctttggttgtcttgtttctattgtttggtttatggtatgctgatgggttggaaatagtcaacagagacgattggatctcgagatggagaaacaccaactttgacaggaagaaggtgttggacagtgtaatcgggtagagtggtgccgagggggttaggtatcaatttcttagggccagcccgaaccagatacaaatcccagggtctggtatgcatgcgctgtaacgtttgactacatttgattgcttgacaggattgacaagtcagttcgatgtgagcttgcatttaccccacctccgcatcgactgacagctacctatttacccggctgttgtgtgttttcttaatgccatctggcagacgtttgaagctctcgacttgagtttccccgggaacttttggagacactttccatgtacttagtttaaaggctaaagttataaaatcgataattccatagatatcggcccttcccgctcaactccagtccccggatttacccctcgatccccacgctccacacccatggagccagaaacaaagacaacccaaggccacgaatggcatcattgtgcatatgggtattgcccacgaatctttgggcaccatccgcggtattcacgtaaccaagctccacaagacttcggaatctggcaaggggatccgtcttcccctccacttcttgatcgagtttccgcgctggacagctggcagcagggcagctggacaagcagtaacagacaagataggtacaacgtagccgggtaagggtatgtaggtatccatccgtttcgagggaccataggagccgacatggtctccgaaggtaatctgcggggttggctgtgtgtgtgtgtgtgtgtgtgtgtgtgtccctggccgagataggtagctccgcctcgatctttgtagatctgcctcgtccccccttttctttttttctttttttttctttttttctttttttctccgtttcctgcttctagttactcagttcgagatcaacaaactcaccaaacttcaaaatgtcccacgtttccccagctgggctcttcgcccacgactctaccgctcctcctgccagcaacagagttctgcctctgttttccctcgctggaaagaccgccatcgtctcgggcgccacagctggtatcggttacgctgttgctcaggggttcgccgaagcgggcgccaacgtggcgatatggtacaactccaagaaggagcaggctgaggctgccgcagccgagatcgagaaggactttggcgtcaagtgtaagcccctttctcagtcacctaccttcaccaccatggaaacctaacacacaaccctcccaaacaggcaaagcctaccaagtaaacgtcgcctccttccccgccgtctcctcggccatcaacgaccacatcctccccgagttcaactcccgcctcgacatcttcgtcgccaactcgggcatcgcctgggaggacggccccatgctcgacggcgtggccgaggaccgcatcaagcgctacaaggaaatcatcgacaccaacctcgacggcaccttctactgcgccagagtggccggggagatcttccgccggcagaagcaagaggggctcgaggggttcacctacggcagcttcattgctacggcgagcatgagcgggagcattgtgaacatcccccagctgcagacggcgtataatgcgagcaaggcgggcgtgattcacttggtcaagagtctggcggtggagtgggttggtttcgcgagggcgaacacggtgagcccggggtacattgttacggagattagcaagttttgcgatgaggggacgaagagggcttggagggataagattccgatggggagggaggggatgccgaatgagttgaagggggcgtatttgtatctggcgagcgatgcggcttcgtatactacggggattgatttggtggtggatggtgggtattgcgctccttgaggggcttcatagagaaacagagttcggtttctgatgttcaatgctcggacttgatctggtgtaagtcaatggactggtgccaactggcagtcagctgctgccggtgaacccctaatatatgccttggcaagccagataccagaccgacccaacctcaccgctgaggctccaaaagtttggagccttgtgctacctgccgataacgttctctcaattcgggcacgcgatagcatttacatcaagttgcctgtgccccgtgtctacctccagtgttccagacgtatttacttgacaaaagactctctgtttgggccttctgaatgggccagacccgagcccatttttagcagaagcgggcctctcttattctcccccccactgtaaagccaggggaccgtgatagtgttaaaagttgggtggattacacctttgaataactgtatcgttggtgatttgctttgaaagcaacaaacgccagagggaggcaaaaaaaccacgagacccgattccgcctttctcagctttctggaaaagccagtctcgtcccaaccacagctcacctctcgccaattcggtgaaacaaccaaggtacccctcccctcctcccgccgccccagcagctttctggagctcgcccacacccactctccttgctccttcgcaagaggaccaactgggaaagtcgcctctctctctgtccgaccgccgaccgcccaactgctgcttgccttcagccttacccatctgacaatcccaaaatccgctttcaaacttcaatcaaacggcggctttggcgacttgcacacacaccccgcaccctgcaacattttaaggggagcccgaccgactgtccaaccggcgaccccctttacagccttactccccgtaatcctccctctttgccgccgatagtaagagtatcgatagtcgatagtatcttttcctcctcccactcccccagcctattcagttctcaacgacgtcgatcaacatggacaccgaggacgccggcgcccagggcttcgacccccgcacccagcaggtcgacaacgccatccgcgccatacagcagaagaagccgctccctgagattgactttaccattcatgtgatggaggatggcactcaggtcagcacccaggagagagtctgcaaaggtagagaacaactctctcgacccattcaagtactggtactgacattgttaccccccccccccctcccatccagatgtgcaagctcccgccatgtacaagcccaccgacgaccaattcttcgaggacgagtcgcaacaaaagcccaacattcagttcctaaagcagcacttctaccgcgagggccgcttgactgaggagcaggcgctatggatcctcaagaagggcaccgagatcctccgcgccgagcccaacctactcgagatggacgcgcccatcaccgtctgcggtgacgtccacggccagtactacgacttgatgaagctgtttgaggtcggcggcgacccggcggagacgaggtatctgttcttgggcgactatgtcgaccgtggctacttcagtatcgagtgcgtgttgtacctgtgggcgctcaagattcactaccccaagtctctgtggctgctgcgtggcaaccacgagtgtcgccacctgacggattacttcaccttcaagctcgagtgcaagcacaagtactccgaggccatctacgaggcatgcatggagtcgttctgttcgttgccgctggcggctgtcatgaacaagcagtttttgtgcatccacggcggtctcagcccggagctgcacacgctggatgacattagaaatatcgaccgcttccgcgaaccccccacccaaggcctaatgtgcgacatcctctgggccgaccccctcgaggactttggccaagaaaaaaccaccgactacttccaccacaaccacgtccgcggctgctcctacttcttctcctacccggccgcctgccacttcctcgagaagaacaatctgctctctgtcatccgcgcccacgaggcccaggacgcggggtaccgaatgtaccgtaagacccgcacaacgggcttcccctcggtcatgaccatcttttccgcccccaactatctggacgtgtacaacaacaaggcggcggttctaaagtacgagaataacgtcatgaacattagacagttcaactgcaccccccacccgtactggctccccaacttcatggacgtcttcacctggtcgctgccctttgtgggagaaaagatcacggacatgttgattgccatcctgtcaacctgctccgaggaggaactccgcgaggaatcatccgcctcctcgcccggtccagtatccccccccttgccctcggcctcgagcgtcgggagccaagatccggaatcgatcgaattcaagagacgtgcgatcaagaacaagattttggccatcggacgactgtcgagggtcttccaggttttgagagaggaatccgagaaggtgtcggagctcaagacggtcagcggcgggagattgcccgccggcacgctgatgctcggcgccgaggggatcaagaatgcgatttcgagctttgaggacgccaggaaggtggacattcagaacgagaggctgccgcctagccatgacgaggtgcagaagcagaaggacgaggagcacgcccaggcgctggagcgggcgacgagggaggcggagcaggataagaagttgcagacgctgagtaggaggttgagcacgtgagttttttctcttcttttttccctttccctccaagtcatgagttattttttttttggcttggttgattttgtttttgcgagaaactaatacggggtatcttggtactaatacaggggtgaataaaatagggatcgcaagcggtagtcgattccaagcttttgctcttgtgtttttggcttttggaagaagaatggaggtggtgatcaggaaacggggaaagagttggctgtgttggttggttaagtggatgaatgatgggctggatccgtgtactgtccaagtcagtgtgtgtgtgtgtgggttgtgtgagtgtgtgtgggtgtgtgttcaataaagggtcgcggcgagaaagatactacctacatatttttcctctctcaacttctcacacctaaatcacacacagtatccgtatgaaagtaatgtcagatatatcgggtatttgttgcaaacctctctttcactgcggtcacatgcaaaacaaacgaggttaaaaataacaatccatacaagttcctatcgatcatgcccctccctatgaaccaagtcccatccatccatcgtccgtccatctttgcttgctctctctctctcacaaatgttcgccatcaggtcgtcccacactgcacaaccaaaacctccttagtcaaggaggcgagggcgtatccttcacgctcctccactcttctcgacttcacaaatataacaaaatgaaaaaccacccccaaccacacacaccatccatcatcccagaaaaaaattgaatgccccatttttctttccatcaataggcctgagaaaccaaaaaaaaaaaaaaaaaaaaaaaaaaaaaagaacaaaaaacccaagctaacaaaacgagcgccccgataaaacactgacagggatgtacatatacaacgcgctgccgctgtgtctctaacaacatcgagcagcaacaacgatcatcatctacataaaacaataaccgcaccttgtctactacttccaaagtttcaaaactcagcccttgaggaacaagtctccagcgccgttccgtgttgttcgtgcccgatcggggtggtctaatcccaacagatcatccgtgttcgttgcaatgtcccacagaatatcgtctacatcaacgacatgttagccgccataaacaaagacagaaagagagaggtccaaaataaaacttaccatcttccaaatattgaggtcgtgagaatgatgatctccggatcacagcaaatttgatcttctcaaaactcttgcccttgataccagtgcgctgttccagccgcttcttggtgtcggcaaacttctctccttccttgaccaagaatcggaacgggattccatgcgctctgctgggctcgccgtggaagtggaagcaggaaatgaagtttgcttggtccgaaaccgcagcatcctcagcgggcatccgctcagctatcaccgacgtgtaatcgttaatgctgagcaccgaatagtctctggccagatctctgaaccacttgtgatgactgctagtttcatagacgcggatcttgcccgcctcttcctcgctgggaattttggccttcttgaccagagcctcgataaggtcttccacctggccgctcttgggcaccaacacatcgaactgctcctccttggtgatgccctcactcagccacgtgattttgatgctcttcttggtatccaactcggccaagctcatgtcgagcacctcaaaatacagagcatcgttacgctgattcatgttaagttgtccgtaaccggccgggatgaggatgttggccaacgactgatgcccacgcttcaccgccgtccgggggttgttagagctagcattaaccgtgtaaaaccgcaggtgcgttggctcaacgttgagcttctcaccaaccttctcacacagcttgtcgtagttcattttcgtgttgagaaccagactgaactccgggtactgcttgggatcgcacttctgggggtgagcgtggaaatccacattcttcttgttgttgagaaagtcgtagtaatcccgaacatcctcgtagcgatcgaccgccctgatcctgacaaagtaagccactgtgttcgaaaagaagatcaggataacaacttacgtttcttcagagccctgcctttcggcgccgagccccaatttgtacttcttctcgtcacgggttcgctggaagcaaataatgtctccatcttgaagctcggcagctttcagcgtcagcttgaccttgagaccctcgatcatgctaggcttgatttcctcccacaacatgatcttttcgtcactgggcagcttctcgccccagttcatctttttcaaaatgaccggaatgagatcctcaaccttcttttccttgctgaaataaatgtggccaacaccccgcaagcactgcgactcgacgtcgaaccatttcaggaagagtaggatcaagtcatttttgacaaccacaccattcgggagcccgggataggtcggccagacggcagccccatcagcgtcgacttcgtcagcaatttcaacccacacacggagcgcttgatcccggtgtgccgtggctctgctgtacgtctcttcgactgtcgggcgaagatccatcactggctggtctggtctgactgtcttgttttgccggttcaccatgatccataatcgcacgcgtcttggatcctctccaatgtcggcggctatctcgttggccaagtctgccattgacgccgtgcgaaggagcttgtactgcttgtaggagcccggctccgaacccacggcggcatcaaatgccgtcaggtcaactccgccatgagccttgaacgtctcatctgtgacggctttgaccccgaggtaaaggtgttgttcttctctctccttgcgcttagcttcacgggcagcatgttcttgctcgaactttttctggaggtgttccggagcatcggctggcgtgacagggcagagaatcttgtccaatctcgacttccggatgtaaaccagcatgtaggcgctgtttggccgcatgatgggttgtttcttggcgttgagttggggacggccaccagttgtcttgtagaagccgccaaagttctcctccaggacctcgcgtttcgtggccttggtgaccttatcatcgtcatatttgtaccaccagccatccttttctggtttcaggaacgcatagtagtgacccgcattgagatcaccgctgtgtaccagaacaccgtgaagctcgtattcccatggctcggacctatcagcctcctttgacagataggccgaggcatcaaactcctcgggaaactcgtagcgatcattgatcttcatcatagtgtcgaggttgatgtcgtactcgaaccgcttcagctgcaaatggaggacgtccgggaagctgttgaagatgactcccttgtcggcgtcctgcaacttgtacgtgtctccggcaaagtactggttttctccgtcgagcttctccacctggatgtagtcttgaaaactatccagcagattcgcgttcccgctgacattaagctgaacgtcccaaaagtcctcgacgcgacttgattcgtaggggacgttgatgcaggagatgtaggttttgatcttgccgctgaacatcatgggaagcgccttttccaggtcggtgcccttcatcttgtcctccatacgctccatgagcttcctagaaagctcttgcacatcttgctgctcaaaaatgtgccgcgtttcccagccaaaagacttggtgagctcgttggtgctaacagcgacgttcgaagtctgaagttggtagaagagtctctgcagtgtataagcgctgtttttcatatcctcttcgtgctctgtggggatgctgtaaatggccttgcggaacgcattggtaaagtataatgactggaggagtgagttgaggtaacaggtagcgccttggttcttaagaccaacgtagccagtctccttcttggaatcgtagttgttgaagttgtgccataaaacgcccgtttcgtcctcgacaactctgacgaaagcggtgatgttggcagcatcgttttccaccagaggcctgtctgcagtctcccagacaacattgaacatcttccggcactccagaaacctagtgaagccccagtcgctctcctccttggtgaatcgatgatgcgccgagtgatgaaacattaaggatgggtctttgggattccacaggacgagggcaaactgcacacagcagctccagttgtcgggaacactgttggtgtcgaaaccatgctccaggtaaatggagcactggtccaagacattattgccgtgtggaaagagtaggatccgcctgtcgagtgtcagaaaaaaaaccaaaaccaatcagatagccattgctcaccatgggtaacctccagcctggaatatgggccctcgctccttcttattcatcgtgcgccatccttgcacttcccaggtgtggacgacatcttcgagaatccggggctcttcggcgagcggaggaagcactatttccttcatggcatcacctatcacggggtcagcactgccgggcgtgggacaacaagtggcaggtcgggtgtgttcaaacatactatctgtggcgagtacaacatccgtctccatgctgtcgggattgatgatggcgacatcttcggactcggtgccgtttggctcgacgatatgttcttcgggttggtctagcagcatggcattcggcgacacagcgtcgccattgtgctggttgtcggcctgaagagtcaggttagcaaagccggggattggtgaggccgagaggaggggatcgggcccagtcatgacggcaatcttggggaatagttgcaaaatgatttggtgggaaatgtgtcgcagagagtattgtgtagaactgctcaagggctgttggtggagggggaggagtggttgtcgagaaagcagaagcggagagtgcgagagtgagagggaaagtcaaaaaacaagcaacgagcgcctgcttgtacctgcagaatcttcttttcagacaaggaaaaggcttaccatatcctacgaccaaaagctactctggcagtcactgaggagcaacgttgatttctttgggaaggggcgacgtcgtgagcaggtgacggaggttgctggcgactgtctagcttccttgtgagccagtggggagagaggggtccacggattgggtggttgacggctgtcgggcgatccggcacagcaactgcaagcagctgttacggggccaaattcaccaagattctgggggggccggaacacgtctctttcaggaatcgcgactttgcttcaggtgggcgggatcaagggttggatgcccggcactcgtggtggactggggaaatatgtccaggtggaatgggatctggggaaggcaaaaagaaacccacctgaacctctctgctgccaaatggccaagcgggcgcagcatctgggcttggcctgactgttaagtcacaaccggtgcatgtggcgttcaccacgctcgccactattgtacagagagccagttcatgtagctccttaacatgcacagtttgagccccgccatgacgtggggacaacgaactagaagataatatccacaacagcttacaaaacgctgtcaatgtcgctgtcaatccttctccaataatatgggtgcaaagttaacattttgattcttctttttattctatagccacaagacatgcttgccaaagactacaggtatgaggtatgttgtgtccgtgctctttcaaaagacagctaagtggggagcaccgtgtgaatgtacctacttgcacacacctgtgctttcaaggctctatgacactcagctttacaagcagtgaaatgagcttagattctctatggtaggttctaaatgtctttttctaaagatgaaagctatgagagactgatctctgagctaggaatgaggcgatattcaagcctgaggctgggccaacggcaatagttttcagccacacaagacacatctctcgcagagcacaggctgagatcttgcacaactcgagtggcaatacgtaggacaagtacctgaaagccatcctcagccgaagtcgaacaacagcatgttcaaccgccttcttgtcagagcaacggcaacagatgaaagcacatgtccaaaagacttacaaggccaggcgcacggatcataagtaacatgtggggtaattaggtagatgccggttcccgtcaggaaggaactacctcgggggagagggcctgatctgactcccatgccgcattgcaacctactgtgggcagacatcattgtctttgaaagagagctcatgcaactgcaccatggccgccggagcaacgtgtgcgtgtgcttttagaaataacaccttctctccttgaaacctgctccatgttgtagcacctcctcctctccactttcgcgcccaatgtaagacatcttcatactgaacggctttgtgaaccaattccgatctcggccgccaccttttccttcacatcgcatggcaccgacggtatgcggcgccttcaacatgtcacggccgccgtccggttgagtagtagagcgggggagctgagaaccttgggcgcggcggcggcggcggcactcattcagctgccaaatcggcgacacagtcatagcagcagccaaagtcatgcccatagtccaaagtggcgtccggtgtcagtgttggatgagtatgttgcgcaacctcagagatccatgtttccaaacctccagccagtgatcagtttctaaccttcttccttgcagatgggttgcaaaagaggccaggcccatcagcctgcgccagctcatggtgtttggccggtcgttgacagaatcaagactcatcagctcagccaactatgttcggaccgagctaccaacacgaatcgcccaccgtatccgggacatgcagaagctcccctacgttgtagtcaccaacaagcacttcaacgaagtatacgacctatactacactgcctttgacaccttccgcaaagtccgcgaggtcaaaaacttggacgacaatgaccgtctctgtgccaccatccgaaccatgctcaacgcccacctaaccgtcatccccaaactcgccatgggtatcctcgagtgcaacggcctcaaagacgcggccgagctcgacaagttcatgaacaccatcctccgctcccgcatctcccgaagagtaatagcagaacaacacctagccctaaccgaaacctttcacgccccttggttctccccgggggcaaaactctccgaatccgacttcataggcgaggtctttttgagatgcgtagccaaagacgtcgtctcccgctgcggcgacgccgtcacctccatcgcccgccgcgcctacggccctgacatcgccctccccgaaatcaaaatcgtcggccatctcgaggcgaactttccgtacatcctctcccacctcgagtacatcatcggggagctcctccggaattctgtccaggccgtggtggaaaaacatcagaaatcaaagaacaaatcggcacagcctcccccgatagaggtcacaatctgcgaatcaaaccaacacgtcatcatccggatttctgaccaaggaggggggataccaagggagagcatgccctacctctggtccttctccaagggtccggcatcaaaagaaatccttgccaacctggggcaagtccccaagatggcggccacgatgcaggagctccagattgacgacattaacccggaaagcaacaagaaaattgagactttgcatcagaagtacgggcatcagagtgtgcagtctttatcagcggaggagaaggaaagggaggacagggccaagtatagttccttggccagtctgtcgtcgaggcccccgaatttgaggttggggatgggcttaccgctgagcagggtgtatgcagagtattgggccggctcgctggcgctgcacagcctggaggggtatggggtggatgcgtttttgcagattagcaagctggggaacaagaatgagcagctgactacgagggcgacgatggatgctgtttagtgggtatcagtcggtcttccctgtctcgagcaatataaagcgtttttgaacaccaccaacaacaaaaaaagctggggccggtaatgaagaaagggttgttgaggcctcttgtttaccgggtattttggttggggaattatgtatacacaagacaccaagttgctaatgaaatcaataaaggttggaaatcatcctgggctttttattaaccaagaatcaggttggattgatatgctgaaatacttttcaaccgacagagcttgtctactcacactttgtcgccagcaatgcaattacaagtgccgccgcatcttcaaacaaaaactcccacgcaatgtgtaacagcctttctcattatttggtatcatgaaagggggagggggaaggggtgactagacagacgactaaaagacgactaaattacatcgtgactaagtctcaaaaaaaaagttgtaaaaaaggagataaaaaaagggggagttgctttctttcgcgagagaaacaaaaaaaaaagctcgataaaaaaagagaagaaggcaggacgacaaaaaagagatatcaagtatatctttttccctcccctttccccccaatgtgtgtagtctttctttctccgaacaccttgcgcatccttttcgaataaatttggcggagcaaaaaaagaaacaacagcaacgatagaaaagtgaaacccccggagattataggcaacccaaccaaatccgcttaatcaccgccgcatcaccccatagcaaattcgtgagcatatccatgaaggccgaaagtcgtcactgtttggacaaacaaacgggccaaaatgtgtgtggtgtccggaggcagtggtttgaagcaaggttgcccctgagagtcgccacaagctcatcccaaagctccggtggagactgccgtttagcggcgcccgtggctgcggacagcgctgccttgcagctgctccagatcgccctccaactgtttgatctgggcatgagtctgctcgaggtccttgttgaggcggtcgcgctcggcaatgagtttctgctcccattgcctgaagcgctgctcctcgatcttgacctgctcggtgaagcgcttgcggagcgcctcctcctcctccttgaacttggggttgtccaacttccgggggcgggcctcgccaaacttgcgcgtctccatctgctgggcgcggtacgcctcgtagtgcaactcctcggtcgtgtggatgaggtccaacatgtgggtgcggatcaggatcgaccgaagcttcttgaagtcgcagtggtcctcattctcaacctcggcaacgccccacgaatattgccggcccttgacaatacgcccgtcattagtcttgacgtccttctcagagccgataacagcgaaaggcatagccgccataagagtgcgggcgtgctgggcagctggttcgtcgtcctcctcaatagggggctggtagatcttgatgttttgggcctcgatgacagcgcggatctgaaagcggttgagtcagcatggagctccgccaaacacgggcaaattaggtgtctcactcttgacttgaacttggccaagtcggccggactgagggtgtcagccttggcaataactgggataaggttgacgcgggagcacaggcgcttcatgacctcgatatcgagaggcttaagagtgtggccggtggggcggatgaaatacaagcaggcgtgtacacggagatcgatcttgtcctgacgacggggttgctgctcctgaagcatgtaggactcgtgctggtcgtcgaggaactcgataatgggcatccacgagtctctgttgttgacatagtcgccgaagccaggggtgtcaataacggtgaggcggactggaacctaggtcagccatgatcccgacatcgttgactttgtttgccattatacccttgaagaacttctcctccaactcggccttggtgatctcaatctcgacggtcttgtccacttgcttctggtggcggcgcttgtggtcggcatagttcttgatggtggtggagaagagcgtgttaatgaatgttgtctttcccaacccggactcgccagcaacctagattttgaaatgacaatagtaagcaaacgtcctcccctaactctgtataacagttatgctcaccatgatggtgaaagcggcgcccctcttcgcaacgatcttgtggcgctggttgggcaggttggcaatgccaattggcgaggcgctctccgcgttagaaggggccatcttgtcgacgcgacaggttgatggggatgtagcgtgtgtttgtgaggattggggtgtcggctgctacggggacagcgtgtagaagtacaagagggtatcgcaggaaagggaaatgcgtctcgggcagttgtttacgggcggtgggagagaatggagagctctgtgcttcaggggaatttcgctgtcaaatttccagaccaatgcagcaggtggtgcacggatcagcacgagaacccacggctgagcaacgggaagcaaattgagtgggtccccatcaccccctttccactttccccagctacgaagtgcctcaagtgccaatgggctgccaagggtccctcgccgagctaaacgcattcaagacatcggatgttaggagaaagaattcgccgaccccgccaaaatattcaagcttggcgatagcagctatcaaggttatttttttgatttgatcgttatcagtctcgtctcggtagagaaaacaccaccaccaccgaccatgaagacggatttcaagttctccaatctgctggggacagtctactgccagggcaatctgctgttcagtcccgacggcacccatctcttctctcctgtcggcaacagggtcacagtcttcaaccttgtcgacaacaagtcatacacgctccccttcgcccaccgaaagaacatctcgaggataggcctgaccccccagggaaatattctcctctctgtcgacgaagatggccatgccattctcaccaacatcccgcgtcgtgtcgtactataccacttttccttcaagtcaaaagtaaccgccctctcgtttgcgccatcgggtcgccatttcgcagttggattggggaggaaaatcgaggtctggcacgtcccatcgactccagataccaacgaggaaggcgatctcgaatttgcgccgtttgtgcgccaccacacacacacacaacactttgacgatgtccggcacatcgagtggtcgcacgactcccgcttcttcctcagcgcatccaaggatctgactgcgaggatatggagcttgaacgcagaagaagggttcacgccctcggttttgtcgggacataagcagggcgtggtcgctgcctggttctccaaggaccaagaaacaatctacacagtcagcaaggacggagccgtctttgactggcagtacgtcgcaaagccggggcaagacgaggatgagatcatggatgaggaggatatgcaatggcggatcgttgacaagcactactttatgcaaaacggcgcaacccttcgatgcgccgcctttcaccccgaatcaaatcttttggtcgctggtttctcgaacggtatctttggattgtacgagatgcccgatttcaaccagattcacacccttaatatctcgcaaaacgaaatcgacttcgtaacgataaacaagagtggcgagtggctcgctttcggtgcgtcaaagttgggtcagcttttggtgtgggagtggcagtcagaatcatacatcctgaagcaacaagggcactttgacgccatgaatgcgctggtctactccccagatggccaaagaattgtcacgacggccgacgacggcaagatcaaggtgtgggatatcgagtctgggttctgcatagtaacgtttaccgagcacacaagcggcattacagcgtgcgagttcgccaagaagggcaatgttcttttcacagccagtttggacgggtccatcagagcgtgggatttgatcagatacagaaacttcaggacgtttaccgcccctgaaagattatccttctcctgcatggcagttgatccaagcggtgaagttgttgcggctggttctatcgactctttcgacattcacatttggtccgtccagaccggccagctcctagacagacttaccgggcacgaggggccggtttcttcgcttgtctttgcccccaacggtggtctcttggttagtggcagttgggacaagacggccaggatatggtccatcttcaaccgaacacaaaccagcgagcctctgcagctcatgtcggatgtcttggacattgccttcagaccagactccctacagattgccatctccacactagacggccagctgacgttttggtctgtatcagaagccacccaagtctccggtgtcgacggacgccgcgatgtatcaggcggccgcagaatcacagatcgccggacggcagctaacgtctcgggcaccaagagcttcaacaccatccgctacagcatggacggctcctgcgtcctcgcgggcggcaacagcaagtacatctgcctctactcggccacaacaatggtgctcctcaagaaattcaccgtcagcgtcaacctcgcgctgtcgggcacgcaagagttcctcaacagcaagctcgtcaccgaagccggccccgccaccctcctcgacgaccaaggcgaggcttccgatctggaagaccgcatcgacaggtcgctgcccggcgccaagaggggcgatcccggcgcgaggaggaagaacccagaggtcagagtcacgggcgtggctttctcgccgagcgggacatccttctgcgcctgctcgacagaaggcctgttgatttacagtctggacagcaccgttcagtttgatccgtttgatctcaacatggagatcacgcccgcttcgacgctgggtgttttgcagaatgaaaaggattacctcaaggcgctggtcatggcgttccgtctcaatgaggcggggttggtccaaagggtgttccaggccatcccttacaaagatattggtttggtggtggaaaacttccctactgtttacgtggcgaggctgctgcggtatgtggccgcccagacggagcagtcccctcacgtggagttctgcatgctgtggatcaaggctcttgtggacaagcacggcgcgtggttgatggccaaccggggcaaggtcgatgtcgagttgaggattgtgtcgagggcggtggccaagatgagggacgagattagacggctggcggatgataacgtctacacggttgagtacctgattgggcaggccaacaacaaggcggcgcaggctggaaaggggcccaagactatcgaatggaatgctaatggggatttggaggtcaaggctctgccgtcgacgcagaaggaggtcacgatggataatatactggaggaagaaagtgaaggggagtggatcgggatagagtgaagggaatttggatgatttcggtttaatattatgttgtactaggttaaaggcaaaaggctggcgtcggaaaaaaaagattgataccattttgataccacatcctgtttttctctctacaacttgctgtcgtcgacgttgggtatgtcctgctctttgttagcctgccttctctcggaaagggaaacatgagagacataccttccaagcctcctcaaacccggcactcctcacccaatgctcccccggcgcctcaaccgagtcaacaatcaagtggcatatcttctcccataaccctcctttaatcatgaacccttctttctcttcatactcccgacaaatattcctacaaaccaccgtcgccctccccagcttgatagcatgcccatcatccccaaacccatgcaacctactcacaatctcctccaccatcttcgcctttccaggctgcttcggctcatacccctccaacctttccaccctcaactcaggacaccccctagccacatactgcaacaaatccatcctaatcttccactccaacaacctcctttttgttttctccggcacccaatccatcttgttcatcgtgacaaaaaacggcgccgcgttgacatggtgcatcagaaaaaaatcaaacttcggcacctttttttggtcagtcatgctcaccgccgccccagccgcgacataaaccgccccattaaacatctccctcgtcctcccctccacctccccctcctccaccttgaccctcccagccaagtcaaccatctccccctttgcccgcaccaaaaccccatcccggatcttattcccatcctccgacctcgccgcccctttcagtccctccgcctcccgtaacaaccccagcaccgtctccccttcttcccgcccccgtcccttttcttcagcagtcaacaaaaactccctgagatcatccctatgaacagccgcctgcgccaacccctccgccaccaccccagtcagcccccactcaagcccatacatgagctgaatcagcgggtgcaaaaaccctccaaacaacctgattatcaaatcctcctttccctccccctcttcaaataaatgcctcgtcactgtctccttccatcccaaccggtcgatctcagggtggaaaaatgttaaaaagtccgggtagtactcttctttaccgtagtattctgtcaatgtctccggtgtgagagtcactgacttaatgaacaggcaacaccggccgttggtacgaagcgttggtgtcaggggcagactggaggtgtgatggccccgccccgcttccctacaaagctatcatctcctcccccatctccttctccaacccccactccttcaacaacacctcttccttctttcaccccccccccacaaacaccccnnnnnnnnnnnnnnnnnnnnnnnnnnnnnnnnnnnnnnnnnnnnnnnnnnnnnnnnnnnnnnnnnnnnnnnnnnnnnnnnnnnnnnnnnnnnnnnnnnnnnnnnnnnnnnnnnnnnnnnnnnnnnnnnnnnnnnnnnnnnnnnnnnnnnnggtcgcagagtggtatccgccaagcattacctatcggcaggtacatagagctgacatcaaggcaagaaggattagatggcaggtgttgcagagaaaaggttgtattgagtgattaatagaacttgtactgacgttgaaccgagagaggaccgtgatacctctataaggtatgcttagcaatcaaccccaaagcccgaggccgaaaagaccgacaattattcatctacgccatctcaccctctcacttgcctcacccatccatagctcccatcttttacttgttctatcctcgcagctgaccacccattgtaacaatgacatcatcaaactccccaaccccacagcattatgcaggaacaaacgacccttttgaacacagcatcctttatattatgtaagtcatatcatcctcagttcatctcatcccatctacacattagatattcatctcttcaaatatcatcttgtctttttgaccacccatccatcttgaatccaattgcagacagcagcaatcataaaaacaggctctctaaaaacaccacaaacgcatcgcttcccctgtctatgcttccgatatatgttgttgttgttgttgttgttgttgttgttgttgttgtatgtatggctgttcggtttatctcgtcgctgctgtcgccattaccccccttttctctcatttcttcattccctttgtccactaggacttctatgatctctcctcccaccaacagcagacctgctcgaccgctgctgctgctcgattaattgtgttgccgttgattcgtcgtacccaatcacgttcgtcaagtagaagaatctgttgcgggtgttagtccttactccaaggttgagaagttgaaatgaaaaaaaaaatgaaaaaaaaaactcacttctcccctcttccctccctccccctcagatcctcaaactcctgctggcactccatccaaacctgtgccctctccttgcccctcaccttcttcacctcaaacctgaatctcccgctcactggcctgtgatccgacactcgcacctcatgccgtctgtaatccaactgctctatccttcccctgccggccccgcacctgaagagcaaccgatcacaccacgctgggcttcttctcttctccgacgtgtcatagttgtccgtcccaacatcatacttgtacgttggcgcaaaggtgatgggaagctcttcaaatgccctgagtctgaacccggggttccttcgcctagccacgagcagctgatcacgctccaggagcttggcgagattgcccgccttgacagctgtgacgacagtgtctcgcgacatggtgtcgattctgtagttgagatctccgttgagaagacacagctcatggtctaggatcattgtgccgtccccgccaccgacaaagctgtcgaaccgcaccgaggcgtccctctcacctggcaggagggacgcctccaaaatagcggcaatgtcgttgtgtctttgattcgcccccgattgtccagctgccaagtggcagttgataaaacagagcgaggtatcatccaccatgaacctcaccacaatggcacctttgtttccatgaagaccacccatgcctctcttgacctcagcgctgttaagattgctgatccggcccaggaggtctgccttgacaaaaatggcagtgaacagccccacgagcggcgcggaatgcagcacgtggtacaactccccatccatatgctgatccaggctctgcttcagatgcgccagccagttccgatactgatggctcatccgttcctggtccgtcccctccttcttcttcggcttcaggaacctcttcgcagtcaaagtcttatcctccaaatcaaccagctcttggaacccaaagacaatgatgtctggcgagtcactgctcctcagcaaattctcgatgaacactctgtcatcattcgaatagttgagactattcggcgtcgaagctcccgcattccacgtcagaatcaacgccttgatcttttcaaagtggcagtacctcgcatcatgctgcttcatcttggcctgcagccagtcgtcttgaagtaaaccatcccaaacacgcaacatattatccgcgccgagggagaccacctggtgacgatccagcttgtaaaagctcgactggtcagagatcagcttcacaaccgggttatcatgggcttgccagtccttcttaacggcccatggcgtttggcccatgtcgtagaccgagattttgccagtgttgtatcctgcccagaggtatcgtcccgcaccagtaagggagttgatcttgtattggctgatattcatcacgccaaggcaagcgtagtttttcctcgaataaatgctgactttgccgtcgttgtggccaaagaacaccttgtccggctctgaggcgagaagagtacccgacgtaacttcaccagcgccatcttgaattagaggtcggatgagaacctggaactgtgtcctgccgtcaagagttggtaggaaaaccctgatttccttgcctgtggcgtgccagagttcatcaccaaccaccatggaaaatacatgacccttaggcacgcgaaaggtctgtgtaggagggtaagccaaactgggcagattgctaccatcggccggcccccaaacgtgaagtgtcccactgtcgtccaaagtccacagctcgttgaaatgcctgtatatcctgataatctcgtagcggccgtgtgcgtttggtctgttgttgacaatactttgcgacaagacatcggcttccaacaactcgccattgttggttccgatccatatcctcgcgccctcctcgtcgacgctctctcccggtttgaaggccacggatgcgcccttcatgccctcgctcatggccaagctcataaccagctccccgtccataacattccacgcccttgtataaccgcctgttgtgcagacaaaggccccgcagacatcaaacatgcggctgtcgtattttgtggcaatttcgtgagcccctttatgcaagtatggcttgcttcggttcgttcttgacgtgtctggatatcccaaatcggccttgtgtgagcccgcgatttgagcttcagcgggcctagcttccacgggtgttggaggaggcggagcgtgatattcgttggacactctcccgggcatccgatccgccgccgtcacggacctaccgttgagccgtggaataggagggggcgcctgtgttactggtgtcgaggatatccgcttctgttggattgctgtcgctacgctcgtgttgactcctggccgtggaggccgtggaggtggtgctgagacagaatttgcagcgcggaccgactcgatgatactctgtggtcgtgcaggcagcgcaggccggtcgccagtgatttgcggtgttagaggctcgtccttgcctcgtctctttgcggctaatgaatggtgctgaggtggcgggtcgaaaccgacgtggaaggtatttgacctctttacaccgacagagggctgatgctgatttccgtgctgctggtgaagactatgttgctgttggtgatgcggttgctgttgtcgcggcctcgtaggcaagactgggggaacatcttcctcacctggcgatcctccgctgctaggtggactgttgaaaggtgacaccttgggactcgacctcttctgaatatcaataggctgactcgactgagcgggtctgctcggttgctcgaacagagtgaaacgtgaattaggtttctctgcccggttgatcggaggcggtactggcttatggcccatctctcgttcccgccgcaactctaccgaccgtctaggtggaggaggtgacggggggcgggcaggcgccacacgcggggactttcggggttccgccgatggcgtctgagttctgctcggcaagttgaactggttccccgccttcgccggagatgaggactttacaagagaatcggtgctaacaaatgccggacggtcaccggtaggaatgcctcctacgcctctcttcgggggtgaatgcgggggctcaacggtgagcgccggggcgttcgtgggtttggccctcgggctaacaggaggaggaacagttcgtactggcgagctcgaagcactggcgttcgcggatgcagggtgaaggctctggagcgtcaacttgtctttgggtcgcatcgctggtattggagggggctcacggggcgttgtggtcgagggactcggatcccgctcacggagtcgaccaggcttcggggccggcgccggcgccggggttggggatgcatttcgggttggtgtaccgggttgcgagtcgccgggcttggtggtcaagccttcaaactttgccaatagcgacgagacaggtctctgtgaaagacggacatggtcagctctgagatctaccatagtaccccagcaacaccagaacaacaccgcctttgacctcactcacaatggacgagccgtcagtcccgttgtcagctgggggatccatggtgatctaggtccgttgcgaactatggtttctggatcgctctacccataacactctttgaagctccttcagccagagcgtatccgtattgttgggtgttttgtgtatcgttggtgatgctgaacggagcgtgcgatgagtagcagaacggttgagagagcgaggcggaccaggagcagagcggtcgcgtgtttgtcgtcaatgccaatacccgaaattccaagggagacggttgatggttgtgttctatgcgaaccgctgcggcgggcgggtggagggggctcttttggctggggcagggcagtgttggtgctggatctggatactagatacggatagtggggacgtgagtgccccgtggccgatccgggactgcgtgttaggggatagaatgacgatgttccgtaaaggtacttcaaagagaggtccgagacgcacacttgatccgaagtttcgaacaggaacaactcatactctagtaactctacgtctgtccagccccacttagactgtaaagagccccttttggccgccgcaagcagccactctggaaagcgaaacacgtatggaagtccagatggaagacttcggccacttttgttggcaggctaattttgggtctggattggccgtgtaatgtcgtgcctgtccattcgatgcacatagcttgcttccagaaactcttggctgtaatgcgttctcagccagagtcgtttcccctgaaaattgttcgcaaatgttggattgagcaatgagcccgcgccaacaggcggcccagtgaacgttttcaagccactgaggacgccctttccatgtcaaatcacaagaaaggaggcactaggtacgagtacatgaacaatgaccatgtgtaaataacaggtgagcctgtgttttatatcagagaaagatggaggcctgcatggtgagcaccccccaacaaatccatgtttcaaagatggtggtgaggttccggtgcgccacagcccactataaatggcggggtggtccaagcttgctgcacgctggcaaagccgttgagactgtcgggcggcgggaccctaatggccgaggcctactcaactctacggtgccgcactgaccactcagatcagtcgacgggagctgggcccttatcctgcacatcaccccattatgaagtattgtcgacaaaggtctttttagacgaagatagctcgggacctgcatccattggcgtggatttttctctctctctctctgtctctccctcgcaacggatctcacggcaaagttgacttcctaccatcatccaaaccatatagttctggtacagacagcaaaatgaacactgtacgtatttctctgaagatattatgacgtagcagttttgactgacaacctgcgctctctaggttaaatctttctggtacgctccgagatacggactccatgcagaacctgctgattgacacggcgaactagggcgggctggggcgcattgtgcttgggtataccagtcccagttctcaacatgtagagcacacttgctgaccttgcatagccggcggcggcgcatactacttcgcgaagcaaggcatcgatgctgacaggcgtgctcgcctcgaggagcagcgcaagagaaagagcatggttgaatcgctcgagtactcgcagaatgtcccgacccagccaatttcttcttcagcaatgggtggttctgcctcagtcccacctcgccagggcacaccagcgaggacagacacagtcggctcaccaagcctagagacgggcaatgatccggcgcctacaaggcatgcgcctgctaccgaggccgagagggtagtcgagaagagcaagtacgaagccagtgtgccgttccgcagtccgaagggtgaccggttctcataaggggtttggtggtggactggctgggtttaggtggacagacaggtggtggatgacgggttgaacacgagtcgtggaccttgactagccgaacatcggaagacaccggagggatagccagaatcgaatttgagattgtataagacagcagcaaccttcctctctcttgattaatagccctcacgattcggtccttcggatgatgagagacctagcatctcttcatccaacctgaagattttggcaggcatacttgcctactggaaacaaaaagcctcacgtggtaaggtagttgtcatttcccagttcaaatgaagattgtatcaaatcatagcagcaaatattttgtccccgaggctcacctaccgtgtgcacactgtactgggtgaattaagcatgcatagatgtggggctattgtgccggggtaagggtgctgtgagccggcttggcgcgacttgacttggttcaacctcctccaaataattatttgcgaatctaccgaaaccacaagggtgctcactcagtatcaacagaaccccaagcgtggcagcaacgccccccagccttcacgatggagtcggcgtccaaagagttgaccatctcaaagacgctgctcacctcggctctctttcgccctgatccagtctcctgtccgcgcaatgacatcgagtctatgctcgcgctcctcaactcgaccatcgccgagtgctcgccaaccaatgtccaggtttgataatacgctttgttccatagcttgtttgcccgttgagagacctgatggctaagtcgcaccgcgtcagagatgcaaacaatgggctctgaacaatctgattccttcgccgaaccggatctccaacttttgcaaatacttggtcgccctttccaagtcgattggccaggacaaagatgtcaccgcacaatcagcaaggaatcgcgtgccctcggcaaggcgacgccggctacacatactcttcattctcaacgacttgctctatcacgtcaagtatcgaaaccgcgatgacggctttgcccagaagctagagcccgcattgcctgctttgttcaagagcgctgccgccttcaacaattgccccaaacacattcgaaaactacgagacctggtcagcctgtgggaagagaaccagtactttctccagggacacattcacgagctccgaacagcagtggaaacgccagtcgaggaggacgcagctaaggacgccgagcagactgtcgcctcagacgcttctgcggctaagctggcaaaatcagccccattcatcatgccagcaatgcacggagacccttcggtgccgtggtacgaccttcctgcaggcacttggcttccacatctccaaaagaactcgaccaagtcgataaacccgtcggtaatcaagccgctggagttggtcaagggaccagcggaaccgaacctagtggaagcagtcaagagcctccttctcgatatcgacaagatctactctaatgaagcggactttggcgagacgccacgagacattggtcagatgggagagatggtcgagatcgacgaaatcacgggcgatatcattggaggtgacacctactatggctggtctcggcagttttgcaataacatgaaggcgcggaagcggaacggtgggcgacagaacgagcgggatgatagtagaggaagaagacagacgcgatcatcgcgttcgtacagccggtcacgcagtcgatctcgcagtcgtagtggacgccgccgcggccacagtgtgtcgagcaggagctcagatcggcctgctttcaaacgccagcgagtctcggaatcaccacgcagcggtagaagtcggtctagacgtcgacgcagagatgcgagcatgagcaggagcaggagcgggagcagaaacagatctagatcctacactgatcaatcacggtcacgatcaagatcaagatcacactccagccggggcgctcgttcaagaagacatcgcagccggagttactcccgatcccggtccagatcaaggtctcgttctcgttctcgatccctctccagatcccgtagccacagcggccgaagcagaagcccaataggaagcttccccaaaagcccaagctacttcccaccaccgtccagagatcggatatcacaacctggccatcaagcttatccaagtcaaccaccgccgccactgcaaacccagccggtttatgcaccgcccactggcaactttcccggcggatatcttccgccgaactacctaggggcaggattaccgatgccgctcccgccaccgccgaattacaccgggccttggcctcctgcgcctccgccaccgggtggtatacctcaggggtttttctctgggattccgccgcctcctcctcctcctcctcctccgggaatggggatgggatttcaggggggttgggctgggagggggggtcatggagtgccgcctcctctttcgccgccgacggggccgcaggaggggtatcagggtgggtggcagcagggacgtgggggaaataatggggggtataatggtaggggtggtgggaggggaggtggtaatagggggggctatggacagaagaggtggtgagatgtctgatcaggggagtggggtattagacatggcttttggtgcccaatctgtacagccactgattgacagaatgggaagagtttgagaaaatatatcatgttttttggactttggtaaacacctgaagcgtttttttttatttgaccagtatgttgccgtcttggtgatcggatacctctttggaaggatacacacaaggccggcaaggttaagaaaacaacgtcatggatgacggccggacgaaagtctagcctgatagcaagggaatgactatatataattcaaaaagcaactggatgctgggaaaggaagggtattttgtcgtttgattgcgagggatatacctatgcggccttttggcggcaggatatagagtatgtcttgtggtgtgagtcactgtcactgtattggctggaggtattaattctgggtttggggggtgggtgagtgggctcttgtgggtggaaaatacggcagtgtggagcgttgaccaagttgacgggttaatgtttgatgtggttcacctaattcgggactcttgtgcttacgcttccnnnnnnnnnnnnnnnnnnnnnnnnnnnnnnnnnnnnnnnnnnnnnnnnnnnnnnnnnnnnnnnnnnnnnnnnnnnnnnnnnnnnnnnnnnnnnnnnnnnnnnnnnnnnnnnnnnnnnnnnnnnnnnnnnnnnnnnnnnnnnnnnnnnnnnnnnnnnnnnnnnnnnnnnnnnnnnnnnnnnnnnnnnnnnnnnnnnnnnnnnnnnnnnnnnnnnnnnnnnnnnnnnnnnnnnnnnnnnnnnnnnnnnnnnnnnnnnnnnnnnnnnnnnnnnnnnnnnnnnnnnnnnnnnnnnnnnnnnnnnnnnnnnnnnnnnnnnnnnnnnnnnnnnnnnnnnnnnnnnnnnnnnnnnnnnnnnnnnnnnnnnnnnnnnnnnnnnnnnnnnnnnnnnnnnnnnnnnnnnnnnnnnnnnnnnnnnnnnnnnnnnnnnnnnnnnnnnnnnnnnnnnnnnnnnnnnnnnnnnnnnnnnnnnnnnnnnnnnnnnnnnnnnnnnnnnnnnnnnnnnnnnnnnnnnnnnnnnnnnnnnaagcacgacccaaatactagtcctgggaagaagaacatgaaaataaagcacagaaggaacgagaggaaactgacgacaatattccacaagaagggtgtcgttagtgcaatcacacccccaatttaaggcaacccacaccaatttaccgttcctccctccgctctcccctctattttcgcttttccctctctccctcctccagcagccgtcccctcccttgaccagccaacaaacacttgcctctgtgatttcatctggtgtcccaagtagtaaacccggcacacaagacttttctgtatctgcagtccggcccactctttccgtcccggtgtaccttgcccattgaaaggcggagaaacggagcggaaaaaggctgaatgattcttgaggatcgattattgattcagaggcgcaatggccaatagccctattttgttgtaattttgcccaccactccaaccacccatccagccaccctgagcccactgaaagccaaccaccaaaagcagcaagataatagcatactccctcgcgtagactgaaatgaagtaaccccgatgctatgtacttcgtcgaaatctgaattattaacaacaaaatcatcagcattcatgccccgcctgagcggtcgttgaaccgactgggtgccgccgtataataagctccagtatcattttcgtcaacagacattgcgaggtattggtaaagccaaacgcagggctcgcggcatgagccaagggggaagagtggtcgtgtgaattgggatgggatggagatgacgactttcaggaaaggatgaccgcctgttgccgaagagactgtaattatttatgcagaccgatcgatccaaagatcaccgctgccccctgccagagcccgccgagttctgtctctcgtgcgtgggccgacggtctctccggtcaccgtcctggaggttgagtgaatccagcctcatctggttgtcctcggttgcgtccacttcgttcaaagcgggcatttgggttacggcggtccgggttggtgggcccccagcagccgagctcgttccattgagagatttccgccggttggcttgctctgcgatggcagcccactttctctcgcgaagagcttccctcgcggatgcgctgttctgctgctctgtgtattcatgcgagcagtcgtcaaacagctgggggttgatctccataaacagcttcatagcattgtacaccatgccatggatcgtcctgccaaaagttaatcccatgcacgcggctgggtcggaagacaagttacatacctattccaatggcccttggagttctcatacaaaggggcaaacatgataagggagaatgatctcaacattgtcgctgaccaagttgcagaagtactcgttgttccagaagtaaagagccctttcagcgacctggaagtgggggctggcaaccgatttggcgagctgatggaagagaggctcctgaaccttggcgaactcggctgggtccatgacctcgaaaatgtcttcaacctcattgaggaacataacctctttggtactgttgactttgggccagtaacgcaacaaaccgagaaccacctcttctgtcagggaagcatccttctcgaggaactgaacaatgcagtacgcaagttgagggtggtacatgctcaggctcttgactttgtggaggggaatcagcaccctggtaaggaacagcttgtgctcctccttcaggggcagagcaaagccgttgatgatggaaccgagaatttccaacaactccgcgatgccgttaaagcgctccgtctcgtaggtgaattggaaaaacacattgttgatcgagcggcgaataaaggatcggaggttgaggaatttgccgtagatacggtggagggtggtcttcaaaaagtcgcgctccctagggtcctcagaatcaaacaactcgagaagttggagcacaaagctgtgatcaatgtatgccttggcgatgtttgtgttgaaatcctggctctcaatgaaccggagaaagaactcgtacacgacctgaatatgcggccaggcaacctccaacacaggctcgtcctcttcgggatcgaaggcctcgccctgagggttcatgggaggcgggatggggcggaacaggtttttggcaaacatgccaaccacgactggatacatgggttctgtgataacctgacggttgttggccacataatccaaaagctcatgaagcgccagcctcttgatctccttggacttcatgtcggcactggcatcgttgaaatcgaagatgacgttgcattgatcaatcttcttcatgaacagatcctcgcggcgtccaggggggactcgtgaaagccgggggagcttctcgagctcgcgatgagcagagatgtcaaatcgtgacgaatgttgccgtctcggcgtcttggggccctcgaggacatccttgggggtttgatgcagtcggtcaaacatcagggacttttggccggctttcggaggggcgaggtcgtggggcatggtttcggcggcaccaggcggggggacgtgctacaaggaagatgtacgtcagtgtcaaggttcacagagcattggcgcgagcagcgattctcaccggagcacttgggctgatgatgacggtaggcgggagagtgccgtgtctaacgggtgtgctgcctccatttgcccccgctgtctgacctcccaggctaccaaaacgatccgggccaccggcgttctgtccggcgccaacctgagcgttcagggtggcatttccatgatcatcatgaacagcgctgttgggcggcagaggcttgttcaaagtcgatgtagaactggacggggtcagatttggcgactggttggcgtccttggagttcggcgaagccgttccgtccttcgaatccttattcttcttggaggacttgcttgagtccctgtcccgacctcgtgagagctaaacacccactgagattagcagccgaatcgagacacattcatccaaagagcagatggcgcagagaatgcacaatgtgatgaatgttgaagatgggatacctacgactctctggctgaaacgcttcatcttggtggacaacagcttctcgtctgtggggcggttagaggcgcccaactcgaccctactgctgggaacagagcacgtcgttcagcggtatgctcgggtaggcaggaaggcaagggtcaggctatcccgtgcaacgcggttgttctggtgatcgaatgttccgacgagtcccgggttgtgcattcacgcaatcgacaccgacagacaggtatgtggtcgcttcagagcgcgccgggggttcgtcgtgttgctgccggatgatcaagacggcgggtcggggcacagctctgccaatggcggggcttgagcggcgcagtcgaggaagaagctgagttgtcgggatcggggtgcgggtgcggtgctgggtgcagcgtgcgttgcgtggtggtgcttggtgcttggtgcttggtgcttgccagcacggacaaggcagggcgattgaggagagcgggtcctaccccaagggcagcagatgacagacggaggacggaacagctgccagagcgacaatcgcagcggcaagttggaggatataagatgggctgctggagagatgtcgtcgcgatctcaagctcgactagtgaatgctcaagttgggcccgcacctgtgatgtttgatttgaatgcgatccgaagctggggtagtttgggaaatggatgcttgggctgggcgttccaggtgataggtggttttgcggggctgttggagggttgaacgtgatgttttggatttggcgtgtctgggttaagtaaggcgtatcacgcattcacctgcatacatgaggcttgcccagatgatgaatcaatttcctaggatctcgggcccgtcataggtgacgctttacgggatagtggaatcccgaagttccagctggtcaagttgagacaacggattggcacctggagatgggaccaagggggagacacggggagtcggacgtgctggaaattaaccaccaggtccgcactgaacgtgacacgaggctgagcataggctcacagtcgatgtccaggtatcttcccataaccgcaacgctacttctcgattggctatctatctgcctatatgcccatctactactttgcggtcatgatgccctccagggctgaaactttacaaagttgaacgcaatagctcctcgaattaagagcatgttcacctaacttatagatctaggtaacatatgttgtagaagtggggctactgctattgtcatccctgctcgtagccaaccctaacagaagctcaaccttacctcgtcatttttcgtaaacaacactcgatcacaataccaaccaaacaaaccactttcctcgagaaaattgcttttggagctacaaggagaatacacgacgatcaataacggagagttgatccccatcgtaaggttgcgccaccagcctaaccgttgagcttcgctctagcttcgacttgcattcaacaaggccgaaacaaagcccaatccccacagccaaccctgccgctcgaaccctgtttgacactagcttctcactcacgaactcttttacacccatttttgcgcctcgatctttcacatcacgatcgagattcaaccataatcgcgcgattcatcatggatccagaaacccagaaagatgaagagcaggcgcccatatacaccattccttcaaggcgactcggtgctcttgagcacccaatgatcatcaaaaatctcgacaaaggcatcaagaccttgggtcagaacaatgctttccaagccgtaagttgcatcacatgaaggttcacaatctaatacttacaatctctcagattctcgactcggccagtccccaaatctctgtgcctctctacctcagaccagataatcccaccgcccgccctctcacctcccacaacgccctcacccacaatgtcgtcctcaaggtcacagtccccaagcgaacaggtcgcaagcgcaaaagaggaaccgacgatccctgggaaggtgaagtcctccctccatccgactcgtcagaggtcctctcccgcgatcaactggaccacccagccatcatccgccgcaaactgcaagataatcccacgacctacaccgtcaccccagtcggcataatcaacaacacccaccgctatcgcggcctcgccgactttcagtactccctctctcactccaagttcatgaacaagttcgtctccaacgtcttgccgggtgacatcaacaaactcaagaacttctctttggctcccgggattgaaacaggcaaagacatcgatttgatcccacccccttatttcaccccaatgtcgctgccttttagttatgggtacaaccaaaacccccacacaaaggaactcgcctctggtggctcaaaactcgtcccagacggggtaggcgacaactctgacgaggacgatgaatacgcccgtgtggtcaacgtcacagcccgcggcccagcagcgggttacttcatcgcccaggatgaataccctgtgcccacggcacccaaaaaacaacccgacatgacggacccccaaatcgccgcgattatcaatgaaatgcgtgctgccatggaggagagaccaatctggacacgcaggtcgatgtggaatcggcttggtgccaagttcgcggaactacccaagaatggcgggctggtgaggcattgtctgcagtttgcggggtatcagttcaaggggggcccgtggagggatgcgttggtgaagtacggcttggatccgagatctgaccccaagtatagggtgtatcagactttgatattcaagctgcacaagacgagaattgggagcgtgggacggagctggcaggcggtgaggaggaatgagatttcggtgacgaattttgggaggtactggagggagttgggggtgggcaatggggctccgaggatgggtgggagggtggatgaggcgttgttgaggacgcatgtgtttacttcgaacgtggacatgggatcatgccgcaatagaccannnnnnnnnnnnnnnnnnnnnnnnnnnnnnnnnnnnnnnnnnnnnnnnnnnnnnnnnnnnnnnnnnnnnnnnnnnnnnnnnnnnnnnnnnnnnnnnnnnnnnnnnnnnnnnnnnnnnnnnnnnnnnnnnnnnnnnnnnnnnnnnnnnnnnagcaaaaagactgtcatttttgaagacggacttggtgtggtacaagaggaatttgactttgatgagatggagatagagggtgactacgatgaagaggaggagggctacgcggatggcgaagagttcgggggttatgatgaggatgaggaagggtactatgatgatgacgaagatgggtatccagaggaggagtgctatgatgagggtggggttggatcgtgctgatgaaccgcagcactgagccggtggtctacatgagacagcgcgtcataatctgccaaagggtttgccatgtagcgcattgctggatgcagtgtatatatcacagcacaactcatgtatatgtaccttgtaatgaagcatacatatcattatgacccaactgacaactctgtccatgatggcctaaaaagaagcaaaagaagaccacccctcctgggaggaggacccagcgcaacggaatgagaatccactatgttaaccgatacaccagaggggtctgctcttcggtctgatattgcttgcctgtttgatggaagctgctggcggaagactatatcgtattgggcagtgaggtgggcaggcgggtggtggcaggaagaagtgcttgtcttgagaagggacgtggcggtagagtcatcatgccgcgtgacgttgggtgggaggaactaggaaaggaaggaaggggcggggagaaggcaggaggcaggcgggttcttgcctcgcggttgttaggcaggcaggaacaacgatgtggacggtcccgtctttccatatggcagggtcaagagttctcgcggcaaacatcccattgaaaaacagatgtagctctttgaaatggcctgtttatacattgtagtttacatgtgtggatcctatacatttaaaattatatgttcataccaccccctgatttcacacacaagggtaatccaactcctcacaagtagagtaatagctgaacccccccccacccccccccagttccatggatgagcattccaccacgggtaccacacccgcgagtccatcgccgaatccccccagtgcggcccagaggcagctgagatgccagactgaacccgagtgtatgggctgactaaaggggttggacagtccccggtaaccaaacggctgatcgttgatgtgggccgggcctttgatcttgagctttgttggtaagaggaagaggagacctgggtttgtacaggatagctgcgctttgtggttgttgttgttgttgttgttggtccaggcactgttgcagtcgagagcccgggggacagataggtaaggtaatttgttcacttgtaattgctgacaggccgaaagaacagccaaatcggtgggttaaggctggttgctggatacttacattgaagcacttgggtgggttgtacttttgggcctcgtgaagatgtttcgtcaagttcggtcgtagaataagtgtaactccattcttctccacaggccatcgaattttcaagccagcaaccatagacacagtttcagtgaggccttctgtgatcgaggcctccgggcttctttgatgacgatttgaccagagaaccgaacgttggacaccgcaaacccatagtcttcacacgcaagcaccttgttcgcacagtaagactgaagggactgcttgagcaatggatacacaagtgatcttccaggtataaccgaaattatacttcgccgctggtggaggtgtgtaataagtgattgttatcatgtagcagttactcgacaggcacttgatggcatgacggctttcgtaaaggtcattggccacgcaggcagccccggctgcatcaccggcaccatcgttgatattgagagctaactgtagctggaaagcgaccgtttagttagcgcaccagaggtcttcataggaggagagcaatctccaggcgcacctctctgtcgacggccgcccagtgaggatgggagctccatcccccgttctctgaacttgtcctcgagaacttcctgctcggcggtgttgtctgggtcggcagaaccgccctgacaaataagaggggattgacatcgtcgggtggatcttggtccttccaagcggtgacggcgccgttggcaacctggacccacaggagtattgagctgctgcttcatgtcacaagtcccgccgacccaagagacatcgaagcactggatatcaacagtgtgaagtttgctctatcgggtaagattgcgagcatgtagcagtggaaatagtgctcttcacgataaaatcaggaaagaaggaaccagtttgatgaaggctggccgccgacgtgtgggggaaagcgttgatgcatcatgttcaagatagacacgttatggtttaccagctttctctctatctcatctcaccttgagccatgcacatcgtcgaaattacacccaggtatcaagggttgcttctataatctcgcattcttcttggagcccctcatttgcatgacaccctttcaaacttgatcaaatgtgagtatgccaggaatcagtcagtcacaagctagcagttccctgacttgcactacatatgatcattcgtgccttcgtctgctgtcgattgctgcctggcaataaagcaatttacgatcatggcaggcgcccgtgcgggttgtagttgccatttttgaccagaattccccagctaaccaatgactgccaaagcaagcagcttgcgtgatgtgtgcgagtgtagggaaggagcaaagcgagccgagggcacctcaactctcctgtggtcaatgagatcggattgaaggttggcagtttcacatcttggggccaaagcatcgcaactcaggcaaaagacaggaaagaagaatatcatcgaccaccaatcatcaagatgtccaagcgcacaaagagtacgtatcacccatcttccacccgataggccttgccaacacttcacagaagtcgggattgccggcaagtacggtgtccgatacggcgcctcactccgaaagcagctcaagtgcattgaaactactcaacatgcccgctacctctggtaactcctcccttgctgcctctgtcttcagacatttcttcctgaccatgttgaagcccctcctgcggcaaaaacgcaatcaagcgggtttccaccggtatctggaaatgcaatgggtgcaataagactgtgactggaggcgcctaccttctctcgtaagttgagctctcacttgggcatggagaaacgggcagccaggactttgctgatgaatctgctcaaaggacacctgctgcaacaacgactcgttcaacgcttcgtcggctccgcgacctcaaggaaggaaaggtttgatatgtcaacccccatgatggaaagaacatgtggtcggatgcttgatcatggccgtcttggagatgattttgttttgaccctcggcaccgggttccatgtcaggtagtgcactgacttcacatgaatggaagaatattgcgagaactgtgccagccggagccagtcgatgtatggttcacggtccagacataactgcaatgtccttgatcatcgagctatcctcggtttggcatgcgcgtgaaaaggaactttggtgtaacctcttgaacgtgcatacagctgcaggtattttgctcagcctgattctgcgtgccaaccgctaatgcatggccttatacgagccatttgaattggtttgtttgctctgatatccgaaatcttgcatgaatcacagcacaatcgggatggcgatggttgagtcccgccaagcgcccattgacacacaagaaagcctgttggcttcccttggggctggggataacaacgttttcacaagatcccgcctgatgttggatatgatctgagtcacggtggagttttcgtcagatcgcagctttcaagcctgtgccaagttgcaagaacgggagctgccgatgcaggagatctgtaattattctgagcaagaatagaccgccgatcggaactgtcaaacaaaggtaccggcagcttggtcaggtgcggctccgatccgaaccccaacccggggctggcggctatcttaacgtttcgcgtgaccaacgcttgccttgatggtgtagggtgctcacagacaggcaagacaggctggcagatggatccgccccgtgcgctggtgacaacttccacatgtgatccaaccagcgatatcgatctcttgtgcggcagtttcccgcttggtgcgcttgtgtcagtgcttgggagatgggaggtagcctggaattggaaagtcggagatgtggttgtagggaaggagagcagtggtggcctccgctctcattaacagcggagcaaataagccgcccatgaattggttagcatctcctttcttacccaaccttccaacgcctcctcaaacatctccgtggtactttcacgaatatccgtcgtgttcagcggagagagaagtccgaagcaagtgacacgacaggcccaactccgcttgttcccgatcatgcttcaacgccagtggtccaggagggtagtggtgcgtatgatagatttggaagctgcagagcatcgacgattgtgatggcatcttcccctgatccccctgatgtcaacatccaaccggccaaggcaacaacacattgcctccacggatgaccaacgcttgggattgtcattggagcttcaaccaacacgtgtaccgtcggctttagaacttgactccaaaggaatatcttagtgccctttcaacttgattgatgctcctcggctcaatgcttcgtttcaaaggccgcagcgcggggcaggagccggccgattgttgttgacttgtttgttctccccgcaaagaagcagcaaaagtggtgacgtagtttttgcattgtcaggttggagttggccaattgtgggtcatcttggcagcgaaagagcccctcttgcgtcaccgacaaggacccaaagaagcttttgggctgactggggctaatccgctaatccgcttttgggttgctctagaacgtcacttggagatttagggcaaccgttgcaaaacacccagactggcaggagcagttatggaagtgaagtttgtctgagaaggctgaagtgacagattttgaggatatcggccttcaagatacagttcagaccgtaaacatttacaatcttccaactgacagttaccaaaatgttcccatagttcattaacgatctagctgcatgaccctgtagacatcaaactggtcaacagtaggacgagtccctaattgtgctatactattcatgctgctgctagcaattgggtaatgcagtttcaaaggacctcacaagccccacaggcctgagccacaattgtgcacctaccttaaatggagaggccacaacggctggtcaactggtaactgacgtcatggcctcctgaacgcgcggttgtcgcggaggggtggggtagtttgtctaaacttgcgtgtacttgcctctttgatggctgcaaacgcaaggccatccgatccgtacttgcctgcaataactagacaagggccgaattaacgcagggacagcggaatcatgtgaaggaagtagctacgtcataggagcttctcctccgtcacacccctctgatgcctttcgaggagtcagtcaaaccagaaatttgcaagcgggccagaccccccatcgattgtgtatataatctcccatcttccacctttcagagctgttctttttcttccatcatcaaacaactctagcagacaatcgaccactacactctacaaacaactttcacactcaaacaaacaactttcaccacctacaactatcaaaatggagaccatcaagaacgccggcaacttcgtcgctgacaaggtcaacgctgccacctctgaggcttccaagacgaccaacaaggaggtcgccaaggactccaatgctagcgccggcactcggtaagcatctctcccttctcccctcattacttggcatccaattaacaccctcaacagtctcgacgctgctggcaatgccatctccgacaagtttgacgagaagaagcacgaggcctccgctgagaccaacaagcagaaggctacccactaagtgcctttcactatctcaataaccgccttctgacaccttcaaccgctcatcattgacgacatcgaccactgcttctttcgggctgggagagacttgatcacaatgggttggttttggacatcatggggtgattgatgggaggacttttggggcatggatttcagtttctttaggggacagtggatttcgggaaggaggattagcattttaatacccccgactactagctcggtagcttgatagtcaacctcgcttcttacccatacttttttgtgccttttgctgtgcttggtgatgtgacttgttctgtgcctttctgccgacatctttcttgctgtgaatttgcaagagttactggtaaaatccacgctttgaatcgagaatgcttctatctatcgcatgatagtcaaaaattcagagagtagtattcctgcttccacaacgttgatatcagccaattccagaacatcttgagctgttcagcatgaagccaagtggagaaagtttgccccatatccactagacagatagacccttggcgatggtatccaatcccaacccagaatccggggtcggagacagccgtagtcaggcttggcaccaagcaggtgtgacatggggtatcaccaccaaaaattaattttactcttgaacgcgacgtgcaaactcgcggcgattttccccccagcttcttcaatactttgaaagtcaatcgaccggtcaatacagcgccaaatcacagccatggacttctcgacacactcgtcgccctcgggcgccgaagcccttacctttatagaaatgatcgaccagacgaccatcatctcgctgctctcgacactcgcgatcctgttcacggcgctggggatttcgaaactggtattggacaagcacactccggggaggctgaggttcctgtttgtctggcatgcgtttgacgcgctgatccacttcatactggaggggagttttgtgtggcactgcctgttcagcagcacgtcggtgagggaggtgaagggggattacttcccgacgccgtattattatttggggcgggaccaaaagggacgggtttggggctcgcaggcggctgttgggcaggaggggtttttgggtgctatggcgcagttgtggatggtgtatgccaaggctgatcggaggtgggcgggggttgatttggcgacaatgagtattgagattattacggttgtttttgggggtgtgatggcggtgttggtttgttgggatttggcgaggaagaatgtggctagggggaacttggctagtgagtatattctcggggaggtggaggtgaggaagggaggattgctaatgggagatacagtgatcattcttgcgacggccgagttgtatggtgggtatatgacttttatgccggaatggttgagcgggagcgccaacttggatacgagcaactttatgtacaagtggattttcttggcctttttcaatgtaagttgtttgatggcgatgtcgtgggggggaggttgctaacggtttgatagggcctttgggtggttatccctctgtatgccatctacgtggctggagcggacatttacgacgctatctgggtcaggtctattgttgaggagcagaagaaggacgagtaaagcgtgcgatgagaagggcggtggttcgtggagaacgatgatatacgttgaggggttgatacatcattatctaatgactgatgtttgatgctgtgaagagtgggggggtgctggtatatgggtataaagaaattgcgaactgtaggtacgacatggctgtaggaatgaacaaaatgcatatacttgatgctttgggctttgttgagggagccctgaacccagccggaaatctcatgagaacctcgctgcaaaaccaggttcgccaggcacatcataacacattacgatcatacaagtcgatatccttggccagcatcaatagctggagcgcatcaaagccagccagccccatgtcagccacatgcatggcggatcccacgttggtgacagacgtgtggcgttgatgctacagactaaaccggaaagttgggtggccctccgcaaagcagagcctgtagcatacccccttttcatttcggaattctagacttccagcttcctctacccaccagaccgtaacccatgacaatgctggagtctagagccgctgggaactcgtgtcaagcttcatccagcctgggcaagctcggcatcctgctgaccctgctcgcttcctgttgtaccttatcgtccttcaagagagtctagaattgtgagataggtaccgacccgcgaaaagcaaggcgaataaagttcctaacctccgagtccgagggagctagcaggagcaatactttggttgtcgacttctgccaagctccgtatttcaatctaggtagggctggagcaagttgtaaagctggcctgttggcataggggccactagcgagcatcattttcaacgatcttccgacggtgtcgatacgaggcatgtcgccttatctgcttgctaccttccccgcaatgatgttcgcaaggcatggctggctttcaaaggaatccatcgtgggatctcttatctcagtttggaagttatgggggagggggagaggccaagtgaagtcccttgtcgggtgacacgagggtgatgggatgaccgcaacctgatacatgctctgcttcaggggatgcgaggggtgggtgacaacggacgatggtcgatggaatcgaaagaagcttttattgtgggtgctgaggggaggaaacgtaggacagatgggactgagtgcatcgttaaaccttgatagctggtgatgatcgatccggatcgatgttgtggtggactgatgcactttcatgactggccttgaggactgaggtcagtaagaaggctcattgcaaatgacaaaactagtgatgactgagactgaattgatattatgccagggcctgtgggcatgaaaagcaaagcagtctatctttggacaggctgtattgatgctgggaggctatccagagaacaggctggatgggccgtgaagatctccaagcagtggaaggagtgtcgttgacttgcacagatcgcatgtctctcggtttgatccgcagcaggggttggccctgccttttcaggagtcttggcatgtcactcaagagctgcggggggtggagctttgaccagtttacggctcttgcggcgactccggatggaccagggggcctcgctagtgcagaagacgaaactgggggttgtcacgaaactgcctcaaccccacgtcgcgacaatgcctcgctgcactcatcacagcacaattcgagctctttgcccgcccacagcgagagagttgagcttgggccccgagccgaatcaatggcttacctttgcatcccagcacagggtgctcgcttttgccacgccaaggttgctatcatgacgagctctggaaggcaaactctggatagcagctcaagttcaggttgagttcttctgcccctacctcaagataccatagctagaaacagttttctaggcaatgactggtcccaacatctcgataaacgaccgtctctgcggcctctgggggaagacaatgacaccctgagcaggatgggatggcctcccgtctggccatcagccaccttcaaggggccaagatcgctttctgcctgagcggccgcacttgagtcgccatctctcctggggatttgaagatgcccagcccacacccctgctcggttgtatcctgtccgggaggggaccatcccaagctctcgtcaacgtttgccgtctcttcgacaacctgaccgggagagcacatggtgctctgtccccattttaatgcaccggtgtctccccttcagcaccctgcttcttctggaagagacccgcggtctgcaagtgtctgtctgccgttctttgccttggttggattggcccattcatcagccctggtccctgtttctattcccagtcgagggcaagcagcaagtgctgggtgctcagggactgtttcgtctggcccgtggttgtgctcaaggtgtgcccacccctgccgaacagacgggcttacgagagtggaatgcgggatggcaggataccattacactcttgcttcatccatctgtttgtcttgatttgttcctttttctcccccttcgcttcttcaccacacatcggccggcgccgtgtttacgacctcgacgacgtggattagatgacttgacgacggacggattcaagggcactgctacggcaatctcgccatcgccgacctcgcggatagacagacaccgacagagcccaaatgtcgccactcgcgttggtagatgaggtgattgcctcgtggttgcagtcgcgggacgacacggggacgatgccgcagaacaacttcaacaggacaggaaccaacaccttccagacggctcggaaccaaaccaccacacagcagatgttcttcaacgaactacgattcgccgctgccagatccattcgaacatcgaccatcattttagcttcttttaatattattgcttcttttgcgaccgccgtggggatcctggttgattcgtatttcagggaaaggcggaacaacaggtcatacaggttcaagcggaatggcttcaactttgtgcccgaaggcgagatctatccgctcattttatcaattggaattttcattcaaagcttggtctttgccggcgctcagtcgactggcctcgacggactttttggcacgggatgcactatgatggcattggtcatgttgcctggtgagaagaaaccttggtctcagatgagtaggttggaattacgcttgctgacatttaccagctgtgttcctggcgccttttattcagcttgtctttggtgttgagttgacgttgagggcacttcgaaaggagttgtttgccccacgggggaaatggaatgtgtcgatttgctcagcacttgttgggctgtttacacttgccatgtttctggttgccgactttgaccagtctccaaacttttgcttaacctcgctcttttggtttgttgctcactactcgacggcatgctttgggcttctgacggccatagcctcggtacttattatctgcactgtggtgatcttcatcaagctacacagcagcattcagatcgaggtgacagctcgcgtggcggcctcgaggatggtttattacctggcattgggagccatctcgattgtaagttaatccatgtgattttgatcagaaccagttgctcacctctatcagtgtttcatgttgccatatttctacgttttgacctttctgaaccggcgaggccagaacaacaattctctcaatctttcaatggttgctgcggtggtggcaaacatatccggactcatgaatggcgggctttacctgttcttgaagtcaaacaccatttcgaccattggacctagggacaaaatcggcgagtacgagaaccgcagggccagatataagattgagcggcggtataccatggacgacgcagactcggaattcggattcgatgaggatttcaaaaaatacaagacggccgctgatcttcgcaggatggatagcgaagagactctgacggcctacgagaaagaggagatggtggatgctaagagcatgcgcagcgtgaggccaccttccaccatctacggtcgacgaggccctgcgtccattcgctccttccgctccaacagattgatgtctgcggcatccaacgtgttcatgccgaaagcgccagaacgagcccgtgtttcgaacgcagccggtgggcacatgagaaagcgctccaactactcattatttcctaacaagaactccggcgccaagtcgtcacttaccttccttcctgccaccacatactcacccaacaacaacgaccacctcaaaccaccaccctcgatgggtaaccttgccgccttccgccaccgcagagactcgtctcttatctcatcagcgacggttcagatcggactaagattctcctctgtcgacgatatcccaccagtagcccaaacagtcgtcacagttcaggaccctcatgtgtacaacttggagtgccccaacgtggtcaaggagcttcaagccaagggcatcaatgttcagctcaagcgtcccgtgggcttggactcgggagcctcgacaccaaccggctcgacgaaagaagggtctcctacaagtccgggccgaagtccagtcaaggatgcgaagatgaagacgctgccgcctgtgccgagacccatgattgacacccagtctgtaacgccggcaccaccatttcaggagatcaccctgagccccagtgtctacagcccacaaagccccagcaaggccaaactcgtccctccagctaagccggctaccaacccacggagtccccccatggtaccaccaccacgacgaacaggcgagacgacaccacctcctgtggcggatggaaagaatgcctggatataggaccagttacaagaacaataatgtgcgcgcgtgtgtgtcttgtcaagcattttctggtgttggaaggttagcataggatggtgttgatggatgggtgtgtgccatgctatcatgatgggttcggtgggggtgtacgaaggtggtgatgatgatggtgatttctcttttccactcattcattctaatctttttagagagatttgccaggacgggcatgggatggttgtcttttttctttatttatatataccaaccacgcggttgacaccgtactcttttttttctaactttatataccattgaaatggcatgacatgccttgagggtgtctatcatttactttttatctttctacgttttccgtctctgttttcattgtggtgttgtctttggtcttttttcttctttgcctggggggggggacggggtctgtatttcatgaaggcgtctctaagatggtgggtggcgtatgagagacggccttttgtcggatacaattattgatactgcacacaactttaagcacgttccttttagtggtaagatgaggggaggtgatgggtggggaaaagcaggtcttggaggcgagttgtgatgactaggaggggggtttgttagcaggcatgttgccttggtgtgagagggcttggttgagacggttattgtaggattgagaataggacaggatggattattcggtctattgtcatcaggttaatacttgacagcatatcactaggcctcaagattgtgttacatgtcgcagacttgcgtcgagaactttgatctttcacattctgttttgaactataatgccagagtcaagagctcggaagacgacaacgggaagtacctagtaaggatgtgaaagctgcatttttatttatgtgctcattgacacaggttggactatcacagtcatgtgtgggactcaatctcagttactaaagaaacgaactatcgtgttattaggagccatatctcgtttctgggctcgaggctctcaattcctgaatacatgtcgagacctcgttgtttgttatttgtttagcgtcgaagagccattccggcaatttaatttgatgattttcaacgtaaggatccaggttttggaaagatcttcatattggggctcttattgtggcatcaagcaatctcaaacagagtgacctttcacttcaaagttcgaggcttgtgctgatttgccaatagaaatatcagttccaagtggatatcaggctcgtgggcaacatcattcttgtccacgcacataataagtagagttctccttgatgaccgaatttccatgattgttgttgaccagaaaaggggtcatggaagccgggcaactccaccaagcggcatcgacgcccagcaacggtggctggctgtaagtcgaaacttcccgtcatcctctccctgcatatgaccgcttgccccaaattccacgcattctaaatgcccgtacctatgcatcggtgctaaccccaaactgagccctgggcgggttccaagacggtaagagatgcactccatcgagagatcatacgacaaaagtcctccagatcgggcattccaagacttcgaagccaaattgggatagaacccgctgccccaagaaagggggtcaacagccttgtttatatttccaaaccgctccttcagactcctgcattgaaccaggcgtctggctctatgtactcgaggtacttgacgccacgagcccaactacatcgacctttcaaccgctttctctcccttgaacaggcgctcaaacgtgctctctcaacggcctacaagcacattaccttagtccaaaccaaggtgcgttttccaacaaggcgggtatgcacgccgttgtggtgtctcaagccccctaaggctcgcctcccatcgtgactgggcagcccagtcaaagccccaaaacttgacaactgactagttaagggggtggctttccatctgtcatctctatccgcgcgcgcccgatgacccggccgcacgcccgcggaccaaggcttctcccaaccaaccagttgggcaggacgtttaacgccgcgaaaggtcgggtggaaggagtgcccctggctgccagttatgaagaggaaacaacacgaaatggaaatcgcgtccccttgcatatcgggcgcgagatttgcacacatagcaacaaaagcaagacagcagtgaaattttgacgccttctttttgcctgccaccaacctaggtactgaacagacgggaccgagaagtcactgcgagtatcaacaccgaactgctccaagtaccggtcaagcctagaattgtgaccaccatccaatgtgatgtgaccggcagttcatcatgtcatgtcctcaatgatgtgaatgatccacgatgcaaaaaatgtgacaaccacacaggaagccttacaaccaaccctacccggtaactccccctcccgaaccaaaaaaaaccaaggcctagattaaatagacatcgacatcatctcgtcgatcatgtttccaactgctcctctcctccttcaacaagggttacaacgtcgcactcaaaagcaagccactcattgccggctccccccgcgatcccttccgtcctctgtgccacacacctacccacccacccgcgatatatgagaaatccagaccctttcttcaatcttggtcaactgatagacaaagccgagaaggtagacgaaatggaatttttgatcgccgaccactgcagttgcaaatctttgcattttttccccctcatcgacaaggcgggcggtttgcagcatgcgttaccacccacacaccaccaccaccaccaccacatttccattttccattcttcccctcccacttcccttgtccccctcttctcctctctactcagatccttgaggaagtagataggcagagtaggattcagatcaagacaaggcaaccaaatcgtgcccatcttttcaccacggagtttaccgcctcttcctcgaggtagtgtaggtaggcacctgtatcccatcctgtctagccttcccaaccacacgccgagaaaagcgatcaaaaagcaaaatgaaacaaaaagtggcgttttttagacgccctacctcccacgtcaaaaacaggggtcgccagtacgaaggatctcatcggattggtctgttgcttcacccaccctcaaaagtaccgtcaccaaaatctagaccttctttcctacatctgcccgcgcattgggacgattcctgtctcgtcttagcggagaggcggtgatggcatgatttattaagtccccaaagtgccgggtcggccggctaatggtttcttgttcgggaaacatggggagatggtggttaaaggtgagcagtcaaagttggcaagggatgggaggaacaaacaaacggtgagagagacatttctccatatgtacccctatttttcacgatgagacggaaacatctccggatacctacccaacgagatgttgagaacagacgggtctgtgagtacatgatgtacaatgccctatcccaattccaaacacatggcttttcactcctgccttgcatagcatagaatcggcagtggacatcagtagtctcaaaactttgttcatctcttctagccttattacctccaacgcccaaaaccgatgatgcacgttctggagaaagtgatgaggctcgaccaccaccaccgccatccctactagcaaaccacggtgccacgttgtccgttgtccccccgccatcaaagcgttccctagatagccttgtggggtttggttggggttgttcgcaagatatcaaatcacggcaaagttttcaaaattctctctgcaccccatgttgcgaaaatgctagctcgcgcaaccgataaaactcaccccattttcttccattcgtggcccgtcccacttcccattcgggaaactcggccgggtttgttgcaagctgatgagcatgcggctagcaaatggttgggttagttttgcgtgagcggttggtgggagagtaacctcaccagaggtaactgccgggggattgacaagtacctctcctaagtaaggtaactaggacgccatcgaatcgcaaattccaatctgtcgggtggtgcagagaaacaagggttgattagaaaagagaagaaaaaacaaaatgccatgccgtgatgctgctgcagcggcggcggcggggtctaatccaaaggtccagattcccggaatttgttgcttgtcaccaccttgttgaccttcaacaaagctgcaggcgagagatctctggacgcctctatctgtccccctccctccctcgcctaaaatgtctcgagttttgttttctgccggtaaggcaaggaccctgaaaaaaagccacagacaaacagagagagataatcagatgattaatagcatctcggaggtcttgcccgtctggaaattcaagtcatgtccggcatcatatagtgttacaaaactgacatgaatatcaataatccataatatgcaacaacaactgtaagacaccgtcgtcccggtgcagttgagttgcaagcagcaacccggaacattcccactttcagccctccccccccggtgttgttgtgcaagtcaaagaaagagagagaaatggttcatgtcagtacccgcgtcaaattgattttgtttcccgtaatcctggttcccttgggaggaactgcaaccgtctcgtcaaatcgtgaaaatcataccaactcatcatatttccccccccaagtcattcctgcttttatttttggcctctcccaatggtgtgtgtgcgtcgcgcggcactgaaaggaagatcccgaaccactctcccgggacacacaacgcaaaacaaaaaacaaaaagcctctcccttcttttcccccctgccctcatcttgtctgttctcttgtcacctgcctaatcgggacaaatcagggacccaaggaccatggtgatggcgcctcaagcgcgcgcgcgccgccggggtagggaaaagccagatctttggttccgatccccccacccaaaacaccacccccaagattgtgttttgttgtgaggtgaagcatgacgaaaccccccgctcccatgggaggagcgaaatgaaatgctacctcatcttcaacgacgacaacaacaaggcaagaatgatgggggttatttctgcgcgcgcacatactgcgcgtggaatccagggtcctgtcatcagtgctgtgtgtgggaatcgatcaagtccgcatgtccgcgatcccaatataggtatctttgttgttgtaaccatggatataggttcgtcagtcaatcgtgtgatatccccccccctccccccccgtccctctccgtccctctccgtacctcaacacccaaacaccaggataatcccatcttctgctcatattaattggcttgggtcccgagaacaagtcaaatcccaattaactgatgagcccccagtctgtatctcaatcgcggctctccacagagatgacatcgtggcatcttggcactgtttccaggcctcctgccatcatccagttattccttctcttgggcccgcttgtttttaccgaagttttaatgtttttgtttttggcacactcacgttcatgcgttttccatcttgtcgttccaaaaccaaaatgcacggaactttgaaaagcgcggccccctggttcatcatgttatctggcccgagcccacaaagacacagaagcgtctgcaacctcgtcatcgaaaaactaataataacgtaccgagaaatgtgtgtgctgtgtgtgtgcagaatgtgcaagacatgatgtggcaagaaatacgaagcgaaaacttcctagacattcttcctcatggctggcaaaacaggccaagcaaggagggatgaatcgtcatgatccgcgcgggggaaaccaagaggaggtgtggtgttgagagcccgcggtctggaacacctctcgcaaaacttcgcttgataatatcacccagtgagtgcccaccttcagcaccaccctttcccttcgctcgcttgttgagggaaatatcaaggccacccatccatccatctgtcaagggtgggcgagcgaggaaagtggtcccgtgttgcaaccaaggcggcgctgcttgtgccaccgctgtgagaactgggcgagtagtgaggtcctgcccgcaagcactgtactgtactatatatcaaccgcatgttatgatctgcaggacagcgatgcccacgcccatgtcgaggtcgatgggggtatgggtggtgccgcccaataccacctcctgatggaaaatgcgtgtgacacttcgagtgagatatccatgggaagcgactcgtcaatcaatcacggacgggaggggggagagtctcatcgcatttctccaaactcgtatcttccattcaccttgttcgctggctgccagatagcaagtgtggtgcgcgcccctgttcaagaacgccgccgggcccgagcctcaacccttttcccccgctatcatcggctagttcctgaacttcctctgaggggacgatgggcccagaaccctagtgggcgatgatggtgagtgatggctgctgttgataggctgcgtcgagataagcataccggaaacttggcgttccggggcaaggtccagcgaatatgaccccccgtccctgtctagctcgactagttcaccacatttccctttttgaacgaggcgctagatcgacaagcgggatggcgccttcaggcgtctcttggggcccatcacggacctcatctcgtccaaagacacccagaagcatgtcgtcgtcgcaggaaaaaccagtcaccatcgtggacacaacatctgctaggaactccatggtctgtaaaatgctgtgttcccgtgaaaccaaatctcgctcgtccataatagtgtgaaatcgtatagtgtcttgaccttggaattaattgacggacccttgcatcttgtcgccaaatttaggaccacagttacatcggacagcagaccttcactgccccaaccttgtccaccaccgtcaccgtgcgggccgctgtttaaactccgaccaaggtgtgagcatcatcatgaccacccaccttctttcctgcggtgcgggggtattggggtagcggccgtcaggtggcacgacatgtttgaacacttggccgcttgacatgcccggtttctcgttacctcgcagcgttccagcgatgcgggcatgcgtcaaaggctctgcatcggaaaaaggcctttcttcaagtgctttcagtcgagtgtcatgcaaaccgcaccaccccgagcctcgcagtctcggttgaatgcggcaaccaatgtctattgtctttgatggccatttccaaccctcgattggctcccaccaccctcggtgtgcccgccgtgtggtcgtagtaggtgagtcgaaatattgattttgacggcgggttctggaaattgatattagtgacgggaggtcctcttggcggggtttaacgtgcgtgcagcaagacggcgcctgcgacggtctgtctttgcgcctgtgagaacgccgctaccctacgccatcccatagccatatgccggactgttgaccgatgtggcgctttgcttgccacaggatgaagccactgtgactgtcctctgaactttgctggacagcgtttgaccagcgaatgggaaaccatcggggaaagacatgatatgttttcctgttctctcctggacgccgatggtcggtgattggtcacacatgtcaccagttctgaccgtggaatatgaggtcggggtgatattacccaacttatcaggcctcatgcgaacggaacttgccggctaggaaggtcacggtcctctctttcggacactgtgttgcagcatggcggatcttggtaaatgagggttcaacctcagatgtatcttgagacgtggctcgcgtcctacagacgacaagtgtcgcaggagatttgactctgatttatcatgttgttagtggagggagacataggaactttgctaaactatgtctgagtagttgctgtctggacactgaaattgtcctgtcgaaagtgttcatgcagtccaagcggttgaggaaacacaaacttactagtctgtatttggactagcccgataatgagctcgtttacattttctacttttgttttatgctggtcggtcactgccgcgatctcacagggctcgtctggaaagtttggagatctgcagctaagtggacaggggccaacacaaaagatctctctttgggacttcgttgttgtgtatcaaggagctttcaagcggggttgttgagacgttgaccgtaataactcgaagactaccggaacgaagcccgagcttgactcttgaccgaagactggacaagatggacggtgcctgcaagctgtctgtcatgacgtgaggtagtctgctcgcttcgtgtgcactgacgaatgagcactgactgatgagcactgacgaatgagcgctgatcggtggttgcttggaatggccggtctgtctttctggacaccggcggtgggttgccggagtctggtgggatgaagcggccggagtcggtccgttgtcagccgggccggcgagggttttgtccttgttctcggatccggtccgggatggacaaccatctcaacgccaccatgcattccactgcaggtgcaattctgctctcgaaatttggggagcgaattgctcttttcgttcagtcttggtccatacccagttggtcgagatggcgtaaatgattgggggctgtcctctgctgtcaccatcttggaggggcacgagggggtgacggtttgtggttgatgtgtgtcccagtcaagtggggtggtcggcagagggccaggctgtgggcgctgtctgggcgatctccgcatggcttgatttgactggagatgcacaccgctcggggaggccgccttggcaggacccagagaggaaaacgcggcgtgcacgggccaaatggttttctccgcttgcttcgtgtccgaaggtcggcatcgcgaacatgttgtcgtcgccggcgttatgatgggatgggttacgactgcttgagagatggagaatatcaacagtctgccttgccagtgatctttcttgcagcgggaagctcccgaaaccgtcctcagagccttgcagaggtcaacatgaaactgcccagcaggcctgtcgcactggttgcccaaaatggcttcgagatgtcattagatcagtgttcgaacgagagtggatgaaagggtgagagggtgctgccgcgggtaggggtgcgttgcgttgcgatgatgcgctggggaatcaacacaaaactcttcagccagggttcctgacgacattgagaacatggatgcagctgtggagattgacgtgcgaagtacctcagggcttggtcgaagtaccagtggaaccagggcagtgtattacataaggtaaggtgtgagttggcgggttctcttctgaaaaccgcgcacagcaaatcgactggtggtccactcgcagcatcactgggctcagccctatcactgttcccagatcgagaaaagatgttgcaagatttcagccacgcatcggtttctatgtaaggtatgttggcaccgacctttcgaacacgtcgatatcagtcttcacctgcgcgttggaagctctacatttccaacttggattaacaaggtgagcagctcaagcctatcgccacgtttccgagcaggatggatgttcccccgtcagtttggcgctagacaggcatcattgccgactgcccgggggatgagcacattaaaatctgatgaacgactgctctgaccgctccctgacatggactattatcactattattcgtacccacctgttgaaaacttaagtcgagggatgttcaaaggtaacaaatctctcattatcaacaaaagtcgttggtgagaatcctgcggcgtaggactcttgtctcttcgggtgaattcatccgaatcttactgtcgtatggctacgtgcccggcctgctgtgccaacaagaggcatcatgcacccccatgttgcactccagatggacttgattgtagaatcaagaaatctttattcagcgaaacttcgagggtactcgcggctctgctgcagtgcgtttggctgctcttgagctggtcgcttgttggccgacatcaaactgctccaggcctgatgtgtcgagacccaagggacgagaaacgagaaaaagaaaacaagccactcccctatttcctacagatcgtggacattcgttgggtccaatcagattgcaggattacattggcattaacatgcaccactgcatggcatggaccctgtgtgccgcactcagtgacgggacttgtttggcaccaccgcaaccaccaaccaagcatcaagtcatggactgccagaggtcttgaatcatcgtcgagatgtctgacctctctgccaggaaccaacgtcagcctctgcgtgtccaaagccgtagtgcggcagggactcgggctcactgccggcgggggtggcggagcgaagcatggttcgctaacagccgtttgactgaaatagaccaacaagtctgggcacggcatggcactggataatggcatgaagtgagtggtgatgcttctgccagtgtttcggatggaagagaagattggaaagatacgaactgaatagggcctgagacgagcatgtggtagagcctcgactgtgccatcgcgaggcctcgaatacatgagagcatgtcggcttcgcatcgctcattggccgagtccatccacacaaaacgttggagcgtagacgcactccgaagggctgcttgcttcgacccaagcctgtgactgaaccccacgattgggacctggtggtggctctcacgcgaggtggcgccaaagcttggcaggaagttgtacacttgcagtcaggttatctgatctcaccacgcttcgataggagctgcacctgtactcgtatccgtgatagctatggtggatgaacggattttctttcagacaccgaaccagcaaaacacagtagactatgcccgagagcaccaccgactagagccaggcaatccgagcctgcgggtgcttgcatacacgtaggcagacgactttgacaatggagtccgctacttactgccttgcctcaggaaatggaatttatgaactagtactgtcgcagtcggtaacgttagcaggagatgttgcctcgaacaaatccacactgtcggtatctatctagaaacatagacagaacgacacaccgggcgcgatgaggtccttcctacatggatcgcttggaatgaaattgaatcgtatgtagaatatctgtacgtcgaccggtgtcacagcattgtctctgctttgactggtcccgactccaagggtagcaccgcccccgaagccgtgtctttttttggattttacctttttgaagctcccccacagttccgggagagacacaggtcccgccccgcccgtagccgtaaagaagccaataagccacggaatggtggatcatggcgactcagccacgccaagacctctttgggcatcattggaactttgaggtttctccaacaatttgatctcttttgcaggactggcacttcaacgtcgacgtctgcaatagtaccaacaaccgggaatcacccggcagcattcaagtggatatgaaggttgatgggaatgtgacaggaatatagctaatgagcatgtgtttactacgtagcacatgccatctccaaataagcagggcgaaacatcagggtcctatgcacttctcacattgacaaccgactctcttgccctgcgtcggctcctcgatccacaacagcttccggtacattctttatcagagacactgtgccgctttccgctggccccgaatggtcctgatgtctgaggcccttcgttcgtcccgacttgcatcatagagtgccgtgttacttggctttgcaccgattgtgatggtccaccagaaggagatccagtgggtcgccccggatcaccggttgtgcaactcgatccagagatacatacagattatcaatttcgcgctcccgcatcgtgcatcgcttcatcaacggccactgctgtcgctgttgacgttggaaaagcgaatgtgatcttggcaccgatatgtcatctttgataccacattacacttttacgctaaaaagcttggcttaaacaaacatggcgggtgatgctgatcaaacagtgtcaattggtcgcccccagtccacagtaccaaactacagaatcttgctctgttctgttcccgagcctgtatttctagtgttcctcgccgggcattctccgatcaaacgaaacacagaaaaatgcattagagaagaacagcaacacgtgttcggcaagacagacaggcacggacaaattatccactggatgggatacggagatggaaaatgatgggttccgcagccggcaacatgggtgctcgtgctgctgccattttaaccaagccgtcgcacccgcattatccgaactctcatttgtttttggtggaccatctgatttcttgcgggttgagaccaagaccgtgacatctccgcgccggcgccggatctatgtacgagcccgcaggtttttccctgatacttacgtcgttcaccttgaccaccctcggccgaacgaacacgagcctcggatgggttcgacctctcatttttctcgccctgacgggacatgcaacatgcttgcatcatacaacacaacttcgggcttcacccacgggaactgttcatggtagctatatgtcataaggtagcatctttccaaagttccggcttcggtttgacaggcggccaacaggtggaagaaaaggacaagaaaaaaggatgacatggcacgaaacaacaacaacaacaacgcgagggcaccggaacacatgccgattccctgcaggacaagatctttctagtaataactagtagaactgtttactgttggcttcaacggtccccagttggaaaaggcccaagtcaagtcatgagatgccaagagccactgtgcacacccacgcaggacatcacatacgtcaagccacgatttgctgcacaaaaagttgtacactctcctcccctcctttttggcaggacagctctgcctaatgcgggtgcagataaggctgtgcactttatttcgagcgtgcacagcacattgcacatcacacccgtctgagcttcccattggctgctcagggcggtcaagccactatgtacatgttcgaagggcagcttaatcatcggacggccggaggggtaagaatgcgcagcagctacccgcaccgcagcacagcacagcacaaagagggatggagtaaaaatatcttttttcttcttctcttgctgtatggattcgaagcagttgacgtcttttctacatgctgcgatataccgggacctgcggcacggccagagcctccacaatatcacggcacttgtggtgataacctctcgtgggtcagatcgcgaatcgtgatcgcagccaaaggtccacttcggagccaccagaattctgcaataccggtgatggcgtttttcgctctctgccggttgccccgtggccggcggtcggtcatctcttggccggctttgcagtggagaaattgatcagaggtgatgcttgcaaagaagggtctcgccccctcgacgtcgactgcgaggaggggtggtgggtgaggagtctgtttctggtgaggggagtgaggggaaaagcatgctttagtctcccaaaacggcgtatgggccgtgagacaagtctttgaagggcttgcccgttgtacaacagccacagggacagcaacagatgatcatcaacctcatgatgagggaaacaggcggttggcgtcagttgctgcggtcatcccggccgcctactatagttacctgtccctcatcaggggaaaagaagcaagtcctcagtgataagagggaagacatcgaaacaccatcctgtctcgcttccgacactgatgccccttgcgccgacagcagaatctatgatagcaacaaaggagaagggcacaaatagcaggtagccagcgaatggcaatgtccgggctggttccagagtccagaacgtgggggacagagtacccgatcaggacgaggagcagaaacagtttcagtgatgaagagcgggaaggagatggccgaccatggtcgcggctggtccattcttcgggacccagaggcgtggacgggatttcatctctcttctgtctgtcttgcattcttcctgatcctcctctgtcttgttgatccggggacttctgactgacttccatctgggggagaaacagaaagggaaaagtaaactgcaactgcaagcacgcaccaagcctcgaggtctccgccgacactcgctaacccctgtctttgtcggtggccaaccagaggttcggaactgaccaggactggagggaacccatcccccgccctcccttgtatcttgtaccttttgtactccttcatgtacccagcctcatgtcaccatcccaatcccaatgtacctccgtcccagaagtgaagtcgctgggcccctgccccatgcccccctgcccctgtcaaccctccccttgttcccctgcaaattcgtgaactgaccacagcctctctgactgggcactggggccctactgggagatcgatgcctccaccacctctgggcctgcaagatgtgaatgggggggtatttagaatcctcatccccccgcccaaacctttccactggcgcacctcatcccgtgtcaaacaccaaatccatatccccggatccaaacaagtccaccgcctcgggccgtctccgacaaggacttacacactcgttccactgcggctttggtgtataataacaatagcttggaaagaacagcagaacagcagagtttttggaaagagagaagatcaacacaacccgatcagcaacaacacggcacagtcccacacctgagcaggcacaactgaggtccgtctcttaaagcccacgcgctgccacgaggcagctggactgacgccatttgtctctctctagctcagcatcttcttccttcacaggcatcaaatggcggcaactggccaccacgaggccgacgactacaacatgagctacccagaaccccctcacttctcatccgcgcccatggacctgggactttccccagagccctacagcgcctactccaggtcatcacacgagttcccgacgacaattggctatgagcacggagccatctacaccgccgacacaccatacctctacagccataacggtaaccacgagaggtcatcacctggcatgtacccagacgacagcgatctgagaggaccagcttcggatctgagcatcgccagcgcctcatcctccaacgcgggctccccaaattcgagtcacggccaaatggcgccgatccctgagtgggccacgggcccccacggacttggggttaccccgggcatcgtcgacgcaagcgactttcacctccccggcagcgaatattcatacgcgcccggtgtctatggtgatgagtacagcacagctttcgagtatcccagcgggaaaacaccaggctttgttggtgagttatcacagatccctaggtcatcttcttgtctttcttctcgccgggactggagtccgcgacaccagacccatggttcgtgtgcctccatctcctcttcggattcctgcgattctggatctaccattgtcgctcccaaggtcccgggagcggcttcttcctgtctcgctgtcgatacgcgtctggcccagtctgtggtgactacatcgtcaaccttcaatgtcacaccttccttttcagctgcttctgcttcttcttgtccttcctcggcggcctccgggctcgtctttgcgtctcctgcttcttctacatcttcattctcttctcctcaacttccagcatggagcagtccccctctgggggacagccctgcggctcgtcccaagacgcccaccaatcgtctcctttcatctcctttttttgcccaatccagcgggcatttcgttcctcctcttcagaattcctgttggtttcctctgtcgcaaacgcagatcttgacccttggcggccttgctaacccgaagcgtttgcccgttgcagatcccatcttgattcacccagacgcgagaccaatgaccatgtctggctttgagcagcagccatattcggcccagcccaactccgcatatcctgcctctcctgctctgtctgcctccccacaactgcgaaacggcagcacttcgcccttcatgcacaacaactaccagtactcgccatacccgccaccagtggaggcccaaaggagaccaagccttgtttctttccactccaactactcgggcgagcagcaatacagcggcgatgagttcaaggagaagcagaggtgcccacatcccgagtgcggcaaggtgttcaaggacctcaaggcgcacatgctcactcaccaagaggagcgccccgagaagtgccccatcacaacatgcgagtatcacgtgaaggggtttgcgagaaagtgagttgtcttttgacttggaatcagttgcgggatactaacaagtggtctcatcagatacgacaagaacagacatacccttacacattacaagggcaccatggtctgcggtttctgcccggggtctggctccgcggccgagaagtcgttcaaccgtgccgatgtgttcaagcgccacttgactgctgtgcacggtgtcgagcaaacaccgcccaacagccggaagaaggctgccgctggaaacaacgggaccaagaagttgactggctacgcccctgatgcgactggcaagtgctccacttgctcgtcaaccttcagcaacgcccaggacttctacgagcatcttgacgactgtgtgctccgcattgtccagcaagaggacccagcagaggccatcaacgcccagcggttggccgaggtggaaaacgatcgcgatgtacacaacaccctggagaagaacaacctcccaacaaccaccatgacacttcaagatggcgaggacgaggatgagaacatggatgacggcgatgaagatgagctcagggctcgcggcctcaagggctcgcccaccaagaggaagggtggaaacccacaaaacggcgtgcaaaagtcccgcgggcttacacactcgcgcggcggtgtcacgctccccaccaagacccggggtcgcaagaacaggcgcgactatccttcctcatggggcttcgacaagggtcagatgacaatgaagaagcgcgtcatggcggtattcgacggcccccgccgcctggccaaggatgacatgatgctctcgaccgagcaagaagtccgcatcaagctctccgacggcaagtcctacgtcaccgacctcgacatgcaaacgctcaagcgtgccgacggcttcctcaacgcgaccgaggaggagaagggtccctgggtctcggacgacccgaccgaggagcagctcaagcagatgcttacctacaccgccccggaaccaacaaccaccgctgctgctgccgccgctcagtaaataccatgactgtttcactcactcttctttcacttgaggtttatactgcaacaactaccaaactaatcatcaccatcatacatcgtcacatttactttttgggcttgttggttatagagggggtatattacctctggggatctacaaagagtttgtaaaaatacacgcggcgttttttctaggggggctggttttatatcccatgggattgattggatttggctgggaacattatggcattcatggggccttttttttcttcttttcttttctactctgtgacattattttttctttttctttgttttttttatgctgtcgccctggaaatttgggagaataaggaatgggagggccttaatgactgcaatgaaataccaaatgggggtttttttgggaggggggggggggagaaggggaagggaatggggctataaggaactcaaaaaaattattcttattattactacgagaccaaagtaagagtgggaagaagaggaagggggagcaaacactacctacccagggacttggggaaattttcttagctcttgtttagtattactactacaacaacaacgatacccatattgttctcaacaccttttcttgcgatttgctatttgatgtttgtgtgcagaggaacaaagttggttgcttatatagtagttattggtatggtttattatttactaatgggctcgccgtcgctcttgttaagttgtgggatatggaagagtggtttgtctgagttttttctttctttaatccttttttttttttgtttttttgcgccatttaataatggcaataatgatgagatattgattgtgattcgtgacattggtgacacaatctcccaacggtattggcatatgatctacaaaaaaaggtttaggtttctgggtcactcacccacctagttttgtgtgtgtgtttttacctttctcatcctttctgggtgtgattcattatctatccattattgttttgtgtgggtttttgtagcaggtttgggggaaggggggaaccgattcgctatgttgaaaatgggaccaccacaacctctccacccgcccagtcctgacgcagagcaccaccgccgcgtttctttttgcggctggagatgtccctggcgcagcaggttgttgaaaagacggcgttttggaagcatgactggggtagaacagggaggatgtcggtttatgggactggtaactccccttgagctcacttttatttggtatttgggatgtcaaggagaggttggaagggacgtatgtgaagggactggtgaggaactgagcggtttggcctgttttgcagatggtcaactttcggtttgtgagggcggaaaaaagggtggtggttgagaatggggggttggtggggtggtgttgttttttgagttggttgaatacccatggtgctggggaggaggcgaaatcatttgggggtgatgggttagcatggtgttggacctgtgagttggattggaactggcatgaaacacttcacaccggaatttcacaaagaaagtagcaaaaaagcaaagacgtagagaaaagcagatcatgctaaatcacactgcttgttttattgatataaagtgtgaagctctactttgaaactgttgctatgtagtgtgatttgtgcactaaaacacttatcaaatttcatcgtgtcaccgataagctctatgcgattgcacgcgggtttcgacggctcacggctcgcgccgacactggggttggctgtccacccaaaacaagaaaaatacctcgaatgcatagaaacagtgttctgtagccgttttttttgggcttccaacggacgttccggctggttgtgagtgtctgagcaagctacccctccattgactggcgacgacagcgaccccacgtccaaaaactcgcgataaacagataagctaaggtagttagttggcctgagtgggcttctgggagcttcctttggtggggtgatcaacaccaagagttgatatcatcactgattgtgagcttcacttgcagagtctcacaactccatctcactcacctcatttcccaagaaacactcaccattctcacccctcctctcacctctcaatctcacctcccaacatccaaagtaataaaaaaaatggccctcacctcccgcctcgccctcaccggccccgacaccaccgacccagaagactacctctcctcctccctaggcatcatcttccccgacgacgtaaccaaccaacacggcgacgccgaccacggcctcctctacacctccccccacctcccgcaacccctgcaattctcgctcgccaacgtcaccgaggaaaaagagcgccacctcttttcccattacctctggaattcatccctcatgctcgctgaactcatcgaagccggcactctggggctggacatcccctggtcaggcctcggtggcgagatcaaagattttgatgtcacgggcctggaaacggtggaattaggggcggggacggcactgccaagtataatggggggtttgatggggagcaagagggtggtggtgactgattatcctgctccagaggtgatcaagacactcaaggagaatgtgctgaggggagtggaaaaaaagaatggggttgatgggaggtatcgtcttgaagaggtggtcgttgagggacatgggtggggggaattggagacgccattggcggagggaaataaacaccagtttgatagggtgtttgtggcggattgtctttggatgccgtggcagcatgtgaatttgaggaggtcggttgggtggtttttgagggaggatgaggatgctagggcgtgggttgtggcgggtttccatacgggaagggaaaagatgagagggttttttgacaaggagaaattggctgaggtagggttggaggtggagaggttgtgggagagggattgtgatgggggtgagagggagtgggtttgggatcggggggtggaggatattagtgttaggaagaggtggttggcggttggggtgttgaggaggatacggaagagcgagtgaagggtcgtcggggtcgtcgagttcgaggcgatcggtaggtgaggtgggatgccggccataacttcatatccagctggtcgagtctttgatttcccccattcctgttattcctggctcttttatgcggtccttcctgggtcttccatctttgtcgtgccccatctgactctcatagcctcttctcatgatcctcgctctttctcttgtcgtccatcctacttttctcatgtcatcccatccttcagcccaagtcgtcccgaatgcagtaaggcgtatctcaaatttccatatcgggcgatcccagttgtccagctcgtccacaatccaaacaccaccaatctccgatgttgacataaatttcccaacccccaagcataaccaaatctcagagaaaaaagggaacgggcaccagcgttcttatagacagccctcccctctccccccagaatcagcgcggaattcatccgctcctcaagttttcagctccccaagccaagaccactgacgaagcagtggcgcgagtgagatcctgggggtaaaagttcagctcggccaaacaaacccagcgtgattgggccaaccgtcgtattcgtggcgcccgccagccagttgaataaaacttcttgacgacggcgagccaactgtcacttcctgctgacggggctgtttgcaaaagcattgagtgtaagctgaaagatgccgaaggccgagtatatatgttggcggtgaaaagatgggagcggaatacaagccgggaaagcacacaagttgcagatagtttgtaatggtatgcaaaggtgaaatgaaaggcaagaggtctcgagtcaaaaagacccagaggccgaggccgggtcctgctttaatcccccttcttggcttggacaaacggctccactatatgacggacaagatacccaagttggtgagaacgagcaacgcgaaggaaggctattacataaaataccggttatgattttttcctcgaatgccagtcatctcaacttctcgagaaattcatgaagatttgtgcttttgtggaatgcattccgcatcacgaaccagctgaatgtgattgcatggttcttcacttctaggtaccaaactgggctcttggcgaccctgcttggcgaccctgatcgtcttgacggatctggacgatcttgaagctaagaaaataagggttactttggaaatgcttcattttcgtgggattggataagagggagggtcttgttggattgaggctacaaatcagcaggctcaaccctccatccaaaacccgcggggacgtcgctgtccagcatcctcatcccggacgctacacagatgtccatgacgacgctgcggacagcgttttaccccatcgaccgtggcaccgccattgagagctcctctgagatggccttttagctgaggattgacccgtgaactcatcagctttgattggggccagcgagacacagcatcaacctcacatcttgtgatatcaacccggcaatcatgacataggaagtctcgacggcgccgaggacattgctgttgctgagaatgtaaccatataccaggcgagcgacgaggccgaggtcttcggttcctgatcggtccatttgacccatgactctcttggttattttaccgtagatgccctcgaagaattcttgtccgcgtctagaatctgggatactggggtgtcgtgaatatcagatggtcttccttcggcgagggtccttgcggctcgtcgagaaggtcatctggtgttactttcttgacctctagaagggcgttgatggtctggtgaatcatgagcgttgccacagatctaatttaccttagacttggaggatacctttgggatacctgtgacggcggcagttttgatcaaggcctcacacattcatcgtgagatgtctcgtttctcatcgaaacttggcagagtgtcttcgccacttggccatttttgactcaacgtatgcaaggacgctttctggatttcatccggccgattgagttgtgaaagtgttgtaaccgcaatgaagtaccaggtattagctggaagatttgggcgacttcgaattgctgcgagcaaggccggagtgatgatggaggggagagttgcttatggtttggcgttgaacttgtaaatgaaaaatgaattgatgtgattggaccgagccccctttttcttcagctcttcagcaaacagctgcaccgccactcattcgatggaatgcaagtcgggtgtggctggtggcttggcagcgtcactgtcacaggtggtggtgtcgttcggctcgggcatctgatcctggctctttccataacgtggccaattgattaccataatctcaagagctctccaactgcggcggcacctccatcttgcgcaaacaaccatggcgacttgactcttgccgccatcttcgttaacaatcaccacttaatcgaacagacatctcccgctttctgcgctcttgttgcaaaataaacccaacaagatgcggctccagtggtacgcaacggtaggttgaacctccagctccacgacgggttaaggagctctcgtgaactgtgcatatcatcaacatactgactgatgctgccaactacaggcctccatggcctctgcagccgccgtggtcgcatccgctttctatcaacgtgccaatttctactcggccatggtccatcttgcgcaaagtagcatgtctctcctggtacgtccctcttgtgcccacttacacgccttggggctcgtctgacagcaggccatttaggttctcgcaaatctggtgtttgttgtctatggatctcttgtgtatggcttccaacgcctctgcttcggccccctgcgaccgaccgaaatcgaacaactctacgaacggggctggttcgccgtcaccgaaacctgccttgccatgaccatattccgggacgaactcggcccctcctttgtgatcatgtttaccgcgctcatcactggaaaggtgtggggttggatcagtgaaggtcgcgtcgaagtgctggagcaacaaccccctgcgaacccccgactgttccataccagactcagcgtctctctgctggtcagtattctttacgacgtcttcttgctcagctatgccgccactaccgtctggcaacaagcccgccgtaccgtcatggtcatgttcctattcgagtttgccgtcctcacggtctgctccctgcacacgactggtcggtatatcctctcgctggtggagcaacaggtcaacaggatccaatcacaacaacgcttggaagaacgccgtcgccaggttcgagagcagagggccgaaattctgaggcggagagctgagggtaccgctgaggatgatgacgaggaactgcccaacgaggaagatgtcgacgagatggacattgaagtgccaggttgggaatccaaggggcactggattttgtccctggatctttttgcaggtcagtgcttacgacagctgccaaatgctctgctcaaccgctaacagtttacagactttgtcaagcttactctgtataccgtcttcttctgcgctcttgtcatctttttcaacttccccatacatatcgtcagagactggttcatgaccgcgaggtcgttcctaaagcgtctacgagccctcctccgctatcgacaagcgctcaaacacatggaccagtaccccgatgctacagtggaggatcttggcagagatgaaacctgcatcatctgcagagaagaaatgcgcccttgggatcccaacgataccaaccagatcgagagaacgcgcgccaagaaacttccatgtggccatatcctgcatttcggttgcctcaagagttggttggagcgtcaacaagtatgcccaacctgccgtcgtcctgtcgcacgcgaaggtcaacaacctgcgaggaacggggatgccgtggtgttcaggttggggctcggtttgcctcctggcccaaatcagccggcgcaagcacagtttccaccaaatggtcagcctcctgcaggtcaaccaccacaagggggagcggcgggacttcaggggaacaacaggaatcgcaacgtccggatgtttaactttgggcctctcagacttgggtttgcccagggtggcgttgaggagatcagagagatggctcagagaatgggtatgccgccagatgctgctcaccctgcgcctcccgcacccgcggctcctgcaccggctgacaatgccgctgtcaacgtcaatacacctggtgctgggctggatcaaatccgcggacagctcactgaccttagcacgcgaatccagcaagagatggccaacctgaaccatgccgcgcacgagttgtatcttctccagcacatggtcaacgaactgacacggttgcgccagacgcctacacaacaagctggtcagcgacaaggaatacctcttgttccaggtcaagttgttgtgcctcctcagcctgtggctaacatccagcatctagctcaggcacctgctcaggcagctgttcaaccaggagttcaaccggcaggccaacctgctacccagccacctgtcatgctgctaggccaaccttatattcagggacagcctcatcctgcgcttcatcatccaggggtattgcaagcgcaggtgcatgcatttctgccgagggcccagcctactattggtaggccgggtgctgaatcaggagcggctattcctgctggaagcccagatcttcccgagggtgtgacgattccggcgggctggtcacttgtccctcttcaaagggcggagaacggggtggtagaaccaagtccgctctggggccagctgcctgcgaacgctcttagggataggttgcagaaccttgctccagagaggccaagatcctccttgtccaggggcacgagtcctttaggccgagacacgacttcggtcgctgggtatgaggcggaatcatcgcaaacagctgaagcacgtggtgctgtgccatcagttgctgcctcaaatacacaacgaactgtgtctccatctcacacagcatcaacagccacttcagctgctccaaattggggtggtccggcgcagctcttcggcggtcgaactacctcccctccgcaaaccgaggctgaggcaggtaggagcagagcagcttcagaaagcaatgggtctgcctggccaagtgcacagaacggcagtaccaataatagcaagagcaccgcccggctggcttcggtggaggacgctgagaatgaggaggatgaatgaaaaaaaagacagccaggttaccagtacaggagatacatacatcatcacaggccttttgagggcagttacagcattttggggcgtttagcgggttggggattttctctacagacttggtcggtttctgtggacgtttcgatcccgtccacttgatactcagcgcaagagcgggcttagaaataccaaatgcatttccatctcagctgcttccttctccgttactcttgctctttcgactgtgtgcccgcaagaaagtaccaccctatcgacaagataaatggcactgtaagtcgacacatgttttattccgaaccatgcctcgagaaatgttaataaacctcaaacgatagttaatagatctgaaatgagggtcaatcggcctattttcttattaaaaaaaggaaggtgtaagttgccgttattttatccatggtgtgtgggtggtgctcacacaaggcaggcacatacgtgggtctggctgtttaagaaaccacatgccggttttttcttcttttggttttgtctcaagtttgcatcatccgacgacgatcgtctcgttatccagttgtttactctactttgtagtgctacctactatcattgcttatccttcaaggattttacatacacgcagctcagcaaccatcttttctgctccttcttctccaacacccatgggggaccattccgtgagtcctgaggagagcgccgagaacagcatacggcccgtcgatgatgatgttcagattttccggggtggttgtcccgatacaattgctgccaactgtgcattttcagacgacgacgaggagggcttttcttgcgatgaaacggcggacggatcacggaatctaccaaaaacacctgcggtcgagcaaagagaacagaaggagatggccggtttgaacaagacaccggccttaacgtcccagtttcagccagctcgagcagaccagggggcccttctcgcccacgacaggacgttggtgtacaatcctgccttgtatcatcaccagcccggccaagtgccaggataccatgctcctatgccaggatactgccctcgtattccaggataccgagcacctctgccacaactgtctatgccaggacactacgctcctatgccaggacactgccctcatatcctaggatattgccctcgtatgccaggataccgagcacctctgccacaagcacctatgccaggataccaagcaccttcgccacaagcacccatgccaggatactacgctcctatgtcaggatacagagcacctctgccaggataccaagcagctcagccagaagactaccgcgccgtgccggaccgggtgctgggcgagcaggctggtctgccaggaggagatggcaatcaaatggatgtcgctgccggcgcgactcggaataacgggtcagatgcgccggttcacggcttttagcaaatgccggggtatgttgctcctcgcaaccctcacggtcaaccgacgggtgggtttgagcccaactcgtcgtatccaaccccgccggttaccgccgcgggctcgcatcgatcccacaggtctgtcgattcgtttggcagctggagcggcgggctgtatacagcagaggaccatgaggagttttgttctgatgagtatttgactagggagtttgagatgaagggggtggaggaagggagcgatttgtattggaaaatgcggaaagacagggcgcaggaggctgttgatgtcatctgccgttcgattgagagagggaacaagttggcggctggggatccgacgcggacggcgcagcccatgacgacggagggggggctctctggcgaaagctctgtcgagggctctgtcgggactgagtctggaaggtcgtcggagtgtgatgtgaacatgaggggaggggatttcaagtatcgctacaaggatcttgtcggagacgggcggggtaaggagagggtatggaaatggagacgtcttcatgtggttgatacggaggaaggtgtggaggggcggactggcgggcgccttgatgcaagccatggtgaagcttcggtctcaaaacgcctatcagtctcggcggggaagggggttgtggaagaagaaggtttcgaggttatttctgccatgggttctgctgccacaaacgggcgagagagcaaaaagttttctcatcctcttttctttggcagcagtgaaaattatcaacaggggcaggatatagacctggccatcaccagctccaataaaggcaacaagagaaagcggttgaggagattttttgcaggttttcttccccggtcatcgacgaaatcttcctctgctggcgctcaaggcaatcggatatccgacatggagaacagaccggatgaatcacgccgccgactgtcatcaacatgtcctcctattccgccggctcgaggtagcagctcccgcgctgaggggagtaagacaagtgttttgtctcctggggataggagccccgccgacaatgaaaaccaggcacggtcatcgactgaagatgcctcccagactagctcatggtctgcagctggtggcgattccgacattgtcaaaaccaacacgaacaccagcgacaccagtgtggcggacacgagtgatgatgataataatactgccgagaccaacccagtcacagcgagtatggatgacgaccacatcaataccaccctagcccagacactagcttccagcatgaccattaccaaggacgaagccccgagcagcaacgaagcctcgaacagcaaccaaacagacaccactacagccgaacaagaacaatccgaagaagtcatcgactacgcctccatggtagccgaagcaggtgactacttttttgacccgttcggcaccgaaagcagagaaaaaggcaagggaatagacaggagcgttactcccccttacctctaccacgacatgtaccatctttgtcctcctctcgagatcccggagtgcccgtacccgccaccagataatgaggacgggacgccgtggtacgtaaggtccgagaaggatgaagaagagcgtcgagaactttggaataaccgcccgcagtgggcgagggatattgtggagcaggttagaagggagcgggaggaggcggataggtggagacacgagcagcgggttagggataggttgccgcctttggatttgagaggtccgccgcctgtgccggagaagaggaggcatagggttggtcagggtgctgctgcgatgagtagtgaggattgggggtttgctgggaggggtggggagggagttgggactagggggatgggggtgccggatatctttgggggtggcggcggtggtggtagtggtagtgataggagaaccaccacctttgttggaggagcaagcgggcgggataataggtcgctttcttatgcggaggttatgataaatgccaggagaaatgaggctgcgcaggcgggggctgctgctgctgttgctgcgatgcaggggaggaagaagaggaggttttcgttgacggcgttgccagagattccgagggggtttggaaggttgatgggacgggttattgggcataatgggggccatgagaacagcgaggtggtggaggagaaggaggaggaagagggggttgttgaggaagagggggttgttgaggaagaggaggatgtgggacggggtgagaggggagtgagggggagtgaggagagtgaggatgggattttcagtcggtctgtgaggccctgggtttaaagggggatgctggatcggtttttggatgatggtttttacaaaggtggggtgtcagattgtgaaggggatgttttgtgattgggtgagttttttatcgttcttttgttgtggtttatggacgagttatggttgaatacctaccatggttgtgtggatgggtaactctcagcgaaggacacgctttgcatgtatttgagaaattgttagccagaaggaatacagcggaatataatgtttaaaacgcctccatgattaccggagttatgatgccgatcagaatcatcgcctataatgtggatataaaaacaccgctttcaacctaaaaactattatacatcatcatccagggatactgcagactgtgtataacaatctctcaaagcggctgcaaatcctccctgcatatgggacaaaccagccgcttcctaaaccactgctccaagcactttgtgtgaaacatgtgccggcagggcgtgatcatgtacgacttcctctccagcatgtcagccatgctccacgacgggtccggcttgcccgtcatcacgaccggcaccagcatctcctccctgcagatggcgcagtccacattcctcagcgtcatgcccctctgcctcagctcctttgccctctccctcagctgccccctgtggtcgtggccgtggccttcggcggtcgacgacgacgacgacgacgacgaagcagactcgagaaattcaagaccgacgacaaccccgctctcgatgtcatcctgcctcaggatgcggtggtagtcccacacttctggcatccaacctctcggaaacgggatgcccagccggggctcccaaaagttttgcaggatcagcgtcaggagctgggcccacacccaggcgacgaggatggagaaggttgtgtaatcggtcgagacgaacaagaaatttttgtcgtagaggtaaaagtacgcaaacggggcgaggcggcagagggattggcctgtcagaaagttccaggagaagctgcggcggctgttgcggcgggcgtttcgccagatttgggggagccagagggagaagtagaggaaggagatggtgttgatgtagattgagcgggcgcgggggggccaggagagggagaggattgttaggaccatgatggcgaggatgaggaggaagaagtagaagattacgggggcgaattgggctgtttgggggcggttggttggtgtggttgtcgttgctggggctgtggtggtggtgcctaggcctgggacggcgcctgcgccggctgcgacgttttctgcaatctcggcgtcgatgtcttggtctgaagggataatgatcgggggagagggtgccctgggaggtccagctgttactggcgggggcagagtgcctgaggtctgtgggactgccggagcaggaggtggtgctggggcggtagtggttgtgttcgtagtacccgtgttggtggctggaggagtatcgcgagctctcctctctggttcactgccacggatgctggccaagagtccagctccgatagccgatgacatgaacgagacaaatgttaacagcaaggcagagtgaaacccgtcagatgcactgacagaccaagcagatgaagctgagaaaaccaggccatctgccagcaacatcattgacatgctccaaaagctcaaccgattgagcgtagagggcgtgggggattctttgatctgccctttcaagagtatgacttgtactgcgtatacaaacgcgaaaactagcagcgagtagttcacccgagaaagaagcacctcctccttgacaccaacaagatgctggccatctgcgggtgggaataagggaggtcccttagactcgagataatatgagcagtcaggcgaccaggcgacgagggacatttgcagctcaggtagcttcgtgtttcgagcgccagtaggatagcgaagctcccgctccagatcgtcgataatggaacgcgacgaatccatgaatcccttgtcatgtgtatagtgatggtccagggcatgcagttgcagatacaaaatgtattcacaacggggtagtgtgccaccaaagtccccttcaatgaccggattccatgggttggatatatctggaagcctgctacgttctctctctcgcagcgtttcatcgacagtgtggttcaacagacgttgactcgtctcgaaaaacttggcgtgaggcgtgaggtgaggcaagccaaagatgcccgcgaatttctcactagttgtagtcagaatcatcgacccttgcaatggccagtgaacaccgtaaagttgcataacgaaactggcagcagaggtctcttcatcctgaaaagttgccacagctgagatctccctcgcaacacccgccgtatggctctctttctcatcttttggagtctcccgatagcagctatctggtgtgtcatcctcctcaaggcgtaggacaacagtgccgtgagacccagtgacattccagccccagtcgacatcgtccaccatccaattgaccccaggagcaacggcagtgaggttgaagttatctctgtacttcgcagccgacccctgacgacggatccacttcccctggacagtgcccgtcgcattctgccatgtcctcttcgccgaaccatgagcccactcgtcccctccttcctgcggtgggtaggcatgtttgctccactgacgacaccgatccttgaaataatcaagatcctcccatgcgagaccgtcactttcccgaaacccggtgagattgagatacttgggctcttgccatggcggcgccccttccttgtgtgcgtggggagaaaagtcgccccagttggtgctgttgagaatgccgtgagcagccctctggcggccaagcctttctgaggcggtgagatatggtgttgatatcagtgctggtgcatcgctctcagagaagaatgtgagataaaagatgagcaccaagaggagcatctgcccccggtcactctgctgccgtcgctgttgttcatcctgttcttgttcaggcatcgtggcggagtcgcagcttgcttgccagcctagttgaagctactatggtggtgtaggaatcatatttcaatgtcgacgagctcccggtatgtaaagcctgagatttggatgatgcaccttgaggcgacgacttgtatgggtctcgtgatccttgctactgttgggcgatgtcgtaatcagtatgagagggtagagtcacgacgaatgtagttcttatctggaaggaaacaaacaaaactcgaattatcgtgagcaacttaagtctcgtcatgcaaagtgatgctttaatggacgatgatgtcttcgtaataatatcgtcgggtgaggcagctgctgcaagggtaccttcaagcttggcatcgaacagcgcgcggccctctgactaccacagtgtcgttactgggctgtgcaccgtgctatcaaatagtgccctgaaagccaaccccccacccgttgaaccagctgctcatgatcaaaaacacattgacagcaacctcttccgcactgtacaatcatccagaaactgcttcagtctccgcatacaaaagtaccggacaaaaataagtatggcttccaagaacgaatccaacgccaacaacacgagtccaacaaatgtaagttgcccccttcctgtgtgcaaagctactaaagctaaccatgaccccttaggcctctggcgacaacgcccatgctgagctcacggtccaactcgaagaccttctgaacaccctctcgaacaaatttgctggcgtttctagtgaaatctttgcaaaaagtaagtcatcacccctggcgaccaccaacatgtggcctggtcactcacggaataatactagtggacgagatgtcgcgtcgcctggacaatcttgaagcacagctagcagccaacaaggacaagaagtcaagctccggctgaaatcatgcgtggccagagcatctgtaattacgagcaggagttcatggagttttcaggagtcgtgttttgtttgttaaacctcatgggatacactgcctttgttgctacccaaaatattatcatacacgtgccatctcactcgctcccaacgcctacgcctttttcagccttaggagaacgtttgccttttataaatttctgtatcaccagatccacacttgtttaaagctcatccttgccagtgaccttctcgacaaacttgcggaggatgttggtcttggtggtaagctcatcaagcttggtaggggccagaccacccttcttgaggataccctccaaacgggcgagctccttagcagcaaaactgtcgctcttgctaagcttgtcaaagacgcggatgtagtactcggcgtacttgtactgggcatcctccttgaggctctcagcagccttcttgacctcggcagcggcatcggtaaggggggtgccaccaatgtacttggtgacaatctcatcgagaacggcgaaggtgccagcggtggcatcaacaccgccgccggcggcgcggtgggtaccggcctgctcgttgaggaaggcaacaaaggcctcctcagaacggccaccgttgtagtcctcgggagtggtgctgcccttggggaagaacttgatggtgggatacgaggtcacaccataatcgttggcggtggccttgctgttctcagcctcggcatcaaccttggcaatgacgacgttgggctcgttggcgaaggtggtggcaagagactcccaagtgggggcaaggctcttgcagtctatggagctgagttagcattctggttttgagatttcaatataggtggacacctacgtccgcaccagggagcagtgaaagcaacaagaacgtgcttgtcaccgccaatggtgttcttgaaggtagcatcggtcaggtaggtaacactactgggaggagcgagctttttcttggacttgataccagtcttctcggtgatgaaggcggtcagagcctcgaggtcacgtccaccattgtactctgttggcttgtcactcttgccatcgaaccacttcagtgtagggaaaccctggacaccaaaacgcttgcccaacgacctttcggcatcggcatcaaccttggcaatctggacatccttggtgaactcgaaggcgtgggcgagctcctcatagacaggagcaaggctcttgcaatggccacaccatggggcgaagaactcgacgagggtgggcttcccggacttgaggacgacttcgtcgaagttgctagggataaggtcgaggacggcagacttggccgcgacaacagccgtgaggccggcgagcatgaagctcttgaggagaaccatggtggtgatgtcgtaccacggcggtttgcgggatgggtgttttgaaatcgagctcgatgcaacaggggccgatgaaaaaggtaaagatggataaattcagagagccggctctattgaatagatgcctccaggcaaatgcaaatcaagggatgctttgaaatcccagaaaaagatgccactttgcagaagagctcgctgacaactggcggcgcaatcctggcacatcggctggaaagcttccccagttttgcagctcccgccccgccatctgaaacagtgccagcgactgcagcaagcgcactgtcccaacatgccatcaaatccctgtcaaatctgcagacagctgataagcgataagatacggggcttatcagccagcgggcggtgaagtaaaaagacccacaattccaggccaagcgccacaaacgcacaagccacccaccagcgaagccctcccgcacaagaaaaatctcgtgtccatattgcggaactccctagcaacatttccggccgaccaccgctctccgtcgacgacatcttcacgccaaacccacccctctccgaaatttgccctttttcgcaaggaaaaattccatcaatctctcaagatgtctcacgagtctgtctggaactcccgcccccgcacttacggcaagggctctcgcgcttggtaaggaatcacaaagaaaccccacaacatccatcacgaacgataccgccgacgaacatgggtaccaggaggaaggcatatcggatgggggaagagctagggttcttgggcaagaggaggaatggaaagaggagggagggggataagccatcacgatttcacacgaaagagagagagaaccttgaagaacaagtgtggctaacgatagatttttcgatatatagccgtgtctgcacccaccaggctggtctgatccgcaagtacggcctcaacatctgccgtcagtgcttccgtgagaaggctgccgacattggtttcgtcaaggtacgataacaactcccccgatttcgagatccgagcaccacatacacagaaccccgagcgattcacacatccacacccccgccgatgccacttcagaaccgaacatacagaatactaacatgtgacacaacagtaccggtaaatcacccactctaatgtcgggagacatggagggtttgacaaccacggggcttccgggttttgtggtttgatgacatgacggggagaaggggaaagggaaacggtgacaaaaacggaattctttggggaaaccatgggcaaagtggggggggacggataccaaccagaacaccctttttcgccggctgggaaataagaacaaaaaagggacaaactttgtgatttgacgaccactttacggaagaaaacgggctgaaggaaaccgacaactgatattccgaaagatcaacaaggcggccagcgttgggattcttttcactcattatttgcatgggataagggggaaaccaaggccaacaaagtgggagttatcacgggttttacctttttttttgtgaaagcatccttttttgtgctttttctgagaagagcaactgaaatgacccaagttgcaaacacacactcaaggtgcattcttgttgtttgctgttgttgttttgttcgcgcgtgcccagcgaatagatctcgacatctgctttgattgatgggagagtgggcatggtttactctcaatgggacatcacattcgtggacaatgatcaaattccaaaagcgcttccaccatcccattcccactgcgtgtgacatcatctcatctcttgtacaagtctttctttaccttcgtgattcatcattctctcccatttccttttgtatgtcttctatattacagtattttaaaacaacaaccgaagcagaaggaggggagatcagccgagccccaagtgtaataatgcacaaagaacccccagggcacagcttccaaactggcgctttctttctaaacacatcatgatgatatacagtgtacaaagttcgttttcaacgccaaagcgcccccatcccccttatccacacacgaaaccaagggaccccttccatttttgtcccggccgtgagttgttgttctttgattttttatttgatttcattatttaactcatcgagagtttactcgaggatgcgggtgacgagaccagtggcaacagtgcggccaccttctctgatggtgatgcgcataccggcctcgacggcaacggggttgtagagctcggccaacatctcgacgttgtcaccgggcatgaccatcttgctggaggcatcctcggtgccttcagggaagtagagggtgacggactcgtcggcggagcggatgtacatctgggggcggtacttctcaccgaagccggagtgacggccaccttcctccttggacaggacgtagagggagagcaggaacttcttgtgggcagtgacggtgccgggcttggcaacgaccataccacgcttgatgtcctcacggcggacaccacggaggagaagaccggagttgtcaccggcgcgggactcctcgcaggacttcttgaaggtctcgatgtcggtgaccttggtcttgatgatctcgttggatttgccaatgagctcgatatcggcatctctcttgagagtaccacgctcgacacggccagagacaacggtaccacggccggcaatggagaagacgtcctcaatgggcatgaggaaaggcttgtcggtgtcacgctcgggggtggggatccactcatcgacagccttcataagctcatcgatcttggactcgccaatctcggggcgcttgccctccatggcgcagagagcagaaccgagaacgacgggggtgttgtcaccgtcgaagccgtacgaggtgagaagctcacgcatctccatctcgacgagctccaacatctcggggtcctcgagggcatcgaccttgttgacgaagacgacgattctctggatacccatctggcgggcgaggagcaagtgctcacgggtctggggcatctgtccatcggaagcagcaacgacaatgatggcaccatccatggaggcggcaccggtaatcatgttcttgatgtaatcagcgtgaccagggcagtcgacgtgtgagtagtggcgggcctcggtcgagtactcgatgtgggcagtggagatggtgataccacgcttgcgctcttcgggggccttgtcgatagcgccatactcgaggaagttggccatgcccttctcggcttgcctcttggtgatggcggcggaaagggtagtctgtgggagctcggttagtggggggtgagggcgcaaattgggcgcattcccggagatgtgcggacctttccatgatcgacgtgaccgattgtgccttgaacagttgttagtaacggtggcaggttcgagataatttgaggattaacgcaccaatgttgacgtggggcttggtgcgctcaaaaacagcgtacgaccgggcaaagttaaggatgggagtgcgggtctggcgctggagctggaccagaggagtggcagactgtctgagggtagccgccctcaggaagggggcaatggttctgaggagggcaggcatggtgacaatctgggaatcgctcacaaaaacagagggatgccgaaagagcggagaggtgggatcaactggatgttgaagagttcgagctgcacaagttagaaaatttgggagctcgggggttcatccaaacccgctagtgctgcccgggtcgggattgcacggactgccttgcgcctcgtgctgtttatctgcattagcctcatccgatatcacgtgggttcgtgcgcaaccccgcgagccccgcgagtaccccgcgggcagttttcgtcgcggactcgcgatagatgcccgcgaggcatgtcgtgaggcccaaggtgtaccggagtggaggcggggctggcaagtgatatggtaggttgcgcggaagaatgctcaatatcagttaacgtcattcaatatcttgaagaggaacttgcaacaagggcccctcgactctgacatctgtaaccaattggcatgtgctggtgttgagtgagttctttcctcttcctccattgcgggtgccccactgttgcggctcagaaatgtgggcggagcagcgccttcccaaataacaggcaactgtttctgatatctcactgaattgtgcattgcaaacactctcactttgacgttgcaaatgagatcggaaaccgctctttgaaagttggtctcaatatgcccaatttcctttccattctcacatcaaatcaactatccggtatagtgtaacggttaacatatcgcgttttcaccgcgaagctcggggttcgattccccgtaccggagtcgattccatcaccaacactccacaggagtgttggtgatgattgtttttggtcttgtggtatctgttttgcttcatttgcgtcatccgctgccatgaggaggtgttccttccattttttgtggaatttgggcacatagcaggcgttgctccctctcttcatgttcgttgcatgcttttttttggctttcctggccccacctagacttgtcgttccttccgcaactgttggccccaccatgcacttgcacaaaggaggttgtgacacctcggcttcgagtttacaggttttgtcttatactcatcaatgtcaccgccgtcaacacattttccagcaacagttgctggaaatgtgccaacagcggccagaccgattggcagaaatcccgagatcagcgaggcgattgagatctccgtgaactcttcttccaacacctcacactcacaataaagtgcgacagccaccacatcctcccaggctcccatcttgaagttcttctcattttcagacatcaatataaggtgaggctcgagctctgcccagactcggcaatcgctgactgtctgggcgatgcttggcatggttgtggtaacctttggtgtggctgaacacaggcgtaactaaaacatggtcgtctgagtatgctcaactggctaggtagaatacaagcagatggcgtaaacgcctatcctcaacaactgatgactctgatggtgtgaatcaccgccggcctggccagcaggaaagataaatatctctcccaacaatgcttggcagtctcaccaccgagatctcatccgccttccacagagtccagcatctcctgggctttagcaaagggtacaatgtcgtactaatctgttcgtcaggtccgccgtactctcagcaatcaatgccctgatggttggtgatgagaatatcacaatatctgtttggggaattcctctgtttcattccatcctgtatgctaaatccgtcccaaacaaatatctaattgcatggtccgctggcgtaatggcagcgcgtctgactacgatttcatattaatccatcaggaggttccaggttcgacccctgggcggatcgttttttcttgcctgggactcccactcttgggagtgataacattccacgttgttgattttggtctggccattcagtcatttttgttttagaagcgagaattaactcccccaagatgttttgtgactctttggattcgcttggtatccagcctcgtaagacggcaaaaaacacaatctcaaaaagactcgaagacgtcgaggataatccagggttagggtcccgccacaaactcgaatcctgactgcgctcactctcggttttctcaaaaagcaacttcagttgattttttccacatcagtgtgttcgtgaatagattcccttgtttgtaccaatatgtttgatgctctattttcccactatatttgacgttctcgggaaaagcggagtatcttggtcagcaacaaccatcggcggtccctcacggccactgccgccgccgccgatagcagcgccgagactttaaaacaagtcggccaaacccactcactcactcacttggtcgctgggtgaactcaccttgcatgcttgtttcataaacttcagagactcaaacttcccttgtgaacacgacttttaaatatttttattgaaacatggaggtggaggaggatacgtcatggaacggcgtcgaacacacgggcgaggaggccatcgatgtcgatgagctaagagtcatgtattgcgctgctgattctttccagtaagttttcatctcaccatcacatcacatacatattggattgaaaatattgacatgagacggcagacaatacccccgcctggcccactaccaaaccacccacctccgccggcagtccttctactccctcccccaagcccacctccggctcctgtcatccccaccgttcaactacctcgaaacgctttccaaagtcgacgactgcatcgactccaacgccgagctgtccagggccatcttcaaagctgccctctcaaacttcaacctgggggtgcccgacgaaaagtcacggactgctactgacacccttaaaatcccggatgagtgggcaggctgtgcaaagaatggggatgtggacaaggcgaggagcacaattcgtcagttctaccgggactggtcggcagaaggaaaaagggagagggatgtctgcttccggaatgtcttcaaggttgttgaacaagagcagaagaggttgaaagaaggggagaaactgcgggttttggtgccgggcgcggggttggggaggttggtgtttgaactgtttctacgggggtgtatagcggaggggaatgagatttcctaccaccaactgctggcgagctcttacatcttgaactgctgcgagcgggcggggcagtacgaggtttttccttgggtgcatgggttttcgaatcacaggacaagaagggatcagtttagggggtacaaggtgccggatgtgcactgtatgagcgagacaatgagggtgcaggaggagacgggcagggtcggcgagatgagcatgacggctgcggatttcttgtgcgagtacgccaaggaggaaaacgcgggggcgtttgatgtggtggcggcggtttttttcctcgatacggccccgaacctgattaggtatttggatgtgatttatgggtgtttgaagccggggggggtgctggtgaactttgggccgttgctgtggcatttcgagggggtgatgccgaataagagtgagaaccaggcccatatgagcggcggggatgatatgacggggattgcggagccggggaactttgagctgacggatgaggaggtgatggagctggtgacaaaggttgggttcgtggttgagtcgagggagacgggggtcgaggcgccgtatatacatgataccgagtccatgctgcagactgtgtatcgagccagtacgtgggttgcgaggaagccggtcatcaaggcggatacttcttagagggtgcatatatttatctcaaaaaataaaacaaaaatgctcaaaatgctaaataacaactcctctctcaaagcttggaatccaactgccccctagcccacatagcaccaccatcaatggcgaaatcagcaccgttcacgtggttactcgcccgactgcacagatacacaatcgcaccagcaatatcctccggtctccctaacctcctcatcgggttggcattggcaaacgcatcatgcccaccgctcatctccagcagcccattgctcatcttgctagggaaaaacccagggcagatgctgttcacgctgatatgcctcgggcccaattccacagccaagttcctccccaggtgaataaccgccgccttgctagcactgtacccatacgtgccctgcttgcccaaagtaccaatccccaacccagccaccgacgcagtgataatcacctttgacggcgtctcaacgctggcgttcttgctcatgaggggcacgaagtcacggatgaggttaaagacgcccttgacgttgaggtccatgaccttggcaaaggccgagtcggagtgagtgtcgatgtactcgccccatgtggcgccggcgttggcgaggaggatgtcgacgtggtcggtgtgcttcttcacctgctcgacgaggtgggtgacgccggcttgggtggcgcagtcggccggcacagagatggccttggcgccgggggagaggttggggagggcgttgagggtggcgacggcggattcgcaggcggcggccttgcgcgaggagatgaagacgagggaggcgccggattggaggatgctaatggggggtgttagtgacgtgattgatacagactgacaggatgaacatacgcagaagcagcactcaaccccaaaccacgggagccaccggtgatgacggcaaccttgcccttcagggaaaacagggacgagaagtcctcgagctgagcttcggccattgtatcggtcttggtgtgagaaaagatgagagatgaaacagacagacaactagaattgggacaaaggaggtggatgttataattcccagccctcgaggtatgtacccgctatatcgctaccgccgatccggttcggttccctttcccggggtggtggagcttaactcagggggtttatactagatcgtggaatctgcggggaaccccagccgtgcctcggcctcggtccatcaccccgccctttaaagctacaactccggctttagcctcgcccagggggagactaacctcggcgataagcacataggtaagaggcaagctctttgatatcttgctgtcttgacactggccaatcatcttacactatcagtaacataaaaagaaagacccaaagtctcaaggatcgaattggtacaaaatacgctcacaaaactaagtacagtagctaagctagctggatggaaattccgcaacatcagaaaccataaaagaacaaggctgtggcctaggtaccggtgctgttaccaaattttggcgtagcctatagaggatgctcttccaaccacagatttcgcttgggaaaaaaagcccaaggcttcctgaaaagcacgtcaacacaaagcagccccaacggccggtcagtctccgaattttatacctccaccaaaggagcttgagcctgaggctggggctgtactggagactcctcttgctgcccatggtccgctccatcttcatgtcctggttgctgcccttccgtctgggcctcctgggctgctcgagcagcggccctctcccgttcggcagcctcttcagcagctctcctctcctccctttcccgcgcctccagttgctgaatatgtctctctgcaacccctggcgccaaactggccagaagcaagatacctgctctctctagccacctggcctggttttgtagccaatttccattagcattccgtctctgcgctaccaaccgccgcgcagtctccgccggatcggggttgccagcctgaccagcccctgctggtgcgttctgtgctggtctctgttgattctgatgttccggattggggatcaggttctcaatatgctctctgatgggctgaaacacttcgttgaccaaggcgttcaaaatccctgtatggaacgccaggaggatcagggacgctatactcaacgacagccaccgttcccatgaggggttgctgtaggagaaccaaaaggcaaaagcggccagacgaatgatgagccacacggtgggccaggcagccaccacccaccctccagggttgccctgatgtccaaactgtggaggccgggcaagaggagggttagctggagctgccacttgggcctgctgaacccgatgccgaaggccgtcgacaggatgagcctggaaacctgcttgggcttgtccctgctggggttgtactggcccgtgagctgctgcatttgggtttggccagagaggcggtggcaccggtccgggttgcggctgctggaaagccaatggcatggggctcggttgaaaaggtggcagatacatggctggcgggggatagaacggaggtgggtagaaaagagggcctgccataggaggtacgccgaaagccatgggctggtagacgtgctgtggtggcctcacaggtaaagcatgtggctgccgcgaggtgtacagatctagaggactgtttaccagtaacgcacgaggaccggcctggtcgtacaaaatgtgaacctcgagatcatccaaggcccgagcttgggactgtccctgttggccctggggttgtgattgagattgattctgtggtgctacctgccgctgcagcggcggaataccataggcagcatgtctggtgtggggatctggggtcgcagaacgactgacatgtctggatacaccgggaaagagaggcgtagtcaccccaggttgaattggctgaataggcccattggaattcgcaagattagccgccatgtttgctaaggatgcgccagatgcacttctttgcatcgcatcagtgatggtttgcgaggccctagcggcgtcatcaccatggatccagtcacgagtctggttcgcagaagatgggcgatgacttccagggttggatgtaggaccgcccgctcctggagcagagccagcggctggcgcaacgacctcgttctgaacagtgatgcgtacttgttgtccgttgggcccaaccatatcccgcgtcaaggcatgcgccgggtgctcagcccccatgaccgggccgtggtgtacgccatcgagaggcggaataccatatccaaagtgtcgttgagtattcatatgcgctacttgccgctgaaaggcctcccgctgaaggtgagcaccccactgaaccatatcttggtgttgtaggtgatggaccatgggctgtggaggcgggataaagccggcggctgccacacgaattccatgctgagggtgaaactggatatgtggctggcggccaaatggaggttgcgcatggttgttgggaggggcattcgcattgccaggcgcagggctctggccatggttcggtgttgcgagctggggggtgttgccagacggctggttgacaacatctctgatcaccatatgaagagattgttggtcgccgcttgatcggatctatagcaacagtattagcacaccaagtcgagagaaagcgacacagtaacgttacacttaccacctgttctgtaaagacatccagcaatgtgtcggtatcgcgctgcaacagatggccgcggtagatgaatctgatttgctcgtcggatggtcgcgaggggagtccctctcgaactttggccttgagctggcgcaaagtggtagcagctggtgttcgggcgaagcttagtgaggtgccgcttggttggatgaggttgaggttaacgaccaagggcgcatcctcctgtggagcggcgacctgctcgtccgccatgtttgctgctaatatctgtcggtcaagatgatgggtgggcaatggcgacgagactggagagaaaaggtgggcggcgctgtcaattattcatggaagtcaagaaagacgcatgccaggcacggacagtctggggcgctcggagcgtcgatgttgatgtgggtgagggtgaggtgggcgcaagcaaacaagggagagtcagtcggtcacgtcgcggagaaaaggagagaccacgttgttggaaaagaggggagcaaaatcgaacttgttgcgcatcctattgatgtggagaggtaaagtgttatgtctgaaataaaaaaaaagtccgctcttcgcatcgaaaagagagagctgttgttgagcaccacccacgctcactgccttgctcttgctcggtcagcttccaaattccacgctgtcattcaagatggagggtgcccccaggtatcggtacccgaccacacgctgggtggccccctgtacacaggaaatcagcggaatcacatgtgattaatcaaactattctgtaaaaaataggggacacatgtacccaccacacgcgaccaatggtgcccccccaaacggcgccttgccatcccgggataacggctctgggcgggaaacaccgtcgcatccactggttcgctctctctttcagtctgaaaagcaagctgcgtcatgagagtgacggcttgagctaatcgtgcagctgtgccgcccttgcgaccggtttatttcttgtgtgactgactttgcgactttgcggtatatcaacggcctgagattccccgcgcctgcccccagagccgctgctatttttttttttgcaggcaggccaacgatgcaggttcgtcaacatacaccgccttgctcccctggttacggatgagaaaaagttattaaaaggggcaacatggcgtttcctcagattggccctgcttcgatctctgtcgggttacctgtagctgggttggctcgcaccacactccttcgacgctctcagcgcctctctcaccaccacctctcgcaagccgccactcgtcgggcacactcgacacatcgatacggccgccagcagcagcgcctcttcggccaacgctccttctcccagcagtcccaccggcccaaggccgactccaaagtgaacgactccaagattcggtggtatcccattcccgtcggcctcggcgtcggcttcctgggtctggttcagttctacaaggtctactcgcgggagaaggaacctcaagaaaatggcgaaccagagaagaagccaaaaaagaggccacgggtgaggcccgatggaccttggtacgatatttcactccagatacatacttgatcttgaggcacgaggacagaggactgacacatggtttccaggcaggtgcaaatcatgtcgactctgccattgaaggccatgtctcggctttggggcaagttcaatgagctcgtcattccataccacctccgttctcctggtttccggctgtactcttggttctttggtgtcaacatggacgagatcgaggaaccggatattcgcaatttccccaacctggccgcctttttctaccgtaccctgaagcccggtgcccgacccctggatccgaacccgaacgctctcttgtctcccgcggatggtcgagttctgcagtacggtcagatcgaaggcggcgatatcgaacaggtcaagggaatgacatataccatcgatgctctcctcggtcaaaacagcccctcgccaagtctctccagcagccaagcctctctcgaaaagctcatcaagcccgccgcccagcgtgaactcgaaggcgacgaagaactggtcaagagggacgaagaattcgcctcggttaacggtatctcgtacaccctccccgatctcctgtccggtaacaagaagaagagaaagagcgacagcttcgaccagcccaaggacgaatccgtcactccctctgccacctccgtctctgaagtccgcgccgagctcgagaagggtgagaaggcctggtacgattatctcacccccggcagccgtcacgtcctctactacgccgtcatctacctcgcccccggggattaccaccgcttccactcacccaccaactgggtcgttgagaggagacgccactttgccggagaactctacagcgtgtccccgtatcttcagcgcaccatgcccggtttgttcactctcaacgagcgtgtcgttctccttggtcgctggcgctggggtttcttcagctacgtccccgttggtgccaccaacgttggttctatcaagatcaactttgacagggagctccgcaccaacagcctgacgacggacaccgaggccgacagggcggccgaggaggctgctcagcgcggtgagccgtaccttggttacgccgaggccacgtacgaggctgccagccaagtcctgaggggccacgcgctgcgcaggggtgaggagatgggcggtttccaactcggcagcacgattgttctcgtctttgaggcacctgcttcggagcacgatcccgagactggcaagcacaccagggggtggtcgtggaatgttgaaaaggggcagagagtcaaggttgggcagtctttggggcaggttgatatgtaaaagttggtatccaaaacgtcgggggaaagaggggggttgtatataccaaagagggattcgaaaatgtttttcaactttaatcgtgggtagatatttgtgttttaatgcggcaatcaacttgttcgtttattcatagttttgggggtcagttcctattctagcatgttgggtgtggttggaaaagtggatagaagttttaaaagtgttgttaagatcttgaaaatccatcatctatgatgctctataggtatatgtacatcttctctctaggtttcattccagtcgtctgtatccgccatcattgaataaaaggggttatttcatattctcttaaacttttgaaaaaaaaaaaaaaactgtttcaacgcccactcacgatgtcttccacgccttgctctcaatgcctgcttatattgtgctttgcagtccatttcacgttgttgctggacctgctcccagctctctaagcagaaccaaaaaccctgtacttttgctccaaaggcccaaaggtcttctcgcctggctcgccggccttgccgccaaagacgagctgagcggagagcttccacgtcgacgggacggaccactcctgctggaccttctggtcgacgagggggttgtagtgctggaggttggcgcccaggccttcggcttcgagggcggtccagactgcgaactggagcatggcgcttgagtggccggcccaggggtcgaaactgtttttatacgttagcaaaaatttcatatgggggggttggatgggaaaaggggacataccgatcagcataaagggcaaacttttcctgcatgcccttgacgacgtcctggtcctcaaagaacaaaacagtgcctgcgccggccttgaacccggccatgcgggcggccgtcgaggcgaagttctcctcggggacgatggacttgaggatggcggtggtgatgtcccagaacttgtcgtgctcggcgccgaggaggacgacgacgcggttggattgggagttgaaggaagaggggacgtggaggagggattcctttacgatttcttggacgcggtcggtagagatggggagggtcttgttgagggcgtagattgtgcggcgggctttgatgtgggagaggaagccgtcagcgccctggacggcgggggtggttttgctggaggaaaacatcttgggggtagtaattggtgtggtgataggacggggagtagcaactctataggtggtgtttttgaggagtgtgcgaagcgggtgggcgaatctctgcataggagcggaagacaagatgggatgatgggttggttggtgatgagatgaacttatagatagatgtcaaaaaggtgggaaggaccccttatatgtatctaccttcctatgtctgtcctctttccctacggacagcaaaagacggggttctacccggcagaattcgagaccgacaccttccccccaacccccatcatggaaggaaccctggagcatttctgccgagagacctcgaaagattccatgagcatcccaaaccatcgccagactccacttggtacgtacggatggagttttctgcttgcaagcggctcactcatcgagttgtcatccatttcagctaccaaatctgtatccactattcatatcgtctcgcttgctcgcgcgcggtattccgatctgtcctgtatataatacaattacaacatacatcattgattatacataagcttagtactcgttcgaccgttggagttgcatgtcgcccagctccctaaccaatgacaagcaatcatacagccgaattggggaagttggctgaaaaccagttcgtggcttcggcaccaacgacagcacgccgctgggctttgaaagcgcatttcaaatgctgacaaaatcccgctaagaccacacccccacttctttatctattgggtagccggacagggggtgggatctgatccattgcttgctcggcagtccccgaggtgccaaccccaccacgtgccgttgatggaggggagggttgaatccttgaactgcctgattcagtatttataaagatacaaatgccccccgtatgagaaagtatcaggggcatggtgtcacaaggcctgacggttgcgccatctgggatgtctcttgggtgaatagaccatgcacacctaatgtcacaccgtggccttgagaaaccagcctcaaatagccaagagatacatcgatcaatgatttcgatgtcatggtaagaaacctctgctgctagattataacatatacagtcctccatacattcagtgtccgtcatttcaagactcaaagctgttcttctcaccccctcaacatcacattcccccctctgctgtgcaatgttacacacctccaccaagtccctgatgatccctcaactgcaaatgccgagcaaaacaacgattccataaagatagagtaaacatgtatatacatcaagagccagacctatccttcatgtgctcgtcgtcctcctaacacccgcccatacccttcatataccctccatgttatatagttattgttgttgtgtgtgcgcttgtgtgtttatcttttctctagcagaccaaagcaaacccccaaagaaaatctttaccatggcttcgagccccaaaaagtctggtataaaaatctcaaacatctttatgcgcccaccagccaaagcaatgagaaaagcaagaacgcgatacaaaactcccgtcaaatgcatgaaacgataccgaaagggaggataagaaacgtgaagccaaagaaaattttgtcaaaaagactacaaatcctgaaccacctcaccaagtctcggcaatgtactggcccgtctcctttttcaagttccaaaactgctgagcctcgtcatgctccaggttgcccttctccatggcaacctcgacaagcgccttctcaacaccctcgcccatgcccctgctgcttccgcagacaaagactctgccgtcgacagcgttgatgatgtaccagacaaggtcagcctgggccttgacctcctcctggacatatcttcctgggcccctgcggctctggacaaccttcttgacttcatcctcatggacaccccactcgccactgtacagctcgtccaccagcgaatcacggacaccttggagcacccagaccttgttcgcacagttggccgtcttgagacgccgctggacgaagcctctgaacggagcaataccgacgccagccccaataaggagcatcggtccgtccgagacgaactgcttggcaagcgggttggccatcaaacccttgaacatggggatataaaactctgggtctttctcccccttctcctgagcttcgatgaacttcaaagcctgtctctgaaagaaacccgagccaatacccgtccgactgccattgcgccagtcctccgcctcatgaacggtgacggcaatctcaatcaaccgatgctgcttcccatcgcgtgtcaggaacgactcatgagggtcgttcgacaacgagtagaagcggggcataagtggctgcaggacggataggagaagatcaagcggtggcttggcgttagggaaggcgtgcagtagttggaccagactgatgtgtggaccggttcggaagtcgcagaagacgccctgaccctcggcggagcagaggtaccgcaagatcttgcgctcagttgcgtcagtggtgtgctcagcaagcacacggagaatttgcttcgttggtgggtatgactggacatcggagcaccatgttagaagatcgcggcgggtggtgacaatctcacgagcctggtcggcgccccaaacggttggccaacggcccttggtcgtccggaggagcacaggcttatcgcgcagaaatcgagggaccaggagcaagtcgaggatctcctgcactatagaagcctcgttgggcgcagacacgccgattgcgccaccgactttgaagtcaacatcctcaccctctggatagttggtgacatcaaggtcgaagtggaaggtgcgcttctcagcaccaggcttggtcaactcgcgagtgttgtgaatgcgcgcggggaacacatggtgcggcgggtgtggttgcacaaatttgggaggttgtatttgtgtgtcgagcctctccaatgtcaagtcctggagtgtcttttcgatgccgaccactgaccaagtggtgtcactctccgtgccgaacggcacagcaggctcggatggcgatggaacattggagggccggcgaacgggttgcaggaaagccgtttgctcaggaacatcgcgcactccgctgagtgtggtaggaatcttgtcgatcttgaggttcaaagaacggtatgcgtcattgtcgggaagctcgatcgcctcgtactccacattgttgtcttttttcggggcaccaccaagacagcagcctccgccgcagcatcgccggatcaattgcgttgtcgtctcaccggttatgcgttgcacatcttccgggctcttggcgatcaggcgtgtggacgcccgccggcgacgtgggaccggttttgttggctcttcaatctcctgttcgtcagagctcgagtatgtaagtgacggtgtggccgattcgggctggggctcctcaggaatgctcgcagccgcacgctgggcaagaagaaggtctgtctgcgccgtcattttggatgtggttgaagccctcagctgcctcggagagttgtggcgatgggtagataatataggtagacgggaggtgagcgaataggtcggagcaagtgctgaggataggggaaggtgaattcgtctctgtcaaaggcccaggcgcatgaccgaaatttgcagaaaatcgagatggaattccgaaggtgatgtgggccgaggtcaagttacggtaatgctgtatggatggtatgacttgagtcaaaggcttgcctcgccgtataacaatttggtggtcgctatgggtatggcacaaaaaggtctgtaggagggaaaaaaggaaggacacagctgggccactgggaggctggcgatctttatcaccgtcctgctattgtcattgtgcagcgagcgcagcagatggccaggtcattgaggtcagctcacagccaagatacgctactttgacttccaagccccagcctttggggggcaagcgggaccggacacagtgcgcgtgactttgtcctgtccccgtcccgaagaaaatcaatgtgtgggccttttgccgtgtttctccggacaaaccaacatctgatatcgagatattcaccagggcatctgaacacatatctgttgtttgctctcttatatacctgtgatagacactcatacggccggaactgcaagcctgaataacacatctgcaacacaagagcctcgcccttcttgatgcgcccggtgaggcttcccatgctcccggctcaatgggcattttcccattccctcggcacgtgctcaattcaacactttcccctgagcgccagccctgtctgtctccgagcagtgccaatccgtcagaatcacccggggctgccgggggaggatcggtagccctcacggcaatgagcccagcttaatctcacatggtctcatcaccattccaccctcccactcactgaccgcgccgtgtagcacaaaacttccggttttcccaacaaccatgttgaaaaccagcggtacctgcatgggcttatatctctgattcaaccagcatccgtggacatccgagatgtcctaggagaaacagcagcaacttgtctccatcgccacccccctttctgatctcctccctccaaaaaagccaagccaccaatccctctttccccagaaaaagctctcgactgtttcaacacttcccggcgtcaagagtggactcacggcggagaccaactctcaagatgcagagcttccgtccacatgaagcatgcatctcgccgccggtgcctaccttctccgaactcggccagaccttcaccagcaaaaagatgggagaacacacagtgttgccacttactgtgtggataccacaaatgacggcaagcaaggataatctaatcaatcaacgattatcaatcggccccacaaattacgatttcagtgcgcagcacacagcgcgcgaggcgagccccttttgcgcgccgccgccgtgatgaccgaaaaaaagccaatcccaatctttggggtgatgtttttgatcaagcagattgataatgatttgtgttgagattagatcagcctgcctcctgcgacccgagatctgataaaactgaaagggctagattaatgacactagtggggtgactaacgcttttgcaactcatggtcatcgttttgaatacacacagatgattcaccacggttgatgcaaactccggagaaacagccctttccagtggggataattgggagtgaggtggctcagcctcaactattctcctcctctcacagcggcgaaaggtttcttgttgttccagaccttgtccctcaaaagccggggcacccctcactgccggcgtagtcggcggcaagcagcggctgccgttcgggcaatgtttcggtgcccgcttgggacccaaaaaccccccacaaatgtgagcggaaacatcacgcctttgtgggggtttagttttgaagatgtatcctgattccaagaagccaacccgacaataaaccaaagctcggttggtaccgcctaaagggctcaaatcccacgcagttggttatcatatgcaaatgcgggatttttatttagctggtgcctgccgcgcgccattattagattgatcagattgggtctcttgtcaacgccgccctttgtgctcttcgggattgtatgtatggcagttgtgcaagcagcttgatgaattgcacaatctaggtctcctcttttgaaatcttggcatatatgacagatcaaggaggcatgggttgcttcgactagctcaactgtcatccatttgcataatgtagtgtggtcgatgtcatctgatcgaagccgggtggtcaccggctgccgttcggcgtggcgtcaacctgggatgcgatcgggatcgggatcggagccgaaacggcaacgacatccgacctccgccccggttagggaagcttatctccgtgatggtttcgttgtggctttagtgtatcatgggtatataataatgcgattccccatagttccgttgacaacgactcaacatgatctggacttcgtagttacccggagatgcctagagaactctttgaggagggaacataatcatcatcattcaggctagcaagtaatcgtgataaccctgtcctaaacaacacactgcctagcagcacaagatctcttgtcttggttttgcccgtttcgaaagaataaccacgacaaaaacctgctcatcaatcccatccgccttttccactggatcaacattttccaatctgttcaacacgatacccaatccttgaagtcatagccaaaaaaaaaaaccttataaatcagcaacatgaaacgaagatcataaacatcatattctcatcattgccctccccaaaaagatcctgccattgctgttgccaaagttgcagttgttatttgaagaagaaatggtcataaatcgtgaaatagccgcagctggctgaacatcgatggcgtcagccagaaaataaagaaacgtatattcggatactgagaagagttgtgaaaaacgtagataaattggtctcgagactggtgacggagaaaataaggagctgctggctggttgactactagcagcgatcgtaaaaaaacgttagaggtatgtctgcccaagttcttgacgatgaccgtcataaagtatcaaataatgtaaatgaagaaaaaaaagaaaaaaactacaggaaaaccccgggcacgcaagatacgctttatcagtagccctgcccgctgcaaaaaaataaaaataaaaaataaaagcttagttaaagtatccaagaaataggaaaaagaaaaccggattcgaccgtgctaacggttcttgttttgccaacagtagtcaacagcgggtgtgacgatgttgtggaagtcggaggtagcaatacggccaatgaagaacactctgtagttgtgctcgatcgtgacaagcttcgcgtaattcacgcgcgactccttgtcgagcttctcggttcgttctgtgagctcgagccgcactggttcgaaacccaagtctggctcgcccggcatcatgcgtggtcttgtaccagaggcatagacgatcccatgcttgcggggcttcacgccctttttggtgcaggcttgatgaccatatgtcagaataggcctgttgctccggtcagttcataggacttcaggacggagctcggggtatcatttacacgcaagtagaatgaccttcgtcggtagcgacaacaatgaaccgacgaaagctttcatgaaacttctggcctcgttgcatgtaggatcgcagggtcgcgttcataccgctcccgagaggttcagaccagtagattttaaagaccttaacatccagtcatgttagccaagaaaattcaatctctattaagagtcacctacttctcccggttggaatcttgacgagtgttcgacaacgaagcctgtcaacagttaacaacagatcgggaattccagggaggtggtacattactgctccaaatgtcattttgttgcgatgaatgtgaagtaccatagcctctatcgctgactcgttggttgatggtattcccatacgagtaaggggtctgcaccatcggagacagagctcttggtgtctgctgcccaggatcgtcttgaaattgatatgcggactggtcatatccagtaaccattgaagatggtccaggcaccatgccagttccgtacccatcatcttcctcataggcctcgggaatagtagagtactcctctatttctcgttagcaacagcagcattatatcgaaagctttttggactatcggtcaatgttttcatacctggcggttgaatcacagtcgcagtgtcctcttcaacttcaccttctatagggccaggctctgaaaacacggctgcccttggatcaagagtgacagtgctgcctgagtaatagctggactccgcgggattgggcgcaacttgggttcctgttcagaatcagcaattgtcccgataaatcatttggaagaacttgaggtaccttgatcgtcgaattcacttgcaacacttgcatccgtaccatctgcaagatcagttccatactcggatgcaacagatgaggcttcatcgtaggatgaagtaggcttcgttggttcgtagaacggctcaccgggcccaaatgactggggttgggctggcggcagatcatcaggttgaggttttcccctgttccgaggtctccttgacgaggagcttttccctttggatggtctgtatccagaagactggtcgtaagatttcccatttggcctggtcgagtacccatcgtaaccttgtgcaggtggcgctccatatccctgagtttggtcactataaactatgttctgcccagggctcggtggaatacccgacagcccgaagctcgtggaaccagtcggggcactaaacgtataagagtcatcatatgccgaaccatcttggacacccggcgtatcaagattgtacgatgtatctgagatggtcacattggacatcgagctcgcgagattatcaacaccatcaccgcgaggagcttgctgctcactgcctggcgggtagctgtagtcatattcccaatcacctgcaccatgtcaatatgacgttcgcatcgtccgaaaagaatatttggggaagatatcggtacctctgtggttccgtctggccctaaaatatcggttgttctgctcatcatgttcccacttggaccatgccccttggtttcgtcgactggaactcatggtgcatgcatttttggaaaacgtaacaaaatattggtgaactcaacaatcccgatagacgggatggtgttatgagggagcgtattcgtgggtaagatgaaaaccagagcaaaaaacgatataccaaacggccaacggcaagagatccagaacctcctctaccacgcagcggagttgctattccaagatgatgtcctgcctttatactgagattctctttgccacaatgcagagccgcaagtgtagctagaggcctaggagtgggggagtggaatgtctagttgtcgagtggtgctctgggcctcttcgtagattaaatgcaattgtaattggcggaggtgagagctcgtgacacacggcccgggatcccattcgcggcgtaggccgaccctattgtcgccggatgaatgacctcttgaaagagggaaggataagtgtgggtcgttggaggaacagaagaggccaaagaaagttgcagcaagaggagaggcggtgaccagtggtcgacacgacgacggagcccaaaggctggagtcgagaacagccgcaagactggggaaacaacgagctcaaagctgaggagtcaagacggcgggctgctgcagtgtctcgacgcgaggtggctgcgtgtgggtgttcttatcaggccgtgaatgaccaatgtcgacgaatcccgagccaccttgagcggagcttgatgtggttcttggaccagtcgcgaagacctgttggagatgttgcccaatgatcacgatattctcctgatgagaacgagggagttgaaaacaaaaaggatgaatacattaggcagctacacatgagctgggagacggcaagtgggttttttctataccgcgcttttggcgcgatgctctcataagttgcctcttttcattttccatctgctccttccacagctgaatttccatttcccagtttgggattctctgcatacgcagtcatgccggcggatttggtgaaggaggggtcgagagtgctagcgccagtgctccaccgcagggtcgagatgccccgctgtggaaaatgtatgtatgcgtgatccggggtacaggaaatggaatttccaaaacctctcttcaagagaatataagaactctgccgtgacatgtcgcacgtctcagaatattagatcagacgggttatccaagggcaggtcttcatgttaaatagactcgccagggtgttcctcctcaacatcgttaggctgtcagaaacccccatgaagtgcggccaggaccgtcccgttgattccaagcttccccattcgagatgagttggacccacaaggctgggaacaactgagaagatgggttgaaggccctttccttatttctaaccgccttttcgaacccaaccaaactgcatacccttcgtgccttccaaggttgaccgatacagttggaaggaagatgtttcattccgcttgaaccaaccacgaaggctgcctccattgcatgcccaatagtagagcaggcattcacttggacactggggggctggcatgttaggaagctgcggaacttggaaggcatgactgcccggcacagattggggcactgggcagtaggttctcgcacaaacgaagaagccctgttttaccagccgccgcaacaatacctaattctatcagcaaacgcgttccatctcacccacggaatccctttgggcatttccccactcatctcctgccttggcttacctttgatggcacttcgtcttctgtctgttccttgtgtatacggcatcattcaaacaagccctctgctctttcctggagaatcgggctaaatctatcgcaccatctgtctgtccgccttcgcgtagcatcatccgatggccccaagccattggagatgctgttcgagaccgacgtgctgtcttcatcgccatgacttcgaccacattaccaccaaccaaccccaacacgcaaaacaattttccactgagaactggctccttaaacgctcaaaccaccacactacctttgacccgcaaacctacaccactctcgtcgccagctacgcctcgcttcaaccatgctgtgtcgccggcattcaaacggtctgttgagaggccagctgccctcaatgccttgcccacgacgaatgggtcaccgcctaacctacgcaatgcttctgttcacacacctcctgacgatgattcggcctcttggactggagatagtacagcaagcagtggtgatgacgatttgtccccaccccctcctccaccccctcctccaccaccccctccacgagctttaaagcccgagattgtccatccagttccaccaaccaacctgctgcccgttggccaaatttgggcagcacaggctgcgcctgccatagcaccggctgttcatgctccaatccgaccacatcctcttgacatcgacggttcggagtcggaatttagcgattcggacgaggcatccacaagtcgatatcatgatcggctgcgccgggatctgggggctgcggtcgagggcaagcaacgcgacctccgccagctaagatcgcagatttctaccaagcttgacgaaatgcttgacgccatacgcaggttgacgaccttggaaaatgaggccatgaagcttttgaagccggaccaagggggtgttcaaaagtttcgtcaactacaaaaaacccagatggaactcctctcgacattcaaagcaatgaggagtgatttcgaagaagatgagtctcagttgcagagcttggagagtgatttggtcagggctgcacgaccagctccattctcagccaggcctaatgctgtaggcctgccggggatggattcagtcatgcaacagtccgttattgaagcgaaagagggggtgccagagatcttgttgggcatttcgggagaacgctacgacgatatacaccctcggtatcaagatcttttggacaaagttggagatcgcgaacttgcccgagaacattgtgaggaaatcaggtaccgccgcgaggatatcatctacgaacttgagatcaaacttcaccggaagaggatgcaagagaacccgggcaactcgatcagcgaggaggagctagcggaaatgaagacatcgctcgaaagcatcccgacaaatcctggagaatttcaggctcgatttggactccccgctaatgaagaggatctcaactttctcgaggactacgaccgccaactgcaacgagcgcaaaggaggtttgacagggcagaacaggaagttcaccggctgcgagaatggtgcatcagcaataaggcgatgcgtcaaaatgcctcttataacgagttactaacaatctacctggggaccgaccagccaccgcttcccccggatgacgggaatatgcccattgaattcgtcccgcgaaccggtcacagcaagcttgcccatgatcggtttcctattctcatgtcgaatccatcgcatgtcctggacgaattatcggaacaagcggctctgaacaaggcgatggcacttccagcagactccccggagagtgctcagcggagggctgagtgcatgaaggagttaggaatcaccaagctgcttcagaacgccaagaatatccctgacctgatcaatcgatggctacttcaccgcctccgcacatgtcctatggaaatagagctcatgcttactgtatttgagacgagctgcaaggttgtcaacttgcggagatggcaggaggaggtgctgttttactggccaagagacgaggcagccaagaagtcgccgctggaatttgaaggacctcgaacaccggtggatgagatatatcttggagagcaggacttttcacgaatcaactctgacattcacaagagtcagcaggcggacgaggggggtcaacacagctcaaggagatcgagtggaagtgagagtgatggatgagtctgtcctaatgagtccttgtcgggttttttcacgttgatattgggtataatcacaccacaacgcatgttgttggtcaacatgttgaaactgcaatgattttgtagtgtgatcacggcttggttggatggttgggggggctacgtttgtgacttttgaccaaagggattacttggtacatgtttttggtgtattggcttggatttgttctatacccctcggtttattcgcaaacgatatgaatgtatgatgattctgctttctgttgtcggggccttcatcttcgacagctgtgttgcacaacctatgtcgtagaccggcaggccgttgtacagaaacgatatctggggcacgcgcacagttacccttcctgcaatgtaaccaaacttcgctgccgtaggtggtcaacaaggcagcaaggtcagacctgcagagaacgacactaatgtatgcagatagcattcgatgccactcatcgctctgccgggacagaccactgcttcagatctcgaggtgggatgtagctcgaagctcggcacggcagccctatcaagcaactctgaccccccgagatttgtcaatcattcgactgagtggcacctaaatgctatcggaagctgccccgaaagaagctggtcagaaaatgaagtccttcggggcaacgacatcccacacggtcttggcttacagccttacttgtcgaatccaaggcacggtaatccatgggtacctaggagtcgagcgggagggaatcacacacccaacaacaaagaccaataattttcaaatctcatagccttgcctatttcatcccacacttttggcacaccatctttcaagagtggtatgcgactaaccttttcccacaccatttctgctttactatctcgagacaggtatgactcaatagcgagatctcactctcctatcatataggccagtgatattgctcctcacacaccgcaagttggtcgagcggtgggggagtaaggctgcggtccgacgttggttcgaatcctaaaggatttttgcccgcaagtaggaaagcggagcccgcttgccccgtacgagataaattgaggagtggtaggtgcatgacgatggcagtggtggtggtggttgtctcacagtccacgggacgaatgtggtgtgggtggtgtcggattgctttgccccgcgagagctatcaaagctcatccgagcttgagtatcacagcctgctgacgtaccaggccagttaataggccctgtataacctcgacatcggcgcgaacgttaccgagcctcgcaggtgaagatcatagccaggcatacaagcttcaagcccccaaatgcacgggactaacagaccagactctctgccatagtcatgtaaccagagccttagagccttggataatcctcatcacttggacagtattctcagtcgtgtgggatcatcaaccacctccaagtcaacccctcgccagctcagccgggcaacacgcccacaacccgtatccagcatctttcttttttcagccacgatataatttacccctgaatgacgcccagatcgccaattcaggacatccactcacaagcccaccgaaggtcagtacaaaaacggggatatgagttatcatgtacttgtatccctgttttcccatgcttcccgtcccaagctgtcggatcactcggctggggccgcctcactttctttctttgactttttgcaggtgggccaaaatatgcaagtgagatctctaagtcttgacagcagttttggctccggctccgggttggctatggaaagtaaacctgcggtgtggtcagacaaacaatacacctagtatactcctcttcgatcggtatcacgtacttttctactgaggttggattctggtgtcatattccttcatgttcacgttatacaatctcattgagtgtatttcaagaattggcagactgtctattttacaattaccccttttggtcgggtacactccgtatttgagcatgactttccaaacgggcaacatgagaagtgcaggtcgggggctcaacaacatgccacaaatgcaagatgaggctcataaacgaactacaagggaaaagtgcagttcgaggctctaatgtgagcaggagaaaactttatcttgatgtctttagggtttggtttctgtaagggagaagtgcatattttccggataggcgggctgttctacagtcaactgccgcggtgaaaaagatttattcgaggaaatgtaccgttcaaggtagactttgatatattcatcaaaaatgtactcagttcaaacagaataggtatgtaaacattgggaattgacgttgatgccaaatgttacagtaggctatttccactctgatgttctttccaaccaccaaccggaacctgggttatatgacacgacaaaagatatatactcgcagagactagctcgagacatttcaactacgcctttcaagtttagagaccccacaaggaggagactgtgaagtactggatcttgctgggtggtcctctttggccggcggtagctgcgtcgtcatcttggtgatgtgccaaggacaatataggagatttgacgtttcaagaacggtatcacgagaatcaaaagtatctatgcacactctaactacacatgaacatactcatcgcgggattgactacctacgcggcttgcgttatgggatgataaaaaaaagacctagtgtaaagttgagatcaagacacatgagatgaattccctagagaactaccatgcatgcagacatacatatgtacaccaacaggtcaaggactaaaccatcaatctatgctgtaaattcacatcaggtatctctctatctccttcatgctctgcgatgtcatcagatcagacccccgactgtacatctcgcataccccccatccacagcctcttcccgcggccaacacaaaacagatgcatatctgcacctcgcagttactgacgcttgtagcccatccccaaacacatcgccagaactggatagagtgaccgtgtcgatatatgagacattgggtattaccagcgagtgtggactgacgcttgatgtcgctttccccccactccgtcgtttattttacgcaaacatgctgtcaaaaaaccaaaatacctataaacgccatgcgccgccccagacacacgaaagccaaccatccaggtgaacaccgagcaatgtcagaacgccctgaacagagcagtaaatgatcccacgatccaactttttacgcttattcctggtactccttttggaggtagacgcacgataccatggcgtgatcacgctcatagggttctgagtatgatagttagcatttggatcattgtatttcaagacaaatcatctgtcgtgggacttaccaagagtaagttgctccttgggaacaaacttgtcctcacggagcttctggacttcgctggcaaacacttgctcagggggcgctgtgctgtcaatgcaggacgccttgatggagatgagaagaccaccaccctgcttcaggaacaacttggcgttgataccgacaattctggcctgatcgggctgggcaacatcggcgaagatgacatcgaccatcggcaaaagcatgcggtaggccatgggcttccgggcgtcctcaacgatgggaatgacgtttgtgcggcgggtctagtgaagagtcagtatttcacgattttgcaatcgaatgacgggcttcaacgtacagccatgttgataagatctctgccagagcggtgagagaactcaactgcgtagacggaaccggtagggccgacgatatcggcaacgtgggaaacggaggtaccggacgcagcaccgaggtagaggaccttggaaccgggcttcatgtagatggtctcgagaccaccgaggataccggcagccaacttggaacggaaaggattccagatctgaagtccatgttgttagcgcatgttcatggaaaacgctgatagccaagactagcactctgcgactgaaaaacttacgcggtactcggtcttggtggcgttgccctcgtcgttcttgccagtctcaacagagattctcttctcgccgtagacagactcgccaggtacaaggttggcagtggcgagcaaatcctcctttccaccgcgggcaacgaagacgcccttgtgacgatggggctcgacgatgaccttcttgccgccagcagcaccaccggcaccaccaccgcgaccaccaccgcggccactgttgaattggttagcatctgccatagtggctcgtagatcgacattcaacgtacccacgaccaccacgggcaggaccgccacggccaccgccgcgaggaccaccgcgggcaccaccacgggcaccaccacgaccgccgaaaccggctatgtattcagtcagcaaatgtcatcggaaatgttgaggcgagagaagacagcaaagtagcaggccggaggagaggcgcaggagatcgcaaactttggagggaagcgaagatcgaaaacttcattcgcaatcctcggcgcgcagaatctgagcactcgcatcgtccgaaagcaaagccatcgcaatccaatgccgtcaattgataccagaaaagagaatctaggacttaccaccaccgcggccaccaccgcgtccaccacggtcaccaccacggaagttgcctcccccgcgaccaccgcctcttccaccgcgctcaaagcccattatgacggttggttgtgtctgtaaatcggatataagatcgtcgtgggtatgtctgtcgacgccgaatcagatgtgttgcgcaaagagttgttgaggacacaatgggttgatttgcgcggctctgtcgagatgctcaaagagcttgttggagctggatgcaaaatttcctaacaccccagaaaaaatgagtggagcaccgatcaactttttgtcgcctcggtggtggattcttccgacattctgagtggctgggcatcttgctgtgaatctggtaaaggtccgtgcagtattgttatcgtcttatcggcttggtggggctgcaattgggaaagttttctgcacttgcccgccgccaagattttcttctgcctcaggccaacaccgctcccgcacaagccaatcgaacaccacccaccgagccctaatcgcgaaattgaatttggctccaaaatttggtaaccgtcattccttgaacatcaccaaattcggccgatctcgcctctaatcgacaagcagtcaagatggtgagtagcccttgcgaaatcaattcccgaagtcattttcgagcgccgttcgaagcccccgtcgaaattttgctgctggacctttgcgggattccgtccgggatggaggatggagctattgcggaaaccgacgagggggagggaaatgttgaagcaatcgccaggaaccatgctgaccatggttttatcacgacattaggttcggtacgctgcgactgagatttccccggtgaagtccgcccgctcccgcggctcttacctccgtgtttctttcaagaacacccgcgagactgcccaggccatcaacggctggaagctccagcgcgcccagaccttcctccagaatgtcattgacaagaaggaggccgtccctatgagacgctactgcggctccatcggccgtactgctcaaggtacgaataatcatcgatttcccgacgtaaacacatcggaagctttggacatggagatttgggattgggatgggattggataccggaacgattacaagctccacgactacaagactggtgaaggatggatatggctatgagaatgttgggctgactgtgatggaaatgtaggcaagcagttcggtgtcacccgtgcccgctggcccgccaagtccgccgagttcctcctcggtctccttaagaacgccgagtccaacgccgactccaagggtcttgacactggcaacctcgttgtcaagcacatccaggtcaaccaggcccccaagcagcgccgccgcacataccgcgcccacggtcgcgtacgtatcttcgaatccgagaacatctccagcggggagtgagaggggagggacacacaggctaacatatggcagatcaacccctacatgtccaacccctgccacatcgagcttatcctcaccgaggctgaggagaccgtcgccaagtccgaggccgttgtccgtgaggagcacctcaacagcagacagcgtggcgttcgcgtccgccaggccctcaccgccgcctaaacggttggtcgtgtggtgatgttcgggacgtcggggtatcttttgactggggcttgatttttccggaaacggtgtactgcgagcatggcattctttcgggtcagggctacgattccagaggaaaaaggagtcggtcacgaatactcaataaaaacaattgagaaaccatgaacgcgggaaacggggttataaaaggcgcaaaccgaattttatttgcttgactcgactctcggccgaggctgccttgcccgtttgatagctgaagatacccagcgtctcagtcatcttgcgtctctcatccgtgtgaagcgactatgcatgccgtggtgctgtggagggcagtttggggctgtagtgataccatagggtgattcctaaccattgagcttgtcgaacatatctgggtcttgttgcatattgatgattatggtcttgtgacaccggtgcttgctacgatgatatcataaatgattctccaacataacacactcaatgccgtccacattcgcatgcttatgcctacatggacacatgcagctcataccgctcactagaacagattccgctcccaggtacgctctatccctccatctcaacatcctccccacccccacctctccccttccgtctctcctctatcctcttgaccatcttctgcttcccttgcccaacccaactcttgtacccatcctcccctccctccttcagcctatactccactacccccttcagcacctccccggcaaacccaacaaagttgtgcttcctcaacgcgttctcaaactgccaatccctcctcttttgctcctcccgctccaacaactccacatcgcccaactccctcgccctgatcctcaagtctctcgtcatggccaagaggttaaacctaatctctgcgtcgccatatctcgcaatccggcgctgaatcacctccatgaccttttcagggaagctctcctgcgtgcaaggcccatgggagatgggagcaggctggaggccgtccagttcgtaaagggtcccgttaaagggcgtgtaagcgataaaatgaaacgcatcttccgtctcgtcgtttgggttgcgggttgtctcatccacaaagggagacgatttggcaaaagagttgtgcgtgtctcttatgacatctgaattggaaagcgcctcgccgcggaactcgggggggaggtcgatggtgaagtcgcggaagtctttgaggacggggccgatgtcgatttttgtttcttcgtcgtcggagccggaggttttgttgaggaggacggagaggagggcttgggtcccgcaggcgttggggattgtctgggcggcgaagaagagcttgttttcggcgatggagtggtcgaatgttccgtcgaggggcttgtcgccggtggcgcggtaaggggcgtcggttgggtatttgaagaggaagatgacgccgtagacggggtggagctcggccagggaggaggggtcgagggtgaggagttcttcgaattggacgttgcggacgccgaggttggttaggaggtaggtgaagacgccggcgtcggattcgactggggagggttagtatggggtgtttggtcggggatggggagggggagggagacatactggtattccagcttccactcattttgctggttggggttgacaggttactcggtcgaggagatgtctgtctcgagggtgggatattgtttcgttgggcgggtgacccaaaaattagtatctgatcgaacagggaaagccgttgagcccgacgggtcgattgcgtggctcagggagctgtatgtaaaccgagctacaggcctcaagaatgtttttcggcacttgggattttcttgcaatgatgcggttcatcaacagctggaacgttgcaggtccgataagataagatgatggatgatgcaagcttgggagcctgggctgtccagctttcttggcgacgacagctgcgtgccggctgataggtttgcatcttttcccaaataatgtcaccagagcaacgatgcagcccctgaaagcccctaaagatgatgaactatctcggtgccttttatccaacagaccgttttcaaaaacatagatacaagaaaaaaataaaatgacgagaaaagaaaaaaacaggacacagacatatataaacaccggaaatctaagtccgactcgctgcctgtaccttcgacccagtatcctcaaacgtgaaagacaaaatgcaagcaaaacagcagccaatccaaccagattcccgaaccagaatcgaatctaattcctctaccatctaccacagatttgatcccccatccaccatctcacggccttgggtaataaaccaactcctcctccagccccctttacaaccccgtcgcagcagcagcagtactcttatcctccaccgccgccgtcgagttattcggactcacccgatgcctcgagctcccaccgctcccatcattcgaccccagctgaaaagtcgagttcctacctcggcgcttggtcctaagccaaaagatggcctcgccgattttgcgaaaaagccaggggcgctcgccggggggtcgccaggtccagtattctttcatgtcgtagttttcgggcatgatggtgccccgggatagtttgatgatggcccagatgcagaggtttatgcccgcgtaggagaagatgccgctgggggggggggggggggttacctgggggtggacgggaaagcgaggagggggggaaggggcttacgcaaaaaggccgtagtacactgtaggtaaaggggataaaggccagggtgatgaatgaagggactgcgtcaccgatgtacgcccagttgattttggtcacttgtcggatcattaggcagccgacctgtcagtcgtgttagcttggttagcctagaagagaggaagttcgcttaccagcatcagagtacatccagtagcccaaggcggaattgaagcaaatataggggcaaagaaaatacacaggaagaaacaaaatccagcagtgacagccgtcagcccagtccgaccaccctcagcaataccagcaccgctctcaatgaaagccgtaactggtgagcatccgaggagcgccccgagcgagatacaaatcgagtctatgcagaatgcagtggttgagcggggaaagtccttatctttacctgttgtccgtctgcaaaaccgagccatggaatagagtgttgctgtgcagtcgatgatatccacatagaggagggtgatcaaagcgacaagcactttggtgtcgaatttttcacccaagtcccattggatctggccgagggtgtgtttgatggggtggaaagcgacaatttggcggaagtatgtgaagcgacggttgccatcgtccgtatcggggaagtacgtgacggctgtgttgcgtctggagaaggttagcatccgagtagataatgacaaagaattcctagggtttcttacggccaagacaggattgaaaccaaagcaatgccaatgacgattgaagctcgaaccttgaaagccatcaggaacaccacgaacagaccaccgagacaaataccaatccacatctgtgaagtactaagttagcgtgcaagtaactcgggatttggtttggggatttacctttgggttggtcatgacctctccagtacactcgccatattgatccaaggaactagctggacaaccgccaatagccaagggtgtactgatagctcccgtgatgatgccaattccagaggaatatgacataccgatgagtgtgagaaacagaccgatgccaacaccactggccgttttgatggtaccgggaataatcttgaccagccagtgtcgcataccagtgagggctagaaacatgaaaatccatccttcaatgaagacagcggtgagagcagtcttatagggaatcgagccggtcccctttgcgccaacgacttggtaagtgaagtaggcattcaagcccatgccaggactgtggaagtgtcaggacaatacgcttcaacatcgaataaggagcatcttacccaagacagacagggaggttggtgaaaagaccaaacagaatgctggagaaagcggccaccgcagctgtggcagtgataagatccagcttgacctctgatttcttgtcagtatgtgtgacacatgaagtatatgctttcatggattttcaactgaccttcgtagcaagctgtccactccttgttgtttacacagttgcccgcgttgtcgagtggttttttgcattcgcaatcgaaccccgtgtctgcgagaatggaggcctgtgagggtgtcagaataccaagtgtaaggaatatgccgcaacgacaccttacgttgacggcaatgatgtaggacatggtggcaaatgtagtgaggccagcccgcaactctgtagagaagttggcatcgggaatactcttaggctgtggtagaagcatgtcagccgccagtgttctgtttctcttacttggagccatactcactccgctccccttgaggttgaacacccggccaacgaccgagttgttcattcgctcatcaaccctcccaacgcggtccttgaaggagtcaagtgcccgtgccttccagcttctgtgccttgtgggcagactcccatcagcatggtcatcagcctcaggcgccgaacagctcccgacaggtcccatctcaatcccagcgctgcgaatgtcagtatgaaaattcattgagtcatgagtgacaaacggaagcagaaacgggcaaggcaatccgaggggaagcgagagaaggaaatgactgaatcaatcaaccccgccgcccaggggtcgttgtgtgtgtactccgcagcccagacagccccttgttaagagcgcgcgtgtgggcaaagagagccttgtttctcggaaacaatcgagctcggggcatacaaggatagtggaggggtactcagagatccccagaagaatgaggcacgacggtgaagcaatgcccggttccacggcattccaacttaaatggccgtccagagcaccagacgccctgtctgaccggccctgtccggggtgaaccagaagacctgggacaagtgccgcagctgaccgacccggaggcacggcagggtgacagcggcagcaaagggaattcgactgttcaaggagattgacagggcggagacaaactcacggctttttcttcggacccagctcagggctctcccacgagaagtggtcaaagtggtccatgatgtcacggcggggggtcgaaccattcgaagtgggtgataatttttgaggcggtggaatctgcgagtctctcttgagaacggcgtagcagagaggagggagagctgggtttgttgacaaacctgtacaagtcgctctgatggtcagggcgggcttggattgtgagagcaaggtcaagaatggccaagggtccacaaggtgttgagaatgtgtccaaagcaccaagagcaagcaatgtggggatggggaaagcagtactccggaggagcaagtcaagagagcgggcctggtcttggtacagtcactcgacggggtgctacctcttattggggtggcctacgcatactggccagaccctgactgagcaagagacagaaaagataatccaacttatgatgtagatatgctgccacttaggtagacggtcgccccggaaaaattaccaacttcaacattttgatttgtggatcactgaaagaccgtatctataaattctacatatcagcacccaatcggactaagaaactcaacagccggtaaggaggcggtatggaagtggcaaccactcagttaaatacaaagggtcctcgacaagttccgagctggagcatcaacgagtgagagcctctcccctgttcctttttgacagagccttgatattccagccagtcatgtaggtgtaagtgatggaatactgacagaaaggatgaagaggcgtgtaacatgaagagcacgctgccgcagtgccaggccaggatcggcaaaagaagcaggccggagatcacaaattctgacacgacatgagaatacagccgtatttccgtgctcacgaaccacgacttgctgtgcgtcagtcaagccccttatacggcaggtgtcttgttcctggcgccccccccccttggagccgcagcagaaactttctgcataagcgcatggccgaatcttgtttactcgcgttgaagctgcttggttcgctgctgctgtgtctgctaaacggcccttttggggcgagtccatgcggtttctaatgcaccagaatgtttgtctggtattctaaggaccaaccgttttgcccccccccctttttttttttccccttctgtgctgtatgacaaccatagccgagcagttcaagacatcaacaccgagtgctgccagaaggcacacggctacgggccgcagggaatcagcggaagatttgtcaatcaccgtgaggcaagacactatgccatctttggtagataagggcgcggttgaatgtcccagctgctggcgaatcttttggcaatcaatctgatcattccaagttgaccaatgcggcgtttaaacacggtctatgtcaccgtggctgaactggtggtgcctccaagtacgaatagttctggaacagttcagctgaccatgttatacaaatatttttcgacgaatctgagaattataagcatatgaatttctggaaaccgggctttaccctttaagctgtcgacggcaaagcgtatgcatgttgaagcctgggtggtgtggtatagtgtggtgtgttctgaaagtgctgatgcgaacccgccttttgaccccaagaggacaaaacgatacgggcgttggtgaatgaaattggaaagagaagctccaagatccactgaggctccatctcctgtcggcagttgaggaaagatttgatcggttccccggatgccacccgatagggacatgggtcagctcgatggttggtggatctccagatcaacggcgatcttgggcttggcatccaacatgtgggtcagggacctcgagcacatttcttctttcaacgtctgtcaacggccctcctcatggaagctctatctcgaacatggctggatcaatatgtcaatatgcggccagggcttgtagccatttgcagaacttgctttttcattacacccatcgcgtgccagcatatccgacgagcgggtgaggcggactgcatgggataagcaggggcgaactgggcaaacttcatctgtttattccttcattcacctgcccgcccgtcgcatttacaccaggagcagccaagctcccgtccgtgtgggacatcacacctatggcatctggcgtcctctgtgagatctgagacgtgggtgaagttccatcgaggaaggacgcgaggaaggacgcgaacaccccaagcgtggttgggagagcctgatatcggccgtctagagcaatcaatattagtagtgaggcgagtgatgatgctatctcatctttcttaccctacctaccttccacggcagcgcggcgggattaagtgggattttactgcacgtcacttacctaccctttccaatgcacctccggacggctgacagtggtagtaccacgtctcttgtgacccctatcaactcattgttgtccaacttgggccgagtcgaagagcgtcaaatagcggccttttgtcgtcgataaggaaaaagtatgctcttgatgacgccgcagggctgttggcgtggtcttcgagatcagacgaggggcgggccgtgatgggtggaggttcacaaaaatgcgagatggtctgacttgatgaggtagatggcgtttggccgttgaagttcctttggctgcagaagaaatcagccccagacgacgccatgtatctggaatggcgatttgtttggcggacacacctttgcaggacagggaaggggttgactttgcgaacgccgagctgcagtctaacggccgagacttctcgtgaggttctcagggagcacagatttcggtgcccgccagtggaccccttcatcccaccgcttgaagtcgaagctactgtacctcagctgtcaatttgacgacgagcagcttcctgataggcctgcctgctcctgtcatcatctaaccttgccctggaagaacgccgcttcttcttcccccattcgcggttcgaagttgcctttccggccccaagaaaggcacctggcacacagcacgacttcaacttccctcgttgcatgcacgagtgcccaatcacgtaccgagcgcaacctgacagtgtctcactcgattccctgcattgcagggggatcatactcccatctcagcgtgtccagaggccaacagctaccacaacttcaccagctcctgtgtggcaagacataataataatacacaaaaaatcaatcgccaatcctggtcaacctatttatcgtcttacccctcttgtgaggggttggttacgtcgggtctttcatccccctcgaggccaacttgagccgattcaccaaaaaaaaaaagggtcagggttggctagagggttgatctcggcacttgcactccacctcagccaatctaaccccagaggacctaatcacagtaattcagtagcttgtcgttgctctttctcgcactcgctctctcttttcggtgggctgggcaattgagcattagtctcggcaaacaaccagtttcaactcggcatcgcatacgcattggctcttccggcatcctgtaaacagcctcgttttccttctgctttcgccatcagtggcaggttcgctatgtgggacgtcgactggtccgacgtttctatcgaaaaggttggggagagacgagcgcgcaagggaatcgaaagaaactcaaagagggaggatgttcagagcgtacatgggtcaacaggcagccgcccctcctcgactgaagagcgaccagccatgagcctctttgaatccatgggcttgaagcgcaacagcatgtcaatgaagaacaagaggaaggacacattgcagccagaaacgacaaaggacgatggcaaatcaagacggacatctctgctggctgctgcggtttcggccctgggcaatacaaaccggtcgtcgactgtgtctgacaagtctctcagactgcagaccacgctcacagaaaaggacattgtagaagacaccaccacggtaacaagtgggagctggggggcgccaacggatagatcatccaaaggtatggtttctgggaaacccacaccattccaattgccaacaccggcagtgctaatgtgtcccccagagtcaatgctctccaagtccactgccctaacaacgccgtctctggactttcagggggaaggaacgatgggagatgtgcttgcatcagaggcacaaaagcccgtgcgcccaatgagcgactcgatgaagaaaagcacaaccaccgaccacaacagagctgttggtcccgtgagagtcgcgagcctaggaaaccaaccgactattctcataaataacacaataccgcaaactccggcaacgcagaattcacgctcaatatcctctctatcaacagaacttgagaagtcagtatcagacttcattgacaattggtatgaagttattcacgcgtcagacagaccgattcccgtcaccatgccggagcccaaacagcccaacgagcagcaccctcagtcacaaggtgctgtcaagctacctctgatggcccctttgcctcgaggccccttgccagaggtcccgaaccgacctccgactcaacctacgcctcgtccatccagagcaagaatgctcagcactctcccaccctcatatcagcccaagggttactacaatccagatcggtggaagccccctgatcagtggaaacccaagcggggcagtgtcgaagaagctcctattcctgccacggaggcgtctccagttgcccaagaagttcctttggtcgtgccaaaaaagcgagtccggctaccaaaagacaccgaggctgcttacgcggcgactttgagagttcaggctctgcagatggagttgaagagaatggcccaggcaactcctgaggtagccctcgcacgtctcaaggagaactggggtactgttacagatcccatagtctaccagcagcttgagcaggaaaagaagcgatggatgctggcctccctgtacgggatggaacagcagatcaggggcggtgacaatacagctgtcactgtggccggagcgcagccatttgtccaaggtccagatgtcttgtcactgttcgattctgactgtacgaaccatctgctctcttcaatagcttgaaatccccgctaactcgtcgtctacagctacgacatcctatctcgcagtcctccacccggagacgagtatcaagcacatgaactcaactcccattcctcatcttcagtacccgaatgtccagtcctttccctggcctgtctcaccttcacttgccctggaagcgaacaaattcacctcggtgcattgtttgtccatgccctctttgctggcaagccaagagattccccagcttctccagaagatctaccactgtctcgcccctcaaggagtgttgcatcttgtggtgatagatccatcaccagtagcccactctctaggaccacacatgagagaatggctggaagaacacctgactaccagcctcgaggccgaatttcgatgcatcacccccagcagagtgtttccgagatggctggaggcagccaagctcgacggcttgaacagtttcaccaccaagaacaagttccaagccatcccgccttcccagtcgcgccacgacaatggcaagggcaaggccagagcaatggatcctcacgaccaggaggccatgattatgggagacctccggagcgtggttggcaggatgctgtggcaggacatgtggtccaagaatgtgcgcgcaaaggcctggtggtgggagattacggaatgcgtcgaggagtgcattcagcttggtacctactgggagtactccatcatccaggcaaccaagaatggtgaagactgtagcggcaactctcaccgcagttcgtactaacctgctggacccaacgatactgggcgctctttctgacgatcacttgccaatggaaccagctgtatcgaaactcgacaacattcttgctatttgttccttttcggcctccacagcatcaattattgcccctggaattacaggacagagcgaccggtctccttgtgcatcgaaacggctttgccatcgagttattgtaacaacagttggcttttttaccgaccaagggctccctccattcaggcatgaatttttctttctctggtaccgcgcctgttctgactttggacaagttgtgcaacattctcatgaacggggccaacaataatctcaaaaactggaagctgggcaaacgaaatggggggctagcctttttattcagcctgtatatttgtgatagagatttccaaatcgggcttttctttcaccgggtaagagaggaagtttctcttgaagtcagggggcaaggttggaaaccaggctggtttggtcagtggcgtttgtttttcttttctgttcccccccccccccccccaccccttcacaaagctcgaggatcttacttagctttgggggtcttttttttcatgtagtgtatgtagcttccgacaaggaaacgaacttttgtatgatctgggtttgagtctctttggctgatgttttgtcatggggatggggaaggtttctttttgttttgatgtgttgtatgaatagtacgtgatcataggggagttgggttggggggttcatgatggggtttgggacatatgggggatggcgtgaatgcggtgtgattgaggtatgtgtatgaacaggatgagagtgctgaaaagctttgcatatgcgggttgggggggggaggggacggatgctcatagtctactaaacaaacaaacaatgctagttttttctcttgtacgtttggtggctttggatggtgaaactggttgtgtcttgttataactcggggtggttactcccctaggtatgatagccacacacacgacaggcagcataatttcgctctttgacgttctctcacggcggttgataggttcacttttcctcatcatcgttcttctccgacttccgtttcaacctctgctgctcgtagattatactcaagtgtgggattagatctgatggaccctgcttctttccgagggggcatcatagacatgttcaacaccgggccagaaagaaagctgtgattatcaccactaaagggcatacacatatctgtctgtctgctttgtgatatgctgtttgcaactggcacctctccggatgcctagctaggcatgtatgtaggcgctgtccatgttgcttgtagccagttcctcttccattccccaaaatcatccgtgacagtcctttattatgcaaggctgctcaggtggtttctgtgcttagacaccacccctgacccccgcgtaaagtgtcttttatcctgcgaactttgcagaaagattgcatggttgtcgctttgttgaaaacgaggtgcagtaggcagtggtggttgactgagcgctatggaataaacacttgaagtcaagggtagttatctaaaaaaaaaaaaaaggcttggatatcattgcaatgcgtccgtgcatacaaactaattcgccattgagagacaaaagtgaccattaagtgaattgtccaagttcgccctagcaatgataggatgaaagttgacaaataccatcacatcaacgtcacttacaccactccatcactgaatgctggatgccacccaccacccaccacccaccgttacaaagaaggatgccctccaaaagcaaacactaacggctcacccggccgggactccggagcagggccatcaacgggagacttacatgcattggcgaccggtgacggtgcggggtacaggcaaaaaggaagtccgagtccctcccgcattcttgggactggaccgacgaccaggttacaagagacaccacaaaccttcccaacttgggacgacaacccccatttcagccaattaaccaacccctttccatgggccagtttcgacgcccggcccccccccccctcccctcacctgcaggccacagaacattccttcccacacatttttctgctgaagaaaaaaggcttgagcgcaaacagaatgcattctgcaaaagcaagaatattatgatgaccgttttacccatctgatcggtggcgtttgccgacgaccggcgcacggttgccattcttttacccataagcggaaaagtcctccgggtgaggcgttcaatggcttcggagaactgttgacgccgttgagcgggtggcttgccagctagaaccaggcaccttgctcttttcattgctgcgcactggggattttccaacaaattccttttttgtgtacgagccggcgcgagggactaagaatgttacttcctcgtggtcgagcatggttaaaaaggaagcgggttcttggccgtgtctgagctttaggtctagtggacctcgcgaggcggattgattgggttgtgattcttgggagtccgtgctttgatattgcttcaacaaaagtgagggggatataggttgcgctgagttaagctcaacgggagcgccagaaccgcagtgttcttgacactgattgcaccaccatcggtgaaaggctggcagtgttctgtatgagtggtgatgggttgctcagtacaactgacaagctcgcataaggctggccgccatatgacatgtaggtttggcaaccagctcgcagcttccggagctgccataccaaggctcagtcagaaactgggtgtcgtatcccttccaaccaggcctgcgggagagttggtctctgcgagaagcggcacgggtgtcggtttccatgcagcaatacctcgctaccaggcagtcagaaaagattgcaacgccgatatgtcgacagaagcccgcccgaaaggagggcaggagctctggtctagagctatccgcctgggaaactatcagcacagacacacacccaaactttggagtgtttggaggtaggagggggttgaacttccaatctctctgccggccgagctttccgatagaatctcgatggaatgatgggttgcgtgggggtttttctatctcgcctgtagacgatgtggtgaagggcgtggtgaagcactcatctcgtgaagcaagcgatgcttggagtgtcgacttggcatcggttttaccatgtgacgatgtatgtggacgagatttgtaaatctgtggttgaggggtgatgactaggaccaggtctcaaaactcaagtttagcagcatcttgacatgcgtgacaagctaagaacgccgaagagccaacccctgagccctacgaactcgtggtcgatgccctcgacgccaccgggcatgccgtgtggttgatgaaacaaatcttggcagccttgtcgactacttcgtacaaaacatcgattacccgtgtcgagctgggcgagaggcatgtcgggtaaaatatgatgaagcatctaccggtgctacagacatccgaagtcggataattgtagatacgaatactactgcccgtctgtcttcctcgcgtcaacagagaattgatgaaagactgcgagactccgcaagctagcaacggttggagacagtagaacccaaaagtggttggtgaaatggtgattgtcgtgaagccagtctgagcgtgcaggagacgagccatggttgaggacacagaaaaacctgggtcttcactgcaagaacggagaagccatctcaaagcggggaacgctagccggggttgaaaacggtcaacagtcgaaacggttttggctcacgtaatggttgccggggggcctggttaagtgtggagtcctcccacgtggttgatgtgtttcccccagcctcaattgatccatctctttgccattttgatgagggaggtaacaatggatctgatatcttgtttggcgggtcgagttgagcaccatctgaactggtagctacgaaatacttgggtaataccctctttccccgagtcattcagacagccagtttggacatcaacgcttcgctgagaaacgtcaaagcaaatgatgaccagtgtgtcacagccctcttgctcccctttcacgactcagatcgtagcaaacgcctgggcaaacgatagcggcgagggcctttggaaagacaccgtcaagtccgtttctgtcgggatatcccagcatcccaatacagcctagaattcagaagtgtcaatcgaacacggatgatgtttggcaatggaaacaggaagccgtcacatcccacgacatacatacaatcccgtacaaccggcaaagcgtggtgtttcctttcttctttttccatccgatggttgatcatgctgatgtcgaaggatacggataaggcagtgtgagcctgaacggaaagcgacgttttcaacgccaagatgacttgcagggtacccgcaggggtatgtcaccatcggaagtggatctttctgggggagctctgggacccctgcgagaaagaaaatgggaaccaaagaaccacatcttggactggtaacaaccccgcttgtcgctgtgtgtcgaggtcttcagtcaagcacctgttaattgttgcgaaagaaaactgaccagaattgcagatatcctccagtatatgtaaggtgtattatgggcgtacacgtactttcgggagcggaccgagcatgtcgcagattgccttttccttctcgtttatcatccgtacacagcgttgggctacccaccttatttgacctctcagccaatcctacgccttcacatccgtgtccataagccatctcttcgtttctctacaggcaagtatttgtgccagtacccatggcccccttttgcccagcttttgtctgcatcatatgcagatcgaggggcaacgatccgtgggagaagacacggtacagtggtgtaccctcccgttcatctagaccgtcttttgcttagtgttgcaacccctgggatacagccaagccaccgcgaagctggcctggttcgtggttgggccctgcatggcatttctccatgtcctcttcatgacgctttgcattctggctagccgttctgggatcaggtaggtgctccttttcgtccgggctccgtttctctcccaagctctggttgaatacttgaatccccactatccctctacaccttcctcgattccactgtcctgggtctcgcgatgggaagctgggttcaacatcgcacacggccttgttgacctcgccaacatctacgccgatgccaacactccgaagcttgtttgatcgcactcacgccagcacttcactctcaacccgaggaaaactctacgcttactgacgacaaagccagagaccggcgggagacagtcacttggaagatctgattaaaagccagtcgtgcccgggaacacaactacatcgcgacgccgttgctgttcttcaaacacttccgttcgacttcatggtgcgcaagtgatcgagatggccgaaacaaccaatccccgggccgagctcccggtcgatgtgttcagcatcattgagcgcacctgctccgtcttttccctcctcggctcagtccttgtgattggcaccttttgcgcctccaaagcgttccataaacccatcaaccgtctagtattctatgcctcgtttggcaatctcatgaccaatgctgccacgttgatggctcggtccttcatcgcgaatccaagatcggctggctgccaattccagggatttcttattcaaatgtacgttttttgcggggggagaaaaggaccttaccattcagttgctgatttgtctcgtcaggttcatgcccgctgatacattttggacattggccatggcggtcaatgtgtatttgaccttttatttcaagtttgatggagctcggttacgaaagatggaaatcccctatcttctttgctgctatgggattcccttcatcgtcgccctcaccttcatcttcattgagaccccggaaaaaggcaagatgtatgggaacgcaacgctgtggtgctgggtgagccctaggtgggacatcttccgcattgcgacgttctacggaccgatctggtgagttgttacccaagatctctcccactcgaaccaaacactaagcgtttcggtcttctaggattgttattctcatcacctttttcatttacatccgcgccggccgcgaaatctacaagaaacacaagcaactccgtaactttagcaccagtcaccacgaccacgaaccgatcacagaggaccccttcagctcggtcaagaccaccgaggtttcggttacctctgaagtcattgacaaaagtcttgcaaccttgggcatcgtacaaagcggaaacgaacaaccgaaagcaccgaatgctgcctactcagttcacatatcatctaacaagcgagctcccgagcgggactcttacggcgatataccgccgaccacacaaactaacatcacaatcgatcctccgacacgcaacgccaccgctggggctaacccactccgccgtcgagctgcctatgaagccaacaatgcgacctggtcctacacaaagtgctccatcctatttttcaccgccatgcttgttacatggattccttctagcgccaaccgcgtgtattctgtcgtccatagggagcaagcgtcgcttccacttgaatacatgtccgcctttgtgcttcctctccaaggtttttggaacgccatcatctacgtcgtcacatcgtggagagcgtgtcaactgctgtgggaggataccaaggcctggtttggacacaaggatcagcattcccacggcgatggttccttccagatgatgagcagcggacggaacgcattcaagaacagcgacaagacgtacgagacagaaagcatgacggagttggcggggtcggcatcacacgccgaggatcggtctcccattgagccaccttcaaatacgctgggtcgagattgaacatgctgccatcattttttgtttcttaatagtatcgccttgattgttttttggcgttaagactcgaaatacagagattttggatatggctcagggcctaattcacatgtattctatgcagccacttttttttttgttttttttttttgctttttggctgttattgcaagacagcagttgcgcggtggttctgggtagcggtgggaaacgggctacggagaattatacccctggatttttccttgttttttttatggttcatttacaatcactttatgacttttatatctgtcatgtacacacgaggtatgatgggaactcgagttacagctttgatgcgacatcgagttcggacttttctttatgtttattttggattaaacctgagacattcttgtccttcaaaaagtttccaggggtttgggatatttatgtctcatagtaaccgggagggctggtaaaagtcaactgggataaaatcaggtagtcctgacctcatagcaatagctatggagtttcaatggatgcattaattgcaatctctcacacagagtttggatcatctcttatttgcaatcattgcctgccgctttctgaggccatcccaggttccagatccctcagtcaacccgtgccgcatcatcatcaaccacagcgtcgcacgcaacacgacgctgaccacctcctgtccaggaacccggggccctgctgcgccgcccaacagcaaacgagagcctcatgacacggtggaattaagttacaatgatatagaccaggaaatcggtctcttcagctgcgaactagcaccaccaagacttaataattatcaattgaaatcctactgtgtatttacccctctgctacctgccttgccatatcacactcatgagacagccttgtctcgtctcatccttggccttccattcttctctgcatcccccgttgcttctttctgcctgcatacggatgtcactgatgggcatgtttgaaacacgattctggtcacaaatcacacaagggcctgggtgccgatctcagatcttgatcgaatttttctttttgctttttttgagatgcgaatcaaacccgcatgtcccaccacactgagatttcttttttttccttgtgtgtcttcaaacggcttcgatcttgtttgcgctttttgcggcggcaggctgcagaggaaatgttccgatcacttttcggggtcgggaacgcgcggggacataggatcgtggttttgactctcgatcgagacacaaaagaacttgcagatttgttcatgtcgtcaaattgaattgatcataaagaaaaaattgcaaaggataataggtggtgttgtgtttgcttgtgatgctcgcgttgtgcttgccgagatagttgactatggcaagataaacaaactactattgctatatgccttgcaagaggttgcagatctgttagtgagacatcatcttactcaactccacccatacaccactcaccacccagcctccaaacacattcgggaacaaaaaaaatcccaagcctgtggttcatgacaggttgacaatttcggcagcgtcgaaaccatcccgagaaatcccagaaacttttctttcccgccataagcgataaccgcggactggaagcaactgttaaaagcctgatattttctgacacatcatcaatccctccaaatcctacacatgtatgtatgttcagcttcgaacaaaaaagagcgcaatctcaccataatcatcagatcattcacttcccatttcgttctgcggaggacttcccaaccaagcaatttcttcttccttctctttccccaattccactgtaaccctcacccaagaaaagaagcaacacaccaaagtctggggaaatctggctccaatcgccgttgtctccatcaaagaccccataacgatgtcacattccccagagaacccactgcggaaaggctccgtttgggaggatagaatccataattttattctgaccgcgccggcgaacttggtctctgggagttgatcactgggcaggcgatgagatggcgaattgatttaaagtagattcatatgcctcttggcctttttggttgacaaaactcctcggcatcgtcggatcacgattcccagggaattttgtccctcagctcttcctctgggtcttggtatcggcgatgttacttcagtccaaaaaccccacaacaccgtttctctgaccgttttttgaggatgtaaaactgtcgcacttccccaattcatcaccaccaccaccaccatcaggcaacctacctgcgaccgccttaaacgaccacaccacaccatcactataacctttgcatctttccagtccgcttccgaatttcccatacctgccctccccctatccctcctattctcctgcgtcaaatctggcagcttacctttgcatccaaattaccctgcttgcttttgcttgcttgcttgcgtttcacccgcccagcagcagctgctatatcccacaggaagagagaggggcgaatgttgtaaaacaacacacacttcaggttcgcttccgcgggggatagattgattaccacccaacccttcttctgtgtcgtttttgccccccttccacccaaatagtttgagtggggggtcgctcttaactcagccagccacaaccccagcagtccggctcgcccgttctcagttgtggtctgagggatagctaccttatgtagaacaaacgtcccagaattttggggcgaagggaggtggttcttggataggatatactcaccagcaaactgagctgggtagcacacgctctttggtcgtaccgggtcattagttgactttccccggttatacctgttttatggactgttgtgatggtgcgacgaaaaaaattggcttgtcaacaatgcagtcggcgggtggatacatggagagaagaaagcccgtctagtgttacctttgaaagctctgatgctcaaacccagagagctccgaaaatcccggaaagaacagacatggcagccggcgaatcaaacaatcgtccttcaatgttgcttgaaagcagctgaaagagacgaggggtgttggcacgatgatattggccgagatatgcttcccctgggcaaccaaactataccccctgaattggtggtgcgcgtggacaactttcccattcagccctgcttgtgaaagcctgttcgttctgtacgttaacacccttaccacaaaatagttgatacacacaagtaggttaatccatatcatattctaacattatgctacgaaggatagttagtatgtctttaaaatatctctaaaggcctattagctatcttgaaaggcctattaactatctttaaaggcatggtttacgatacctatgatatgagtccatctactctggtgtgccaattatttcgtggggagggtggatcatagggggttcgacgaaatcaaagccgtaggatgcgttgattggtagccccccgaaccaaaggtctcaccagatggttcaccgtttttgttccttctacccnnnnnnnnnnnnnnnnnnnnngtctcaccagatgttcaccgttttgtccttctaccccccacctccccccacctgtaaatatcccccaaatttcccttacaagaaaatcccctctatgaattatttttttaaagtagaaaaaaagaaaattccccccccccccccccccctcaggatactcaactacagcccccttctcccgcaccctctccacaaactcaaacccaaccctcaagttctccgtcccgctcagcgccctcgcaaccaacccctcacacctctccgccaccaacctcctgagcccactcaccaaaaactctgctatcgtctccacaggccaaccatccggtatcacctccaacacctccaaaatatcaaaccagcccccgaatctctccagcaaattccccgtgcgctccaccctctcctctgggtcctccaacgccaaaaactcgccgagcaatgacttgaaaagttgtacctgctcctcgtacgtaggcgggagggagctatcgctatcgcggcgtttgttccgactaccaggtgacagcgccgcgccgccacggatacagtacgagactgcagtgtcgtagtctcccaggcggtggactaacaaccgcaaggcatcgcgatgttgccttgcgcggccggcgaggatgatcgattctggtacgaggagctgatggcggagtgtgttgaccccgttgttgttggagtcttcgtgaccgttgggttgcgggatggtagatagcgagtcgtctatcctggcgcggatggctgtcgcgttgtagtcgtgtccaccggatagtaactggagcagccgtaaccggctctgccagacctcgctgttgggtggggtgttgtctgataggaagcggaggtaagttggtttaggggggtggagggcacggtaggcttcataagaggcggcgaccatctcccgggtttcttcggaggactgcaagtcggtgatgacgatgtcgaggtagtacgtgatgagctcgttgacgtaggcggtattgcctttgccgaagacgaggtgctcgaggtagtatgccactgcgtcaggggcttcttctcgcaagagagcgacgacttggccatgctcgaatccgggaaacctccccttttcgtctgcgaatacttgaacaccgagcttggggttgcgggcggccagccagatggcatattcctggacaagagcctggttgctgatgttggagaggtagctccggatccgttgctcgccatccccaagctcgccgcccttgtcctcttccccttccatgatgcgtctccatgttgcgagaacttcgcctgccattttcttgtgttggtagagacggctgagcacaaaaagtctctggtaggtctctagtaagtccaccgcgcggtcgaaacaatccacaccatgatcaacaagatcataaagttccttgcggacagagccgcttcttccgagctgacccaagggcgtttccttgtccagctctagaagtaccacaagaagagatgcatcaacagttctgaagacctcatcagatacgctcccaaaccccttctttttcctggttgccgtgaggaaccggcgaagaaactggaggacattagacgccaatgaactgacgccctgattctctaatccatcctgttcacgggatatatactcctccacgacagttttgatgcccccatatatccagattcctcgtctgctgacaatgatctcgttccggagagcgggtataagcgacaagacaactctagcgtccaagtcgccatcaagaagatgctcttccattgctgccgtctgaccttcagtgaaaggtgtctctgtcgacgtcagaaaagcaacaagaagcatgacgctagcccgctgcttgatataccccagcgtcaaaaattcaagctccatcttcggttcccgcccctttatagtctctaaaagtgagaatatccgtaatctggtttcaagcgtggttggctgagactgctgctcccgtgatgctgctgcgtccaaggcagcctctaattgcacaagcagaggatttcgaaccgcccaccatatattcgccccagcccatacggctagtctggatgaggtcttcgccagcctccggacaaagtcctcgccttctttattgcgattagtctcccattctggtgggagcacctcgtcatccgactcgtcacggttgaagagttcttgttcctgtgttagccgttgaagggaaagcgcggtgcgggagtcgttactttttagcgataccgttggtgtggtagattgtcccctgaatggcgagaatcgtctctggcacagccgctgtacaatctgctcaaagtgcatctcctcgctctgcagcagagagcggatgcctatgggtgtatttcctggcgcctcgttcgaaactgtgttgtccacctccaaccaccatttttctggctcgtcctcgccaacattcacatcaaagcgttgaatttccagcccattatgcaacccatcctcgagctctttagccatggacgcaagaacatagccttcctctgcctcaccaagagatgggcgtgatgatgacgggtcaataagtccaccatcaaccacaatttcacgtggatacctgtcgaattccaacgtcggccttgttggatcaccgtcgagattcacaaacatgccaatacccgggtcaagagggccggtgcccgtcacgagaagaaactcttctgtggttggtgatactatgagaggtttcaacaatacagtctcaggccttgctggtgacattgttcgggaaggtggatttgcaccggcagcttgtgctgctgataccgcctggggctgcggtgatcggttctgctgggcccgatttgggccatcttctcctggcgccgggctgcgcgtcggtgttggcgcatccgtatcttggaagacaggatcttcagtttccccttgccgtcgttgtatacccctcgagatgaaatcgcccaagcttgtgctcctagaatgcccatgtgcatcagtaggtggccgaggcgaggccgtagaagcactcctgaaaagacctccatctggcggcccagcaatgttttgggcctgcccgaagggacctcctggctgtgagtcgtcaagtgatgatatgctcatgagcgggatcttcagctgccggtcgatatccaccaatgcatagcttctcgagtccgccacacatgcaaacgagtccctacgtacagatagtgtgctcccggcatagtcgatggttcggtatacacgtggagcatcatctccaatcctcactactctgatcttgcggttcaagtgcagtagtatcgtaacagatcctgatttgtcgtgccccggcccagtcaagtcctcgttcagatcaactccaccgatccaattgcaattcctgaccgtggttccaaatactgggcttagttctggaagtgaatagaatgatacggttgagttgcacaacacacatgccttggcgacgcggggcagcaggagaatctgctggacaccaggccgtgagccattcgatgagccgttggtatctgaggatgctggtttcagtcgcgaggcgagaataaacgtgggattttggttcgagtcggcggggtctggtgggatgccaaagaagtgaagcaattcagaagcagtagtgccaacatagaggtttccgtctgatgattggagacagtgtcagctgctaatccacacagaggctggtactggaatagcgtacccaagtattccacgcagttgatctggatatcctcctcgtcaccattttctgacagggggacgccatggagcagcgggcgcaaatcgaagggtcctataccaggcggcgctgtggttgccctgtggttcctgtgccgttcagatgccatggcctctcgcgcgacatcgtcgccgtttctgggaagatgctgcgaatacagtaggcaccggtggtcgtcaacaccctcgtatcgtcgttatatcgagaaacttgctacggagaggctgacttcttgatgtgccttgtggcaggaagcttccaagtaggagtgcgcccattgcacccctgtagctcacctgccaggtcccacacatggggctggggtgacgaagctcccccaactgcatggaacggccccacggctcgggccaaagtcttggcgcctcacacagtccctgagcggccacctttccagctgttcagcagccgaaacatcaacctccaaaccataacaacattaatgcttgccacacctcaacacggcatccgctgccgtccccgatagctaatctagtaatcgcgcctacaaacaccacgtaatggcagaagacaccccatcagaagctcccgccgcggcggctgccaccgcgccggcgaccacgacgacgacaacgtcaaccaatgaatcagtcaacaagttccaaaacgctatctcgcaatggagaagtaggctcatttctagattccgagtttgaaatcagcacgtgtctgacttgctgctccatcaggtctcgatttcacgagccttgtctcgaccctcgacaacacagcctccgaaatcgttgcctaccagcgagactcgacagtacagagaaaagaccttgcgtcaaagaccaaagaattccgaaagctggatgatgcgagcaagctttctgaagtcaagggtttgctaaagggtaagttgggattttggtgttttggtcctggctcaagggaggaagttgggggctaacagggactctgctcagcttaccagacgttcattgatcttctaaccaaccattcgaaatctgtcaactcggcctttttgcacgcctatacctccctatccgaagctcccgatccgtacccattgctcgaggcctcggtcgattctatgctggtgtctgaagacaccttaccaaagcttagtcaggagaacgaacaccttcagaaaacagtgtcaagcttgactgcccagctcgaagagaccgaaacgagactgcaaacagagcgcgacttgaggaaggggttggaagagaacttggagaccaaggtcaaggaggttgaggcatcctggactgcggtgctggaggagaagcaggacaactgggctgccaaggagaaggcgttggaggacaaggtcgagaaccaggatcgtcttttgaacgagatcaaggccagctatgaagtcaaccagcggttgggcaagggcgatggagaggagggtcaagggggccatgtcacgagcgcagagctggagatggtgcactcggatttggagcgcaccagcgcacggcttgccgaggttgaggctcgcaacgagcagatgaggctggagctggctcaagccaagtcacaggttcctacacaagctgcaatttcattggaagacgaccccgggtatatgaggatgagatcagagaattcatcacttattcgaaagctggaggcggcgcgcgtggataaggaagggctcaagcgaggtctcgatactaaactgcgcgctttggagcgtgaagttggcttactcaaagaagagcgagacagtttgaaggccaaggtgcaaaaatggagtgattatgacgaagtaaagcaagagctggaagtgctgaagagcatcgagtttgccactggcgatgatgacgaagtacgagacatgtccacagaccagagcggcggacaaggcaaaggcacccttgagcagctccttcttgcgcgcaacaagaagctgagcgacgaactcaccattctccgagtgtcacaccaagaccttcaatccaggctccaaaacctccaagaggagctctcccggaccaatgctgagctggagaagtcccagaacctcaacgaaaagctcgaaaacgagctctcgaccatccaagccgaggcacccaacgcgtttccttcaggcgcttccgtagcagggacctacgtcagccgttacgcaccttcaatggcgccaggccgaagaccaggcggaggcaatgggcgcacctcccccacctcctccatcatcagcgggttcaaccccggcggaggcggctttgaagacagacccacgggcggcagcagcggcggtggcatcctacccatgatcacggcccagcgtgaccgcttcaagaagcgcaacgcccagctcgagcaagaactaaacgaaacccacaaaacggtctcgcagctccgtcaggaaatcgccgctctgcaacgcgacaatttgaatctttatgagaaaacccgctacgtatctacttacaaccgtgccgggccagcggtgggggctttgacgtcgtcgtcatcggcctattccaacccgaacccaagttcggtgtctatcggtggaggaggagggggcgcacaaagcccggggatagcgctggaccggtaccgcaaggcgtacgagtctaatatctctccgtttgcggcgtttagggggagggagtcggcgagggcgtatagggggttgagtttccccgagagggtggtgtattcggtcacgaggatggtgctggccacgagggcgagcaggaatttgtttgcggtttattgtgttgttttgcatatgatggtgttttatagcttgttttggatggggacgggggatgtggataggcgggttgttgcggcggcggcggtggaggttgcgaggaatttggggggtgcggcggaggatgttggggatggaggaggaggggggagtggaggggggacggggagtttgtcggaacaggggtttcagacctgatgatggtgaggtggtgatggtgggaaggtttggtgatcactttacaagagttggcggtgtagatgcgagtctgctggccgtgagaatgaacgacaggctgatgacgtgtatgtgtggtagtatacacgcgtcacgattctttggatttaatctttagacaccttgataacagcgagaattggcatgcaaatcacggtttggcaagtccggagcccaaggagttggctgcggactattgggccgagggcggttgcgggaggaagaggtgtggtcggtagactccggcgggcggctggatgatgctcggaaccggagattggctgtgttggaaggctttcttggttgcactgcggtttatgtgtgtgggcctggaaaagatgatgggtggcctcatgtggcgtcgtactgttgtaccatatcattttccttaacaagttgtgaaaagggaaggaggtttgataatgggacggtgggcgaaaggtagaagagatatgttaccatgttgtaatgagtttcttgagtatgggtaacaatttagaccagatttgaaggctggtgttacagttttgtgtgtttgggctgtgtcctggtccctggtgctcgtgggacttgtatcttcggaaccaagctgagctcaggcaacaaatgaccctcgaattcccaggttcaaatcccgtctttcccaggacaagaaaatttgtctttctcctcggactattcaaccttccaagaatcaaggcatctgcggatgtgtccaatatgtatgtgcctgtgtgtgcggtcctgtggacgacttgcccaaagtcatagtgggactcagccaatcaaatcccagcattccccttacacaattcgcccgtctgttgtacaagcggcagacagtagctcgcttggattttaaacgctggccaactctgcggcctggtcttccatcccgagtgaggttgcgttttcccggctttcatgtcccgtgggcgcgtggaacgggcggactcaaggtcgaggaaggtggcccattaccttgagttcggtagagatgtcagtgtggaaggtgtaaacggttggccatcgggttgcaggagagccaagcttctctcccgcggctagggacttgcggggaggtcatcaccaattgaatgctcttggaattattccccatcggaagattccgctggttggattttgtggtcttctgcaggttgttgaaacgaaacaaaagaagcatgcagagcaactgcatcgtgagttgttcggattttcctatcttacgctggaatgaatccctcaaggaggcatgattggcatccagaaatctaaaagaacgccggatactgaagcttccgtgagcactccttccatcgacaaggaaggagactgttggcagcgcaaaaataggcgcggacgcgcagaaagaaatctggtgaagcagatttgcccagaaatttacccgcgattttggtcgttaaaggagggggaaggtaatctggataggcgaccttccgtatgcaacattgacggcgagggaagacggctgttggacagcagggtcgaccgaagagagctaaatagatgaaagggtgcaccggcggctaaaagcttggtgttgacaggggaagacacggaaggtattttgggtaaaaatagctgtgccgcggtgtaagccagccaatgaggtgagtaagaatgtgggttaataaaagtgattgcatgccatagcgggcaaattttcccaatattgcctttggggggtggaagatcattaggtgtacgcctcacgcccttctagaatttcgagatttgtcccaatgtttgggagatcatcgttgaagttgttagagttgtcgctggtcttgtgggtaaagggaattagtggatagtagattccgatgagccggatgatcaacgatggaatgcccaagacagggactgtctccatgttgttaaacggtggtgggatgaggtctgccagggacatcaatttacacgctccacacacccctcattgccaagggtgtttgaattaactctggtggaagcgcacggtcccagcgcttgcaagacgggcggccagggtctgacagacaggggttatccaacccctccaatgtcgatgtcgatctccatcaaccattcagaagacagcatcccacctctgagcatgtcttgtcgtcgtcgtaactgggtcttcggcggctgctcatcgggaccagcgactacgtgcgtcttcggccacggcaccgggggcacacgtctttctcttcccgcctcccgccttgccaaatatgggaaggacgggtgctaccctccagcatatcgaggcggttggccggcctttgtgcgcgcctgttgtttctcgtggcttttgtatatagcccatcttgtttccccaatgatggcgttcgtgatctgctctacaccacatccccttgcatgaaacatctggtctagttcagaccttgttttccttttcagttttccatatctttctttggtctctctgcttgggtttctcttttgggtttcctttctttctttgtgatacccatcgacgaccagactcggcttattcaatagtcgatctaccataccatacaactccaccaatcgagctcaccttctactcccaccaccagcacacaaatcaccatgcgctgcccactcctcctagtccctgcgctcagcgcttctacctgggcagctcccgctttccccaaattcaccgccgctcttgctcccaatatccaggccatctcagattacttcaacatcctggcgaccaaggtccaagaaaaccgggcagcagggtcggcacctatctgcgacctttcaaagctttctcttccaatcggtaagagcatcacgcactcggcagttctgtgagacatactaacccaacaacagaggctgaaccccttggtcaaccaacacctggtctctacctcaagcatgtcgcgattggccgcggaacacaaaactacacatgcgatctcagcaactccactgccgtgccacaagcattcggcgcccttgccaccctttacaacgcctcatgtgtcacatcagcctttcctgacgtgagcgccatgcttacccgcgcgtcactgcactttgatgttgccgacaatgacgctcttcaaagactcgcccccgcggatctccccgtaagcggcatccactactttaccgacggcaccacccctttcttcggcctagataccccccaatggcacctgggcgagggcaccttcggcaagaacgccagcactgcggcgccgctgactgccgccaagggcaagaagggagaggctgctgttccatggctcagactggcagccaagggtaccaacactggtggtcttcaagaggtctatcgtcttgagactgtcggtggcagcgctcctgcaacttgcaaggggatgccagcgtcgtttgagattcaatattccacacagtgagtagccctcaaggttctcaagaaacactaaatcagtaaaactaactttgaaatagatactggttctacgcctcttcataaacagaagccaaccagagggaatgatatgatgaagattgtacttatatcggaggaccttttgttccattgcacataccttttcttttcgtttttctgcttcttcatttttgggcgttcacggcgcccggttggccaatatttttggggcctttggggatcttcaaggcatattatcgctcgttctggccttacataaaggggaaagggaagggagttgcttgccaggagcaaactaaattacagaagcttggttggaggatataacagctacttatttgcttgacaagggcagtaaggagacaggaatactagtaaatagtttaatacccccactggctgaaagccgttcacatcatcggctatgcttctttgtcgctgactgtgacattcatgctgtgtggttctgagaatgatagatgtactggtacaaatcatcctcgaagaatattgacaagcatggacaatagctaaccagccggaggactacattgccgtgataccgtgaaacggcacactacctttctgctttttgttggagatgtggtgccgacattgtgaatgaaatcgcttagtttgtgatgactgaaggaggtgatattcgctaaggctaagggttatatcatgactaaacctggtttagctcacggaaggcggacagacagacgcgtgcataatgcactgtcgatcagggaacaaggtgtttctggtcggttgactggcggggggtgtatatgagatggagatatgggtttcaagaggagcgaatggatatgggttgggggtgtgaagttggtgcgagtgtgagtgagaagagtcaggtacgtgatgactaggtgtgtatgagctggtggtgagtgagaggttgattcagacgctatgagtgatcaagtaggtgattgatttactagagactttgaatgccaaccaagaaagagacatatcaaaacgtgccaactatttatctgatggagccagcctaagaaatattgaccctatacattttgaaagaaatttgattgattaccggtggtgtaatgaggttgaaagaagcacgacccaagtcacgtgagtgttcctgtaagctgagcctgcagaccctttctgctccagatgcctgacgctcattggccagtctggaaaaactgggcttttgaccctgaggcctacaacagaccaacatggtgcctgcctattgctttgatgaaggctacactaaaagaaagggacgacggaggcttatcgacgataagcaggaaagatagccccaaggactgatcatctggtctgcaaccgatatcgttcaatcaggtcgctcctgcctatgaactgtgaatcaggtttttcttttctagaatgataagacggcaaacaaaccctctgcttgccaaccttctcgaccgagcatctcaaccacagcaactctttttgccaatccgagtttttgataacagtaacagactgctatcattgcattcttctcaagaactccgacttaactcaaagccatatttcattggcaatatccatcagagtcgaggtttgagcaaatcggctcgagaaaggcccgatcgcaaatcgacttctcagaaaggttcactatctggcaaaggggaatcgctgttgtcttcatcacccacatcacaactatcaacaagaccactgtctttgttgtcatcacagaattgtaagtcacaccacgccagcactcacttcattcattgctgaccggatcagggtacaccgaaccaccagctccggctacagagagcaatcacccaactgttgacacctccaaatctggatcagctactatggatcaaaatccaggctatcaagggttcagccaaggttggtccaatggcctgaacccatctgcaccttccttcgacctcaactctgccgaaggtcaggcttatcaacagccaccagcccagtttgattccgttcccagatatcgccaccccaacgctcagcccagtcctgattctagccccataaatagccagcgctctcacaacaaaaagaagaacaagcgtaaccgcaaaggccaaagcgaaggcggcggcaccggaggcgagtacctcaccccccgtcaaagacgaaaagctgcccgaggagcagacccaaaccagcccccagtcggcggtggtggtggtcccaaccaactcccaaacagcaaccttccccccaaaccccctcccggcctctcccgagacatggacagagctcgcctaccggcgcaatcaacccttcccgacctcctaccttttgccccatccgcagagtcaggcggcgttcccgttcctacggaagcctacctcgcccgcgccaacataccccctgccccttccccctctccgcactcattactcctcgtcatcgacctcaacggcaccctccttcatcgaccccactctaggagatctgaccactacattcgccgtcctcatgcggagaaattcgtgacgtactgtatcgacacattttccgtcgtcatctggtcttctgcccgaccagaaaacgtggaaaagatgtgcagggatttactgacggacgaccaaaagcagagggttctggccatgtggggaagggataaattcgggttgacggctaaggactacaacagaaaggtacaggtgtataaacggctggagacggtgtggggggatcagcatatcaacccctctggaatgtggcaccaggggaacacggtgctgattgatgattcgaaggaaaaggcgaggagcgagccgcacaatgcggtgacgttgccggagttcacggggaataaggaggggagatgggaggggcaggtgttgccggctgtgcataattacttgaacgagctggccaagacggaggatgtgagcaggcttatgagggttcatccgtttagaatgcctatgaatagggaggagaagcctatgaatggggaggacgaattttaggagatgggggcttgggtggatgtgggggaaggggtttggaggggggtgtataggtggaacgggagacctgggaagaggacgacggggcagaaagagcagagctacatgaaggtggcgaagtggagcaagaggctggacaaggccatgccgtaggggaggtacgtgacgggctgcataccggaggtgaggaaccatcatcagctgccttgcaaggtcctcaatggggatggtacacctcggaaggttgaggagggggaagttggcgagttggatgagcttgtgcagagcctgtacctcatcttgccgcggcggagaagacagaagccgtttaatcactgtatgaataacaagaacgtgacggtgctgtagacagcgggtaggggaagagagggcaatagagataaaaatagcggttgtagtgtaaatcaacaagcgtatattcatacggcatgccctggagaaagataactggtgctgcgagtctgtaaaacttgtagttgtggttaatttgcagaagaacgtagtctcgaaaaatagttgataggcctcaaagatagctgggatgcatgacttgcttttgcagtgccagttatattgtctgcagcgtgatataggtagaggaatagagaaagatcatgataaaagcggtagtgtgataagcaagtgtttaaaaggagagggggaatggttggagggagtgtattacctaaattgtacattcattagtcacataccataccaagaatgcttccaacatctctatcaaatccctgtcatgctaaaaagcatcgcaggcactgccgagtcaccacggtatctcaatatttctgaatgtttttgtttttgtttttcttgactaattttgatactttacacgacaaaacaaactggaatcaaagaactttattctggacgcagtagcaagtgtctagcttagtcgacgctcatcagcgacctgactattggcgatatcaaatcacacatgaaccaaatgggctcagaacccgtcccgtaattccccgtccaacccattcatcagtcatgtcccatagtctagcacaccacctctgccggcccgaaatgcgcttgaaatttttggttgtttatttgaaaaccttgccagaggcgtgggggtactccttgccgttctcgacaatgggcttctcccaggtccactgagcatccacgtactcgcggtcctcgggcttggaggggtcgagcttggtgaactcgtagctctcataatcgggagcgacgtcaaagacggggacgtagtcgtcaccgcggatgacgaaagcaccctcgatgatggagtcgttgttggtgccgtagacggaggcgcagccgaagaggtacttgcgggaagcctcgaggcgggtgttaaggccaccgatgaggttgttggacatgaaagtcagggtaagctcatcgttgtacttgtaacggcacttccagatggagtactcgttgaagggaacgttctcccagaaccactttagggcctcgggggtgtcaacgttggagtactgacgcttccactcatcaagagggaaggtggccttgggaagggcctcaagggggtgcttgggcttgggggcctcagcgggctcctcggcagcaggagcagcgggcttgggggcagccttgggggcagcgggcttgggagcctcggccttcttgggagcgacgttggtcaacttgggggcatcaagaagagcgaactcgggggcaacagccgagtagataggctggttgtagacagtagagtaccaacgggtgacgttggggtacttttgctggaactccttgccgaagaagtactcgaagccgcgggcgatcaagccagtggcgaagagatcggcgagggtgatgcgctcaccgacaaggtaagtgttgttggcgaggtgagcatcgacaacggcgatgacggcgagggtctccttctcagcctcgtcaacagccttcttgttgtaggtggtcttgccgaggagagggcggaaccagttgccgagcttggggaggacctcgctgttgaagaaggacatccacttgaggatggaagcatagctgcaaacatgagatgttagcaatctggtttgcggtgtattccgagtctgggttttgacttactcctgcttggtcttgccgaggagagtggtcttttcgttctgggaggcgactgtatcatctgttagctacaggtatccagacccatattgcgaaagcagacaaagaagtgaaaaaagaaagcaatcagaagttagaaaccagttcaacacggttattcagatagggataactgttaaagaatgtctaggtcatcaggttgtagagggcaggagaggctacaccggacaggatgtcgccaaagggagctggaaatggaaagcggggcaatatcgccatcgaagcctgaataccacataccatagatggcgatggcaatgcactcggtgagagtgaagccgtcagcgccgacgaaggcggggaccttcttgagggggttggccttggtgaactcctcggtaggctgggcgaggtcagtctcaacctcctggaggtcgaggccgttggccttcgcgacggcgcggatggccgtggagcgggggttgccctgagtcaccccatcatgttagttattgagcagccttcacagaaaaggacatctctagcgggagatgggcttaccgggtatgtgaagagctttccgaatgccatctttgctgcggtgctagctgtctggctggatgtgaaggttcggagaggggaattgggttggaggggagtcaaggcgacaatgtgcgaagggtaataaaatttatctggcggggtagattgttctggtggggtgtgtccctgctgctttgctaagccatttctggcaggcagtgaatacatgcgggcgtgtgtgcgggacactgggtgctcaggccacgctgcccaacccgcgaggctgagaggtcgatgcccgccgctttgtgaacgggcatgtaaagaggtggcccgagctcccggctcaatcaccaacgactggaaaaattcctgcggttgttccgtggcgagctcccggcggccgacaccctccgatgggagatagcaccacgcgataatggcctcaataccaacaacaagacgagggctcgccgtcgccatgcggggaaccgtgagacctcggtctctcgagcaacaatttcaggcactgcgactaaacgctaagggttctaggtgcctgtccacccagtccttccagaccgctcccgagatcgattccgtgaagctcgagggcacgattcgagccagacacgcccgcgcggtaccagtatcgccatcctacttctcgcgcacatcgcggttcaacgacagctatctcgccctcgacaagctcctcaggatctacggaaatctccccaccattcccgccaacgccgtcgagcgcgtgtcttggaagaccctggacgatttcagacatgccgtcggtgaacaggtcaaggcaaccgactatgtaaagtgcctcgccatcgtgaagcggttacatcagattcacccgaaaatcaagcctgccccggttattcaggcgttgaacgacttcaagcggagtgtccaggccttcagcaacgaaactgtcaagaaatcgcttgataagtacgggcggtctttgggcagcggcaggaggaaatcgtcttcggcccgggcttggcttgtggagggcaatggggaggttctggtcaatggcaagaccctcgcggattatttcggacgggttcatgatcgcgagagtgccgtctgggcgctccatgccactggtcgcatggacaaatacaatgtttgggcacgcgtggaaggaggcggtaccacagggcaggcggaggcccttactttggccatttcaagagctctcatggttcatgagcctgctctgaaacctgcattgagaagaggcaagtgctggcatgcgtggcttcacactggttccggttttatgggatatatgctgactggtgtttactgtagctggttgtgtcacacgcgatccaagaagggtggagagaaagaagcatggccgcgtgaaggcgagaaagagacctgcgtgggtcaagagatagagcggtttagtggaagcattgagctgtcttgggtttcgcataacggatcgagcctgggcagggtgctgccccagtttttctctatatgtaagcctgacttctgtaacaaccaaactaccaaccatagatgcgactcaagggcttgttcgcacgggcactcccataactgtacaatacaaagccatcggggccctccggtttatagaacacaacgtgcccagtcagtcaaggagggaaggagaaggcatctataacgagccatactatgcctgagaggtctcggcaggtcagccaacacggcacgccgccgaacatgaggcgacgaggagagccagtgagaattcggtttgccaaccggaggtgctgctcgggcggaaggaaatgggacagaaacgtggcaagtcctcggtccgcatggcttctgcccctgcccataacccagtctccggcttgacgattggctctcggtcaaaccatgtcggcgacttgttgattttgggagacgggatatatgagccgcacgaacgtgtttccaattgtccacggccttggctaggtataggaccacgatccccctgactgtcaaaactagaccatgcagcgacccaccaaagtgcgacgatacgaacggccagcccgcgggtagagagaaaacgacatatgaacggcttggtgttgatgtgttctatattacgttactcggcggtcaccagagttggtgactgtttgccctccggcaacggcttgctttccactgatccgcggtttcattccgccgttgaggaagaacaggtgggctgccgcctcgcacagacattgtggcttgactagttgtcacacaaggcttcgagaaggggttcccgaagtgtatatgggatgttttcgtagtgttgggatgttccatgtgagctgatgcaaatcacatggcttacgactcacctcagattccaacctcgatatactgttgtcatctttaaaacacactcaaacacaaaagcccaatgaggaagtcgcatgctcaataaggtaaaccgttacaccatgtcgagggtccggagttagtccagtgcgatgacagctgaaaggacagaattgcctagttgatccagagctaggtagaggctagtgtagatgacgccgagtgccggatatgtttagaacggatcatctacaggatctagtgccagtacgacgtttgtgattcagactcaccaacagcatcaatttaggtgatctacaaaagcattcagcttcctaaggttggagattggcgaccacttgaatccaaacctggtgatgtcgcagtcccgcaatgtttctaaagtcgtgaagcatcatgagctgaatcgaagacgcctccatcgcatgtcaactccgaaatccgcctgccttcaaaccgagtcaacaacggacgagtggatgcccctcgtcggctcacgctctcgaagcggatgatggaagtgaggcatatccgcgccagaaaaaaaacgaaggttcgcagctggttcatcatgcaatgcatctctgtcgaacgtcgttgagtaccagcggccgtgttgtcatgcgcatcaggtagtggaagtacatcgcggcctcagcaaagggggttccagaagctgccgcaatacagcctctgattgggcggcaacggcttctttggctggctttgggccaaccccccggtcagatacgacgcggtgcatgcgagcacagacagggatctacctcgcatctctggactctgtttgacgacattccaccccttcccctggcatctttaagtcaacgacatggatccgggatccatgagccctccttcattataacagatatactaacctaatgcacgacagcaccgctgtaccagtacctgtggcccaaccaaccaagtgccgacctccatctccgtccaagggaagaaaaaaaagtcagttctgctctgtcggaggtggttgcacttatggcaccaatgccctgcacgaggcgtgggagacatggaagcagcagtagggcaataatgggaagggtaattgtaattgatctcttctcttgctatttagctatctaggatccaacgctcagacagtggattccaacagccttttccattccttcaaacaaatggatatcgggccggcccaatgcgttctggcgggagtttcgagatgggaagggttgggaccgaaaaaccactcatcttcttccatcctgttctgcgctgctgaggtagcccaggtgctgcagccgctacacgcgatagtggagagaacatcctgcgggcactccggctcctttcaccaccaccgcgaggtgtaaatattctctcagccaagaacttggacactgactgattcattcagtgattcgtggggccccttttttttacgccggcagttgcttttttcctcccacaagagtacctaccgcaagtccgcagcagcccgacagcttagcggctggcacttgtgagacatttgaagcatctgccctttcccttgggaccagggaaggaagtacttgccaaaccgggcgacgtgacggtctcaaacagagcgatgatttgacgcacccttagtgagtgagttccagggccagagccctggttccatctggtcgttggcccaggcatgacgaatgtagagggaaggtgtggtccactttaaaaccctgccattttgggacggcacgtttttcacgtccagcgagagagggtcttgctgtgaggccgggagggcagggcagggcagccagtggaattgttttctctggagatcatcacgctggacacaccaaccgttttcccgcccatcgcctcgtaccggacaactgaccaaggatgccataatacggattcaacgaacaggcagaggtttccgcgccaagtattcagaggtcggcgctcttgtcgctcgttgtttgatgttggctccaacgctatccagggttctcggcatcttgttcgtgctgtccaggtccccatgcgagccaagctgtttagtaccatcgccccattaggccctcttacctgtcatcatcaagatcggagcctcatccgttttatttctcagatttctctttccattacctcagaagaccgggtctgccaaaaccaaaacgccatgccgaggcacgggccgaccatgcggacctgcaagctaccgagtaaccaggcagaagagacagatggttgaatcaccaatgaaaaggaaaaaaacaagaggatgttgctgcacaggagaaacaaaaacgcagagcggtttcgttgccagacaaacggttcttggggcatcgctcaaggggtctggtctacggccaatgtttcgaacattgagactgttagcccgacatctcgccagtcccggcctcaccttagcttccgaggctatgattgatcggttgacaatgacctcgacattagcacggccattgcccaagtctgtgaccgagggcaggggattctgtgacttctttcttttctccctaccggtttgtctgacaatgggttatggaatgagcttctgtccggagagaactgctcgaaaactcagcatcaactctttattcgtcgatgctacggagggggcatatcccacacgctccgcctggtcaacaccaccgcaaaacaagtaagccatcgccaattcagacgtcacacatcatcatcagcgcggctcgggttctacgtacgccacagattcacattcagcccggcaagccttccggatcccaagatccaccgagccccctgtctgcccgcgatccgatcctggcgctggaaaggcgtctcgcttcgtgggggggggtcgccgtagatctctcggccctgcttaaacccccagtccatctgaacattgtttctcaatacacacctcacatagcaccccatgtgtgtcttaagccaagaggtccattctgtctaggtacgtcgcccgtggatctaaaatggctgtgggtgggtgtggagaagcgtcaaagtcctccagatcgacgagggactaaagaggtaccttgccttgctagtacctctatgtatactccattgcccagcaccaagccgcacttttctacctttgccctgttgttgaactttctttttgttctcttgcggcaacctagctcggcattcacactacatctccctgcgcctccaacggccagtcttgggaagtatacacgctagtctctccaaacaaccgacgatatcgccgacactgctgtgcagtttggagtagtcgccgttgtggttgtctgcgcagccgcgcttctgctgaccgtgcagcccggtctgagtcctgatacccaaatccacctgcgagcgagcaagcaaattctcgggagtcgtctatataagacccgagccgattcgtgtctagtcccgcagtctccacgcacaaccaaactcggcggtcccttgcctttgctctctcttcttcccgaccatttgctgcgataacatcatccagccatacaagttctggacccccctccgctgattcagcaagactcgacctcctacactgcgtttctgagctgtaggtgaacgcgagtcaggctttccgcagcattctcgaagcccttcaacaaggccaaagcctggagagacttgaacctcgaaagccttcggctttgtaacttttgaagcctgtcagtctttgacctgggatcttcccagctggttcccctccaccgttgatctatcgccgtctctctccgctcggagccaagtttctctcccacaccgaacaccaggtccctccttgccccttctgataccgcaatcggcgactatccaaggcaagatccgtcctgccttcgactggtcaagtccgttccatctccactctcgcgcgcagagccctccttagctcttgcgggacttgtggcctcacctcacccgctgtggcagaaagaaaatctatccgcgggctctgagcctatcgtcgtcatcgagaaaacacatcacggctgcgccagatatcacccggcgacctacggcttcccgcttcacggctctcggctggatacttcgaattcacacgtcggtaacaccacgggttccaagggtctggaaacgcggcgtcttctaatcgttttcactgacggcgttgacacgtccgtttccccctagcggttgttagttgatttccgttgcgttagtgttgcttgcgcgcgcgtgcggtcatcactccttaccgcaccaccaaagtttttttctcatttttcgacatcgagatctaccggagacacctgtggtccgtggccgatcgactcgccaacgaagccgggtcttttttacctcgcgcgtctactccactctctagcgggacacggagtggactcggcaacacttggacttcgcaggcagttatttcgacgtcaagggcatggacgactctcgaggccagaggaggcagaatgatccgcccacctacagccggcaacatcaccccgcgctgcaggcgcaggcaggacaggatcggaggtcatttacgggtacacagagagatagcaggttccagacgacatcactgagttcttcgcccgccggatcttcccgcggaatgggtggttcagccggatacggcgcttactaccaggactcaacaacgacctcgttccccacgacggccatgacacagggcgcgctgggctatcatcactctgccgctgactacggacagccagactcacggcaaacacagagctttgccggcacgtacaatccatccatgatgtacaacgtccagcaggcaacaggggggcagagtgccggcgtgtacgatgcgagtcaacagttttcctcgcggcaagccgcaggtcttccaatgatgacggatgtcacggccccctacttctcaagcgagccaaccaataccacatccgccctccaagcccaggcgcagacgtcaagcacgccacaggtatatcagcagccgggcttgcatggctattccaccagcagcatggcagccattggaggaatcactacgcagaccactcctgctgcggaagtcaggatggaggaagaatatcccgccacaggagggctggacgatgcatatgcgcaataccaatcagcgctcaagggaattttcaaggacatccgaaatggtgctctagccactgccggagaatcccttcttcaggtctcgacttggcttttgggacacgttgttgaactaggtaagtcgggtgaaactttttccaccctgggtctctcgaaacctgcttctgacagtgatcccttgctccaggcctcacgtctgacgatcagaatctccatggcgaacgtatcaagctgtggaacgacttcaactatgcctggctcggcatgttccagcgccagaaagaaatgatagaatccggacagcaattacagcgctcccaaagcctagtgccgcaagaagagctggaaaagatggccaaggagctgatcaagtattgcgacaacatcgagcgacatggtctggtagactatcagtacggagtatgggaagagcaaattatcgaaagtacgtatcacaacggcccctttttgatctagctacttgatcactaaccaccgcaccagtccttggagagtgcgtcgatctttacgagtcggccaacgcctctggcagcagcggaggcgagggatcctccagctcacgtcggcgatgaagaggctgaagaacgaggacgcagtcaattgatgtctggcttttcccaatccggagattagttttgaccttttggagtctttcgatgtcagaacccagacattcatgtaccaccacattgcctcgcgctccacatgcatcatttgtgtgtctttcttttccttggctgtttgccctgtttatcggttgtcgtgtgctccagcaaggagttgggcgggtcaccttaatacctcttatgttttgtggggatgtattgggagtgggaggacagagagctggacgatgtgggatgtgatgaaggcatctcttctctagctctcgctcggcgctcctgggaatggagcgttttcctaatctggggttggatcttacggcaaagggggagaacacatgcaagggcccgcaacgtccgtgacgacctgcggaataggaaaggcttcttctagcggaggttgccgcctcggatctctttgatggaaaggcggttggtgattctggccaattgggctatggagcttttcagagcattgctttcttgtgtatcttctattaggaacgggttcgtcaggaatccgacagggcaaggatgttgtgaagctctctgccatggcagaacctcccacaaggaggagatggaaaccggcttgtaccgctttgatcaattgaggaaaagttatcaagatgtttgtgatgatgaccgtatatgcctcttggccagggctgcgcagagatacgagtataactggccgggggcaacgccgtaagtgacgaacatgggcaatgatggattacaggtctggatcaggtgaataaaacagaaaaacatcgagtaaataaaaaagttggccagtggtatgttgttcgtacctgtcaccagtgtacatgaatacaatccacctcgaagcacccttatctatctcatcatgctcttgcaagtcaccaaatgaagctgatgaaggctgattactgataaacaaggcttgagaagcaaaatcagaacagggctgagggttatatcgccctcaacaacgggggccaacgcctcaatgggtcacctcagctgatgtatcacggcgttgagtgatcagtccatctgtcaggaaagcccagggggggggatgagttgaaattgggatgggggctccagtggttagactgttacacagggcaagaaagaccgagttacatgcgatgtctccgagcagcgctgaaagcagaaactagcggcgctgcaattgaaagcgccaaggccccgtgagacagagaaactggcccaatcagtttgcaacgtttgccagacggggccaaccaaactgctgggtcagggccggctagctcttttgggccaatagcactttctcactttattatcccgaatcccttatttctacctggctttcttttcccagatcatcacacccacatcctcaacgagaccgcggtcggtcggcactaccagcagcagaaggattgattgtcttctcaactcatcgccccatcttgtctgcggttctcctccacgtcggcccctacccgttgacaccccctggtcgtgttgtcggcacacacacattatctctccaccatgagaggcaggtgaagttacaacgccaagaagccttgttgtgcagagacaaagttacaccagattgacaaatgtgtctcgcaacaccaaagtacccatcaggtacccggttgcgctgcagaatcgagtgggcctcgcgctactgcaagtcacccgccagttgtcactcacatttcacctgcacacatctccagccgatcgcctttcccagggagccatctcccgtccgtcccctgatattatatcgagtgccacagcagcagaaaccgtgcagctcactggtttccctgcaggaacacttgtcagcgtcagactcacctttgatcctcatcttcaacatcccctctctgattgggcacagcacacggccgacctcgccgaccgagataacaagcacagagacgccaagacacaggcgatggcgctcatcaacttttgcgggtgattgcagcgagatgtctctgacccgtggtagaaacggcgacttatacatcagctccgaaatggcctgtactctccgacctacctatctacgatcaaactacacaccaccactaccttacttgctagacatacgaagggcgtctgtgcttgcccaacagcggaaagattacaaagttcgtcttacatacagtctccgcctaccccgtggctttttgttttccaaggtggaccactaggaggcacatcattagggtatcaacaagcattcgatgcttaggatcaccccctccatgatctccagatctccgcagccgagtcccagaaccatggatcgagattcggacggcgcacatcaaccaacacccccacaggacaggggtctgggtagctgtcaagcatttctggggtccagtgagctgaggaactaggtaccctgtcacgttttcatcagcttgcctcagttgtatcacattttcacatcccgcatttcaaaacctcaaaagcaacaaaacagaagagccaagccgacgcgatggtgaccgagccgcttttccgcagggcatgaagctcaccttacttaactgggtgaaagctaacacacttcgatctaacttgtagtgttttatgtgaggcttaccggagtgtttactccttgctgaagatgatgaggattggcatcgacattgccgtaatgagggatgaacagaaaacgatgataccgcgacacccagccgagctggcttggaatatgtctgtggatacccgagacaagataccaaaagactgagggttggaactcagatacacggggaactgacaaccgccatccagcctcgtttgtgacagatcaccgccctctatccctccccacggcaacgcttcctgtgtttctcgggtcttgatcgccagtctcaggccgcccagcccagccctcaactttgacagacgcctgccaaacagggacaggacaagtaacgtccaccattagggagctagtcgtcggtccgccgccgggcgccccagatttagggccatcaccatgattagcctgtaggatgccgctgtggctttagtcaagaaccccgtcctccatctcccctgccttgaaggaaaaggcctagcctaggagtcacatgaggtttgctttgacataccctacagcgacttccacggatggatgatcaagggaaccttgagggagcggaagagggacaggaggcctaaggttttcgggttttttgttctgctcgaggacatggccgggcacacacacaacgctcgagcagagtcgttgcgtatatgggccatggagtgtgacatttgcaagaagaagtcagacaaggtacactgactggacggactttattcaacgccccatgcacgtagccgacaaggggatcacttacatacatgcatggtgagccatacgagggaggaatgcaggtcgctcctcctacaccctctccctccacagccagggacatcatccttcgtgtttcttcttctactcaccgagaccttcatgggtaggtgagtagattccgcgtgtgactggactgcaaccgcccgtgagggttagggagtagaagaacaaagtttgcgagggagaggtggcggcgcctgcaccggtccgttcggctagggtgcattagtttttgaagggaaaaggtaggccgggctggaggggatggacatgtgatttgttgatctgggccgagagggagtgggagggctggggagggcgggttactaggttgggtactccgtacatatggcggtggtgtgggtggtgagtgaggctgtgggttgggtcactttgcggtgtggtgagggtgaggttgagtacatagggaggtgtatgtacatagggtgggtggaagggtggggggtgcggggggtatgcatagcttaccacgaacggagagcaaaagtcacaccattaggtgtactctgtttggaaaggtaaggctgtagaggtatgtttgatgtcaaagtgtccagatggattgatgatgataggttgagactgttttcatggagatgtaccgtaatgtaatgagatgacaagcatggcaatggaaactattgatcgattatttgtctagtgatcatggccgtctctctctctctctcactcactcactcactcacacacacacacacacacacacacacacacacacacacacacacggatggtgcctgcgttggacactcacaccgaggcacacctcgcctaagcggtgggtgatttcttttgacaggaaagcagcaagcataacgtagaagacagatgtgaggcgcacaccggtttcatagtttttttcttcttttgtttcaagtaacaacctaggctgggcatatccacacgcacgcggtgttgtcatgagtttgcctaccgcgatccctaatctctcactaggtaggtaggatcactcatggaggtaggcgtcagtacacaggcaaaagagttggggaggagatgcggtgatggctttttgcttagatctgtgaatgggtggggttcagccttgattcatgtcagttactgattccttctaacagggtgagaggatgtgggcgggtaggttggcgattgagatttccaagttgatctactgccaggttgacgcaacggcggccaagtggaaagctttccaggatgggagagagttggagaaacaataacagggcgtttgcttggagttagttgcttgttttggtatactatggggggacggggtaaaagcatttctttactgcttggctctttcgacaaaatgacatatcagccctcctactatgctttagagtggaggtagatagtttgtgagttacaggtaggtacctgtagtatagtaaagagcacgcaggatatggagtctgtccactgcctacatgcctccgtgtacaaaggggggcaggctaacccccttcttgccctcttgaagtgctgattttgaaaacggaaagacgttccgaaaaagatgctggccgttgctacagtatatatgtatcacacttatcttgctttgactaggaatggaggggctaactatcttcttaaactttgtgtgaacaaaagtccattccatttcaagccatcactagttggtttgttgtttatatcgcttattcgctgtgatttatggcgaagaggattcaaaacacctcggcttaggccctttgccaacatactcaccgactcaaaaacaaaaagttgagactgccggtgggaaatcaaggcttttgggaaatagttcaatggggactttgggaatggttgacagagagcactgttgacatgaatcaatatacggccagaaatagttcaataggcctgcctttaaacacagtttactacttcttgctatcttcactgggcctggcatcttttgatggttaaggaacaaggcaatggtcttgacgccaacacttacagcaactcgaggctgagaaatcagcatagaagtagggtaagaaaaaaagaacaaatcaagcgaaaatcagtaagaaagaattgtcatatcattagtccatttcatgcttcatttcatgccaccttgctgtgtgctgtgctgtgctgtgctatgctagaaaactctcttgtttggttgtctaatgttcgcaaagcatgcctgcccatcattcctctccccaggtctagaattgatctgttcatcttgttttagcaaacacaagcccttcgtcacttcgaaatcgagggagaacatacctagcgtcatactcatgctgacatccgtattctccaccatcttggtaaactcctcaaaactgatcttcccgtccttgtccaggtcggcctccatgatggtcttgtccacaatctgctgcagctgctggtccttgaggttgttgcccaccatcatcttcaggacgatgaacagctcgccgttggagatgtagccgtcacggtcaatgtcgtagaccttgaaggcgaaccggagcttctgctccttgttgcccttggaggagaaggcggaaaggccagagacgaactcttggaagtcgacgtcgccgccgccgtcttcgtcgaagatggcaatcattctttgggatgggtgttagtatttgggggttgggtgagaggaagggggggggggggggaggtacctacctggtggcgagtgggttggaggatatttgagggagcgaaaggaactcctcgcgctcgatagtgccggagttatcctgtttgtgttgaacatgtcgtattagccccatattcgtcatatctctcccattctctcgggacattcccatcctctttcctgttcctattccccgttgatccttgttctaacaaatatgaaatgaacatgccttatccaacttcataaacctcttccgcagccggtcaacttcatccctgtcgactattcatggtgaaaaaaaccacatgtcaatgacttgtccccatcatttctcctgaatgtcatggtgaaaaccaacagttggacccctgaacaatgttgtccagcacgctgctggtctggttgcccattttgactgataattatcgtccgccgagtattatatttctgcctgtatgctctcgtctagagaatgtcttcttaaagaagaagggaaaaaagtcggttggagcggtttggtgctgtcgcgagtcgtcagtggcggtaaaggtgcggcggagggtgtcgatcaggttaatgaaagaatgctgagtgttgaaagggtcaagtttgcgcaagaaatcaaaaccaaacaggaccagatatcaaagaaggttgctgaataaagctgcccgctactctctactcgtgagatatcgatatcggcgcaggcggtcggcggtcgaggctgcaggagcaagtagtgtaattcggtacccaagctccaggttcgtcgttcgtgatattgcagcggaacaagttgatccgtccgtcaggtgaggctgaggttcgtctagttcaggagcttttccccaactcctattttcgatgagggtttgctttgcgatcaacaacacacggcttctggactctctcccaaacccaactggcggcggcgacttacgaaaagcggggtgcggcacaagaaagaggttccaaatcaggccccccagcccagggtttgacggggagtgggggtgatctcaagccacaagctgccgccacacacggtcgtcatgaatggcgcacgagccacatttattccaggttgccttggcaaacgaagcgaggcaacaaacgggcagggcctcaccttgatttgttctcacctcaccttgcgcgtcacccccccggccgcgaaccagcgtcgcgttcaggcgcccatccatggcaagctgaggaaggcgaaagaacggaatgcacgtgccagacacagcgcaaagagagaagttgtatgagagattgaactgcagtccaatcacactataaaatatcagtggttgatgatcatgatactttatgagatttcaaataaagtggctttaaaatgtcgaatttgaagctaaaaaaagtccattcccttatttgcagtgaactaacaatgaaataaaaaaaaaactgacgtcaagacattgcgcggctgtgaattgttccaagcatctcctctccaagataagggatgcgctctttcgcagtagcagagcctgatttttaggtgcaaagaggggcagattgcttggtgtttgttgctgctgctgcgccctttgaacaatttactgggtgcagcacgggaaatgcacgctctcccaatcggctaggcaggtagggaagagtgggcacgttccccccctttcaaagagcccggccaaagtcagccaatcgccagaagcgtcctggaacacgccgccaaaacagcaaattctgcgccagaacttcaacgacactccatcgcgatacgagaatttggccatcaaaataccaccaacaacgccatttttgcatcgaaaaaatcgatacactcctttcgcatggtccgctgaatgatttaaaaaaatttattaggggtttccccaggctttttgcccctctcaccgcccttagcagccatggcgacccggaaggttaggatcaagaagttggctccaaaaacgcctctatccgtcctcagagaagaccaaatcgacccttcagaatacgaacaactcacctccgaagcccaaatcgcaaccggtgtcgaacaggccgaggaaaatgtatgtcaaaaactcaccttgattgacggccacgtgtcacgtgcaccagcacgtgcacggaccatatcaagttgcccttacaccacaagacttacccaacagcacttgatagcatctgatactgaccttgaaatgacaggagtaccatcttcaggcagtcctgcagcatgcaggtgtcgctgccgacaaggaaattcccgtcccaccaccacaggagagcacactcaactatgacgagctctactcacagcggtgctcccagccatcaacatatatccgcttttctcaaacagtagaagaatgcataggatgcatgtatgacatgacggaggaggacgatgtttttctcaaggcatacaactcaaaacgagccgcctctgcccagctctcagaagatgactttgagaagatcatggaggtgtatgaggacaccgccttcatcaaaaccccgtttgcctcaatagaccagacaatagccccatatgaggagatgctccaaggccttcaaagcttggagagaggaaaggtcatgcctcacgccaaagagatctatgagtattggaaatcacggcggcaagctctgagcaaccgaccgttacatcccactctcaagtttgagatctcccctgacagtgatgacatggacccctatgtctgtttccgtcggcgagaagtacgtgccactcgcaagacaagagcacgagatgtgctgtgcgcagataagctcaagcgactgcggagggagcttgaggatgcgcgccagttggccatggctgcccaccaaagggagcttttcaaggccgagatgctcaagactgaccgcgccatctttgagacgcgcgggacactcaaggagctcaaggtcaggttggggatcaagaccgacgacgaagatctcgtcaaccaaaaggtcagtctatcatgccctctcctactgccaccacccccaacggattctgacccgtctccagccccagaaacgaaaagcgccagaggcccctgccgtccagcgacccccaccacctgcccaacttcgtatgcccgtacgaccagatggccgtcctgccgaggcagatctctcgcagctggctgatcgccttgctgagaaggagaacgagctccggattgatatcgagaagaaggtgctgacccatagcgaatggaatcgcaactatgtggacttgactaggggtccgttgtctccggtgcatgggccccttcaagatcccaactttaggccagccaagacccaatatctgatgacaccaccagcttcggcgtcgtcggtatccatggaggaacccacccctatggagcttgacaagccagaaaagccacgagactttggcccgctcttgaaatttaggggagtagctccggatgaggagtcgagagcaaacccgccatcgtaccgtcggcgtattggtcgtctcaatcggctgtggattgatcgtcgtggcttggctagtcctccccgtgaagtcagcgcagaacagtacgaccgctggaaatatgaccagtcgtcggatgatgaggacgagcccgaggtgtacgaggttgatccctttgatacccgggcactgaaattccgcgcctctgtcccgcctccagtgtggatgacacaccgagtagttcctaactcaagaactatgatgccagccgcgcaggctgcgatgatgcagcaacaacagcatcagcagcaacatccaataccaccaaaccaaccggcgtcactaccagcacaactgcaggcgacgaaatcgcctgcacaagtgaagggagcaacatgaagttgtcctttgtgcttttgtgtatttcgcccttatttttccccgtcgcccgttcaggatgcgacgggagcagcaagccacaaaggtggtcttgctctgtatatcccctctctcaacactccgatggtgcatttagcgatgggcttgaaacaagaggagcccgtcgtggctggcgaggagttcggtgcagttggtttttgtgtagcatataattgcggaagcgagcgggcgagtgacggatgatgtatagacgacggtgaagactatgccatagacatagacgtcagggacaagggccaaggcgtgccgggcggctgaataataaaaaaagaaagcagtgatatctgcaaaaactaatttgtcgttccaaacttgccgaagtcgtggtattggtgtgagaatttgcgcgaagaatcggaggcgttgtttgggtcccagttataggtcctgagcgccggtggtagctcgacaaagtttatcccacaaccaattgtggaactcactccgcagccgttgaacatcgacatggccgagggcggatgcgacgcatcaaggcaggttgtgcccaacgaagccgagagcataactcgaagggcttttcgcagaatgctgtgcagaaggttggaaatcatcttcctggcgaaaagaaagatgtcatcccgggaggcaaatggtagccgatgcgccggtgattttgcatccctgggtggagtgattgttggcgagggctttgttccacaggagaagcacaaaccagcagcgggctcagaagcaattcccagctgaccacagaaatgtgggtccacctctcatcccagcatgacgaccctatccgggggcgaacggcaggatgaaaaggaggagcaatgtgtgcaataccgacgccggaatcgtcgcgagctctcgacatcggcgtgaacggttccgctgaaaactcttgcgtgctctgttgctggcaccggccgagaccaaggcagaggcagagagccacatgcgcgggaattccgggtcttgatatctgtgcaagacggccacccgtagagtagaggagagcgcaagcttgtcagatgaagggaaaaccaagctgtgacagatctcgaacaccgtagcgatcctgagcaggagcgaggccacgtaggagtgtggttcgccggggacagatcaatggcgagcaggcagctcccgtgagggaaacaaggcgccattggcagctcccgcgggctgatgccgggtatttttgaagcagatagatgtggaagactgtgacaagtttcctcgaggacgacggtgttttgtgcgctgatcgtgcatctctgggtaaaagcaaagtcagtctcggaatcataagcgccggaagaaagccttccgccaggatggaggacgccgtggcaggcaagcttgaggtttccggagaaggaaagcagaaaatagaacatacctgaagaatcgagagatcacggaggaggagatatactcttcgccaccggaggtgcggtcttcaggccgggaggagggtgaaagatcagcattgctggagataagcaccagagctcagctgggacccatgcgctggtcttcaggggaggaaatcggggtcagaaaatggaggagggcaaaaggttttgcaagatgatggtacagacgaaggaggggaaggctcccggtgtgccggacatcatggcaggcaatgtgttgtgtgtgtggcaggattgctgatgtcgacagcgatggctgctaaagagaattggtactttctcagtgcagtggggcccacactaccgaagcccccaaaaggcgtcgactccagtcttgcggagccctgcatcctgatccaatcgggaagtgcgcacgagccaagaaagcttcggtacgtacccaggcagatcaaacgtcctgacccctcagggaaagaaacctatgccccgctgacgaaatatccgtcccgtcaaaaagctacccctcctgcaggctatcggcggccatcagagttaataacgacgtctaagagacgaaggcattttgtagactaacagaggcctgatattcacctcgactctctacgacctatcaattgagtttctacacgtcaacccgactcctcgtcccagcaagcaacaacgcgcaacaacccagcgaagttcagccacctctcaaccctccaccccacccccaccatcctcatcccaactctgaatactatctaatccgatcatgtctcaacctcactcaccaccaccaccaccagcacaaccacaaccccccaacatgacagacctcctcaaaaaaccccgccgaatagccctcggctgtgagggctcagccaacaaactgggcattggcatcatcctccacgaaaacgacacctccaccgtcctctccaacatccgccacaccttcgtttccccccccggcaccggctttctccccaaagacaccgccgcccaccaccgctccttcttcgtccgcatcgccctccaagccctccgtgtcgccaacatcaccatcccagatatagactgcatctgctacacccgcggccccggcatgggcgcccccctcacctcggtcgccatcgccgcccgaaccctttctctcttgtggaacaaacccctcgtcggcgtcaaccactgcgtaggccacatcgaaatgggccgcgccatcaccggcgcctcccaccccgtagtattgtacgtttccggaggcaacacccaagtcatagcctacgccgagcaacgctaccgcatctttggcgaagccctcgacatagcggtaggaaactgcctagacagattcgcccgaacactagaaataagcaacgaccctgccccagggtataatatcgaacagctcgccaaacaaggcgggcgcatcctcctcgacctcccctatgcagtaaaagggatggactgctccttcagcgggatcctaacccgggcggacgagctggcggcgcatatgaagagcggggggaaaggcccagacggggaagcgtttacacccgcggatctgtgcttttcgcttcaggaaacgatttttgccatgctggtcgagatcacggaacgggcgatggcgcacgtggggagttcccaggttctgatcgtggggggtgtgggctgcaacgaaagactacaggagatgatgggtgccatggcggcggagaggggggggagcgtctatgccacagacgagaggttctgcatcgacaatgggatcatgattgcgcacgctgggctgctggcatacgagactgggttccagacccccatcgaggaaagtacgtgtacccagcggtttaggacggatgaggtgttggtgaaatggagaaagtgatgcatgataccaaagagaagaagaaacaaggtttcacaccgaactaaacaaacagttttggaccccttgtgaaaaggtagttgtatttgcatctggtcgggctggtggccgtttggatcaaacagtccatgaccccacccactcgtcatttcccccgtttcaacaaaagctccgacctacatgatatcgagacacgcaattctcacataagcccaagtgatatctctttctctttcagaccatcaaaaacgtagcccgcccggcatacacacacaccatcatcttctgatggtgttaccaaagtctggccaccaattcatattactccaagaaaccccggcctctaaaaacactgccatgcaaaaaaacaaagccctgcctcccgccaccaccaatccatgatagtaataattcttggaattagcgttaaatcatgtaagaaaaaggaaatatctagatcccttctgtcgtcgtgggcttgtacatgatcgtggtcacatactggttgatacatgtcagcttaccatcaacaaaactcttattactacaaaataaacataccttgctcttatacctcgtcgtcgctgaaactgccaaaatgttattcttgatgctgctcgtcgccaagtgattcaacaccgtatggttcggcatgttcaagacgctattgtcgtccttgatcagcgtcgccgcgttcaaaatcggcttgcccaagaagccgggaagtgctggtggcatggggagcttctcaatcgccgagcaggcagtattgtactgtggcgcatcctcctgcagatcaaagtcgaggagatatcttgggatcttgtgggcaaacagctcggctggcggacagtccctgaagctggcttttggctgctgctggttcgactcctcttccgagacggggttctgcgacctctcagtcgtctgctgtccgtccttggccggagctccagctgccgcggcaccactaccactttccgcggcggaggggaggtcgtctgggttgacttcgatgtagttgacaaggttatttccaaagtcgacagttgttgggaggtcgggggatgtctgcatttggccatctaccaagaatcgaatgtggtgggtgccggggagaatgtcgatcgtggtcgcaaatacacctggccgtccctcgctgtgtcgaggaaaatctttgttagcctcttcttcagaacctaaattctgcgctgaacggggccttcaacagcacttacaccggatgtaacctcgtcttgcgattccactgaaagatggtccccgtaacgtagaccttgtcacctccgcgcttccattctaacctcgtgggcaccgtcggcctattcttgtccaccaaaagtccctctgggtcatcgtcatccaacaccgaagcattgctgacatttgacggggggcgcaccagcccttgcgaatccaactcctcgacatcctccaatggctgtccaatatcggcaggcgagataatcggcgaaccgggcgtgtgaacctcctcctcgatggggaggggcagccgcggcgggcgcgtcatatacgacatatcttgcaagctactatgcggcatgacgacggattcgtatatgtcttcggaccttggtgagcggggcgacctcggggacgaaggcgagttgtgagaataagggacagccacgggcttggcgggctcatgcgaggggccgggtatgccctgcttgacgtcgacgggcttcgcaaccgtcgtggagcggtcagccgtcaccgaggacgacggggtggaataacccgggggggatgcggcgcggggtcggtgctgcagtgattttggccggttgctgctgctggacggtggctggacggcggtgccctgggcttgggtgagggagggttcgggcggggcggcgagccggtgagtctgtaccggaatcggatgtttgttatctcgcctcacgggccgtggagactcattttggcttcctggggcgttggattgggaggatgacggctggctcgtgggttttgatgtggaggggctgtttcccatttttaatcaacctttcttctccgggcgtgcctgctgtccgatagcagcacacgcgaaccggaaacaaaatcgaagggtgggagagcagtgaagcttgggctggcgggtacggggtggtgctgggtgctaggaggtgctgggtcctagcggagtattcgctatgtaacagaaaaacacaacagatgggagtgccggagagcgataacaaaggggagactggctcaaccttgactccgatacggttaagaaaagaagcggacgacagagaattcggccagtttcaaccgcgggtaaagccaattcagaaggtaaatggttcagcagatggaggtgctgaggtccactgtctgggggttcagtcgtttttgatggatcgataaagatccccccccaaccaggtttcccctcgctccaccaccgcaagtcatatgtggtccgtgtcacccatgtcacccagagccggggtcccagtccctgcccagccaattgcgcccccactggtggatgtcttcgtgcatcttcaccaactggttgcaactctcacttacatacatcctctcactcatcaaaggccttacttattcaaagctcagcattcccaaccaaagcccccgctcacttctaccaccccccacttcacttcacttcactctctctcatcccatctctcatcccctctcatccaaaatgtccgaaaactacgtcgcccccggccaacagcgctaccttcgcgcctgcatggtctgcagcatagtcatgacccatcagcgtttccgagacgaaggctgccccaactgcgaagagttcctccacctccaaggctccagcgagcaaatcgagtcctgcacctcgtccgtcttcgagggcctcatcgccatcgccgacccgaccaagtcctggatagccaaatacaaccgcctcgacggctacgtccgcggcacctacgccaacaaggtcctcggccagctgccagacgagatccgcaccatgctggaggaggagtataggattcagtatatcccgtaagtttggcgcgctctctcgactcatcactgctatgtgctaactgtgcatgacaggcgcgatggtagcgctacggaggcggactgagcagagttatggtggtgtgagtggtgatgagatgaaaaaatgtatcataataaatgtagctgtgtgcgattgaagctttttttcttgcatcaatagcgggttgggaatggcgcaaaatttattaaaactggaagacttttgagatttcaaggacgtctgttttgggtactcatatgttttggaagctgtttcgaggagccgccaatttcttgcacctaaggcaaggtcacactatcatcacggtataatctggattcttggagtcatcaccactatcaactcacaccagtaatatatctaggttaccacgctttcccccctccatgatgttttattgtgctgttaaccgtccgacgccccgcagccatcacagccatccatacgtgacagaaaacgcccacccgaatctctcttctccgcactatagaaaccaaccatcgctagcatgacaccattaagcaggctcctgccaagcaaccacatccattacctgtcccgccgcggggtgagtatacccaatcttcaagcgcaaccgcagaggctgttcacaggattgttagcaaagtacttttgtaccatggaacgtacaatcacttacccccttgcaacccgctaccctcatcatttgtgtggcctcagcaccatgcgccacatctgtcgatgaaatgctgagtaactgcaacttctgtgattttggcacagcagcctgcagcccaacattggagagaggggccccagacgtgttcttgaatctggcgatggcctgaactgtgccttccgcgtttctttgtgtctggatagtcacgttcaggccgttgttgtcgtagcaagggtgtccaactgggacagcaggagcagcggccgcctgtggtgctgggacagcatccatggagaagagggcggcgctgggtggaggggcggcagcagccgggccgggaggtggcgtggacgttggtccttgcgaaaagagatccatgatcgaggccacattggactgtaccggagctggcgaagagctggtaggagccggggcgctggctcctccaagaatatccgcaagcaaatccgcgttctgagtgccattgactggcgacggggccgatggtccgctatcgcccatgaggtcgaaaagaagatcctcctctttcggcttgagagacttggacttcctgttgtccgccttcttcgtcttcttcgccgcttcgccaagtactcgtgatgattccttgatctgaggaggcggcatcttctcgagcacaccacggcgaatgtcgtcgtatgaaaacaggttgctgaactcaaccgcacgttgttgcacctcgacgtccaaacttgtctggtggttttgcaacaggcgccgtatccgttcgatctgtgctggctcggagaacctggtcgtgagtttgaccaaggctgtgatcacatactcggtggtaacctgagtaccataactgctgctaagaatggtggaaaagagatcaacgatttcgtgctccttgacctccttgaccaattcctcctcctcgtactgaccaccacggagcagagcatcgccatactcaccaatacaccaagcaccggcttgtgtcaagctctcctgtgtgatgtcctttttgagattcgcgtaaagcttttgtacggcatacgtctgaagctcaggggttgtggcgataagacgaacgaaggacgacaagatcggctccttcacgtaattgcccgccaagctcagcacgcgcaacatggtatcgaattgccacctcttgtttggtgcataacggtccgcagcgacgccaatttgggtggtcatggttggcttaaactcgttatcggccacctccaagaatgccaacagttccctaatcagaacccgaacattgctctcgttgatgagggtaaagctgaggtccaaggctcttctcctgatgctgatatcgggatccctcagacactccaaaatagtattccgatgtctttgtacggcgttagtatcgatggccaccaccttgaccaaggtgttcagcgcgacgtagcgaatgttgttatccttgttcgtcaagaacttgcccagaatattcacacccagaacacgcaagccagagtccgcctcgatatccagaatcgtccgtaccgcctcgtagagaatcgagtttccaacattcttggaagagtcggtgttggtcgcgacctgcgcgagaatatcgttgatctgttctgttacctgggcatcattgcgggccaaaacacgaagcaaccgcagaagcttgacctgcaagaaggggtctgtaattccagtgacgtcgtgctcaggggcatatcccgaggatgccagccccttcagaatcctcacgagagcagggacgaactgcttgaacttgtcgacaattccctcctcaccgccctcggcttcgtcggcctcgcaaagactgttgaccaaggtcaggccgcagagcagcacgccgtgattcctatcggacagaagctggctcgccttttcgataaagtgttcttgtaggtctggtacttttcgacaaatccgcatggtgcagagggctgcttttcgtcgaatataggggttcgcggtggatatcaggttctcgatctgactgaacaaatctctcgacatttcgaccgaggcgatgtttccgagagtacacaaggcaagaccgaccacgtattgattagaatgttgcaggtcactagtaccatcgagtcagttggttgtagggttctctgccagagcaaatggacgcacttttggagagagttggtgaccaaggtgagaacctcctggttctcgtccagcagcaaacttgttgccaaatgccctaaccgcttgtcggcgaaacgaggtgatgcgagaagcttcaagcactcaatctggccgaaatgagtgcgctcgccaagcgtgaagaggtagagtagcttggccacattgttccgcctgtaccgttcctactatcagcacacacactgcccaacccagactgtctgtctccaggggtcgatgatatatgtacctgacaccgtggtctgcgctctcttccctgaagctggcacggatggatgcgctttctttctgaatgacggctctttcgtcggcgatggtcttcgcggcgcgtacgttgcggatgaactgcttgactgtggggttgcaggcacgtcagtaactcccgatacggctggctggctggcgatacattggcgcagatgtaggtaggcaaagggaatggcgggcattaaactcacgggagctcatggtgactttattagggccctcgtaggggcctaggggagaattcggtccagaattgagagcgggaggtttggaggaggttgttcgtgtgttcgctagttgcagaccgttgccgcattaccagatggtctctcacagcgatgtggctctgcgtgctgtccgctggaggttcagggtggcagctgtcggacccttgtcccattcggtgcctcaggcagcgtccattgcgattggcgtctgttccagaccctgagggttcaaagtgggtcgcttccccctttcaataatctcgacacttgccattgaaagaggcctgcaaagcataggtgcaatggagggtttcaagatggagagatgaaattctgtagagaaccaaaagtccccgtcagaattgctgtcgttgtgtgtgctcgctgaggctatctcaccatggcttcaggtctctcactcttccaaggaacctgaaaaaggggtaaaataggggctgcaggcaagcacaccctgactgaccctttgtcaactaatggactttttcgactcttgcaagagtctaattcatatcatacagctgattgcggttgaaatcagactttgaacgacgtctatgtaaggtcaagataatcttttggtcattgtttaggcgctcagttttaccctttgagtcatgaccgaaagaagggctgaaccagacaaacactgagtgttgctttcaatttctcacgatacgtgggttgatatctcaaactcatttcatacgaagagcaaccgctgcaacgtgcggctatccagagcaataaaccattacaactgttgctctcaatcgattaatccctttgcggaacaatatccaagcgattatggagtgcataccaaatgcaaggccgttgaatgtagattaactcgacccgactgaccgtttaacctctgacacaagccacgaaccagccaatatcaaacccaaaattctcttcacttcattacatctctcgcctcccacaaataagaaagctcctagatattctcatccctccgacctcaatctcacaccaactcaccacatacatatttctcaaccatccacctcaacctccaccaaacccaccctaaagcatcctctagagccaacaaccaaaatggaaccaccacaacatcccaaaccaatccgattgtaaacccctttcccccctccccgtccccatgctccccatccatctaacaacctctcagtccccgctccaaaagaattctcctcctcgccttcgccgcaacagcagccttcctcccccgaccctcctccttcggctccggcggcggcggcggcccaacatgcggcatggacgcagtcatgatccccaccgccatccgcctccgcgagagcatcaaagaacgagctggcgggactcgcagcatcccacgaccgcccctgtatctcacccgatcgacaacaaaagcttaagaaactgatcatcaactttcgaccaaaagagactttgcaacacttgttcaaaagtctcacaacaaaaatgccagagagacactgaacaaaaacaacgtgttgcttccctctcggaaaggtcatcgagtaaaattctgaaaaaggaggaatgaagttattgcctgggcttacacaaccagctggtaacggaggaggatgggaagaactacacgtaaagaaagaaatcactggaaaaatcacacctactacaacactcgacatagaataattacacccaacccacctcacctcacctctcgcatcacatcgggcatcatctacacatcctcccctttgttcctctaccttagccagccctatagggctgagcctcgttttcggcttccctagtacatagtatcgtccagcactgccacaatcatcatgcacgagcgggaggaggcggatgcttccttgggggaccaagattattatatactagcggctggctcggcaaaaatgacgttaatggtcagcttattattcccccctctcttcattgcttgtgtcacttgtcttgttcctgtgtaactttgggcaattgggtacacacacaagtctattcccttctaaaacaggcttctcattatcaaccctacactaagaatatcccgctggacaaaaagaacatcgcgctgaagtcgacaaggcaaagagtcgtcaagacacaaacaacgaggcggtggtcagctcccgaccttgaatagccaacaaaaacagactaaccccctcgacccagaaggcaggcccagaagtcttttgtgtttgctgaatgattcccaccccttcaatcatcaatcaccaccttcactgtttgatgcttggtgttggcgtaccccactgacccctgaaaccccccggaaaaggggagcatccatagggtggagatggcgtcaagcatgatgcccaatagagaacaggggaatcccttgcgattgatgtttgatatcaaacctctggcgataaaaccctacccgacgctgaccggggcagacccatccagaatgaagtagaaagaaaaatccgaaacattagacgcaggttttcgtaagacgggacgttaaatgcaaattggctgcttcggagtttacttctgcatcatgagctgcacgaactcgttatctgtagattgtcagcatttgccgtgtatatatgatatgaaaaggtgcttacagtcaatgcgaccatcaccgtcttgatcagcctccctgatcatctcatcaacctcgtcgtcggtgagcttctcgccaatggaggtcatgacatgacgcaactcggcagccgagatgaagccgttattatcgcgatcgaacaccttcacctcctgattagaaccaattggaaggtaccctctctgagagtatacacaccttgaaagcttcacggatttcctcctcggagtctgtatccttcatcttcctagccatcatagtaaggaactctacacctggtcagccatgtggtcgtgtatagatgcgcatgcgcgcaattggcggtgcctacctgggaaatcgatggtgccattgttgtccgcatcgacctcgttgatcatatcctggagctctgactcggaagggttctgtcccagcgaacgcataacggtgcccaactccttagtagtgatttgtcctgtttaccgctttagtgattcgtccattgtataaaaggaaataagccaggcggaaatcatcgttatcgtcgtcgtacgaaatgtcgaacgtgcaaaacgcgagcctcgttgggcgggttggggagatttgggaaactcggctacaggggaaccactaaccatcaccgtccttgtcctgttgaagaggtcagcaagtttgcgccaggaggaaccactgatagaaatagaaagggggacatacgaagagggagaaggcctccttgaactcagaaacctgctcctcggtgagagagtcggcctgtagcgaacaacgtcagcttgcgatgttctcctgaatatgtgttgcgaatgccgcctcattgtcccctcaaccgcggggttaccaggcagttggttcaaggtctcgggcgcatctgttgacatggaagactgaccatcttgatgtgtttgtagtgaacgaaaattggttatggatgcgtggaagcgattctgaagggatctgatctggcagcagcggtgtttgcagaaggccaaagaacgaagtgtagcgtctcggcgagctgatggagtcgtcgtgagggtcagattaaatgagacgcaagctttcgagaagggatgcggggcccccccttctggagaggcgcccgggcctccagcgggcctgcattgctgccttctcctgggtgcgcgcaactgccaaggcaccacgccgccttctgttggcgttggcagctccaccgtcactgtcagccatgttccataaggcccacaggtgctggcagctgacggccgcccttcccccaaggctgttccagctctccagcgcgccagccaaggggtcccagccggacctctcactgcgcctcctgcaattggcaattgtgtctgcttccagttggcgtcatcttccagagagcgagcgagtagccggagcgcattacgacggtgatttacgatgtgatgtcgcaacatccacatttgcggcaacatacaccacaagacggcccctcactcctttacaacttcccatagcgaattgaagggaccacttctacccttcctgcgtccgccatgtggcgagaccgcacaaatctgtaggtggcagcttgccagttcgttctgtttggaaagacgtgagctaacgtgtctgatccagctacatttcgtaccggcagtcctacgcccaccacccggcacaacgaaatcgatatgggccatccaccgtgggcgagcgcttcggcggaagcagcggcgcaagcaccggagtgctcttctcggcagacgaggaccgcagggggctgttatctgccggagcgtacgatgtggacgatggcgatgccgtgatcgaaatggacttgcttcccccacgatgggccgacgtgtcagacgaagtcagcgagatcttggccgatattgcgcaaaagagccagaagctggaacggctgcatcagaaacatgtgctgccggggttcaacgacgaggacaccaaaaaggccgaggaaagagagattgagaagttgacgcaggccatcacgaagggatttcacgactgccacggatgcatacaacggatagagcagatggttcgtgagggcaaacagacgggccagatgagcaaggccgacgagactatggccaagaatatccaggtgaacttggccaccagggtgcaggaagcgagttcgttgtttaggaagaaacagagcaattatctgaagagtaagaatgcacccaaattgtcaagtatggagcgcggatgctgactttctttgcagaactcaagggcatgtctggactgataagcccgatggaccaaacgtcgacatcattaagtgggggtgaaccatctcttatggaatctgatgcggatagaacttattcgcaagctacactgcaggcagctacacaccagaaacttctccactcaaacgacgctgccattgcgcaacgcgagcgagagattgaggagatcgcacagggcatcatcgacttggcgaatttgttccgcgatttacaaacgatggtcattgaccagggcaccatgctggataggatagactacaatgtcgagtccatgtcgagcgacgtgaaagaagctgccaaggagctccaagttgcagaaggatatcagaagaagacgatcaagcggaagatcatcttacttctgttgcttctaatcgccgcggtaatcatattgctggtcatcaagcccaagaaccacgggggctcaccacccagccccccaccaagcgaggaccattagagggatcacaatacacacttggcacggcgcatatttggagggtttgtttgactagtgtagaagggaggcttccaaggactagaagaatgctcccagactggagcaaagagcgcaaatgcttttgtaccacctaattgagatatgtatgatatttaatacctatatgccactgcctttctccttctttaaaagtggacccgacagggttgaagcttcacaagcaaaaggaggagcctggctggagaaaacgacgtagtctcctgttgaaaacggccgtagccgcatttggcaccaacgttgaaaatcatacaaaaacaccaagtggcaggccgcctgcacaaccacacacatttgcaaggcctctttagctccaatctgcacctggtttggcacgttttggtggacttttgacctggaattcaatgccatagatgttttgatatgcatcgtggccatcgaaggtgttgaataatggctcgcgttggtgcggttgcaacttagacggcacccagttacaaccaccactcaccagccaattgaatagccgaccaatttaaccaactaaggccacaccggtcgtacaattcaattgcgggccgaagccagtgaggtgctcgctgttgtggtgggaggccgttgaaatatttgtcggatgggtctgcacgaaaacaccccgttttttggtgcgttttcaccattttttgatgttgagtcaatattggttctatatggctagcgtcgttttcaacaggagactactgtgtagtacgtcgttttctccagcccgggctccaaaagaaggggctcgcagccgaacaatctgcttagtaaacccggaagcacagaccacaccttccccggttgcagcccgctttgctccgtcattccgctgccccaagctttcgaacctcttgctgaccacccgaatcaattgaacatcagctttgtttgttgtcgccgacgcgaaccgcaaaaaaacaccaaccgcactttttcaaatctccgctcacttttctcacaatggggtaagcaattcctcggcttaagggataggagtttggaggggaggggaggggagtggaggaagcttgcaattctcgcgcatgggggaaaataccgacgacattggagggtcatacgattgcggttggagaggggttgaaagcgacaccacaacaatcacgacgtgaacaacgacggggaatagagtagtggggttgagggggaagaacagagggaggggatatggagagaaggaacagaaaaggctaatgggttgtttgtagtctcgtcgacgctcccaacaaggtccctcaccagcagcgggtttaccaggctgcctaccgggctcacactcgtatctggagaatcgtgagtgttccccttccccagtcgcaaggaaaacagaggtggaggggggtctgtccgctggaaagacctggcggtcattcaaaagcagaatatggacatggcaacacgaggaggtatcaaacatgacgtactaacctacgattccctcaaacagagcccccgctccggcctcatgctcaccccttactacgccctcatgtggggtaccttcggtggtatgtatcactccttgagagtaccagcaaagacagttagtttggctgacagaatcaaaacagcctccatgtacgccatgggccgtcaggtttgcggttacaagacctggttcggcaagaactaagcctaccgcatatcagatgatgcagtttagccgtgggaagtgaggggagatagaacaaggcggggatcgaaccttggaccaccgctggaaacttgtacatgtgtgtagcaagaggttgctgagaaacagcaatagaacggaggttgccattattcaccaatgtgtttcttccatgtggtgtgtcctatgatggcgcgggataactgagcttattcggtatgtccgccgattgccgaggctgatatgtttgatgaattctggttggtcttctttcactctagcagttgtattcaagtcactttttgtatgctatatgttcctttggcaaaaaaaaaaagctgtgctcccattgatgttttgacgccttcacccttaaaacccgagaagtcctgtgcagcaaataaataaagccccatctaaaagtacattaatgcgaataggccatggctcctcgttgtaatttatgatgggtatcgtcaccacccctttcagcttccaacctccaactctcaacaggtttaataaccctcagcaccgggggccttctcgtccttgcgcaagctgaccagcaactccctgaatcgttccttgccagagcccaaagcaccacccttcgcgcccttgccgctcacatcgacgatcttggcgatgcgctcccagctggtgccgcccgatgtggtgtcctcacggctggccaggaactgctcagcctccttccttgactgggcaatggtcttctccttcttgttgttgtagttctcgtagaagtcatcgatgttctgctgggcctccttgaccgtctcggcgcgctgctgggcgaactgctctgcccgcttggcgttgccggcgtcccgcttctccctccactccttaatcacttggggctcctcctcctcttgggcgtaagcgttgtagccggagttgtagctgacggagggaccggtgatggtggtggttccggcggggggtgtgaggccctgataactcgtcaacgttgaaactctttatacgcagacacagcggcatgtaatgttgggcgttcttccatacctcatttgggctggtgatgtcagggaattggctatcaaacgcagcactgttattgccggtggcagagatgccgcctcctagcaggtcgtcgtcatcctcgtcgaagccggcgtcctcgactgtcgcgaactggttggcatcgtcaccgagaatggccttctcgcgctctaggaagttgctggttgtgggaacctcggaggcatcctggacgccggtctgggctgcatgcgaaagtgttagaagcgacctgtttccatcaaggtacagggtatatagggggctgcagtcgacttaccgccggagtcgaagtcctccaacgatgggaatctgtcagccatggtgattgtgtctggtggtgccgaagttcaagcggggttatgcgaggaatatgacagaatggcaggtttggaggatcggtggtggtgtttgttcgaataaatccagaaagaggtgcctttgatcgcgccaggttgctgcgcttgcgctgggctccgggggctctggctgactggcacctggagcttgcaggagtgattggctgacaagggggggggggctccagcatatgcttcaatcgggcacactgccacgactatgcaataatcaggtaccgaaacagtctttgatgcatttggagctgggcaacaacttcccagatccatttaaagcttccacatccccatctacttttcccatttcatctctgcagcaaacaaacaaaaaacaaactgcgcattcactctgtcccatccttcttctctgcctggccactacgcctggacgtttggtaggaagtgtagctcctgatagtgcgattgctcgtggcagagctcttgcaggccaaagcaagccgcgacgtccgctttctcaaagttcggccatctgaaccgtgatttgagagcaagcttctgattggggacccattcacaaccacccccattatcatcagatttattgcccgtctgcttcagtttcggccatcttgtgtttaaccaacccccgcaggccatagcaacacatccacacattttatctgttttctcagtctgtatattcaacaatggcatataccgatgatgccgtgttgtcgaagctctcggctctaaacgagacgcacgagagcatcgcaacgacagctcagtggatcatgttccacaggtacgtttcgacctcaatttaagccagagtctcgatgagactttttctctgctttttgtagatgctaactgcgtctgtagacgccatgcagcccagacagtcaacctgtggcttggtaaactgaaggaccttccaccgcccaagagactcaacatgatttacctcgccaatggtgagtgccgtcctcgactaagtcgctggctttgttttcaccttgctgactgttaatacagaggtgactcagcagagtaaggctcgccacaaggaggatttcatcattgcctttgcccctattatcgccgaggccacggcgtcggcatataagggtgccaattccgaggttcagaataagcttcgcagagttgtggatgtctggagggatcgcagcgtctttgacagagagactatccagggcttgtatgagcgcatgggaggttagtaacgtgatacggcaaatttgcgattccgtggctccttactaacgcattgttgttctagaacttgacaaatcacgccctactaacaatggcggtacctttggcggctctggtttccactcgtcaggcccacctgctccctctgagctcatgccgttggttgctcaacaccaggccgtcactagaagtgccactcccatgaaagtcgctctcagcaacgcccagacagagtacgagaagctttccgacccagccaccgcacaggcgacggcgctgccgcttcaggcggctcgtctgaatgggttgctcaagaacctggccaacgccgagggtgctgtcgcggagagcctgcgcacccgaaaggagatgatcagaagcctagagaagcttttggccgagaaccagaacgctctccagcaggaggaggctcagatgaagctgctcagcggccgcaggactgagattgagcacaagaagaaccaggtcgaggcaaccatccttggcggccaggtcaccaaacaggaggatagaacctctaccgagcccgagcctcctcagtttgaggcactgacgccacctccccagagcgatgccgacgacgagcacgttcagagcgaccctatcaaaaccgagcagaatggcaacaatggtgtgcctcagcagacccccacattcccagtagttgccccggggattgagatgctgtctagcgttgctgcaaactaccaagctgtgcctatcaacgggtctaataagaagcgcaaggtagcgccgtcggatgacttcccggatcttggaaacgatggcattgacgaggatgttaaggagatgttgcggaatgatggtcagagtgcctgagattgctgggttccgacactgggttaatctaggaaacacgttttctgaaatctgcatactggaggtttcattgcattttgattgtgtttgtatatactccccagaccagccaccaacctaagagtgtaggtataacgctctaaatcctgtctgttctgttgtacaataatatactttcgactgagccaacctcccagcccatccataatgcaaaaccccaaccaacccaattggtatcccaaaacgccgttatacccaaacaaagcaaatattcatgtgtgtcgtggtggatgtgtgtgtgtttcatcgaagagagtgcctcttgatagggagttgtaggtaggtatgttttaaacacgaccatctagacccgaagcagcaaggtatggccacccgaggatcatgccaatggcagggaagtaactgtatcatcgccgtcaaatgttagccatctcttctgttgatttgaatggggggagagaagaaaaaacatacacagcaccctgctttccaaccctcttgatctgtctcccccagtcggcggcggcagagttggtcgagacgggcagacgctcaaagggggcgtgctcgaaggagcgggcgaactgccggagggacttgtagacggagaaggttctctgttgctgctgaacaccgcggaaggcgacgttgcgggcggcgaggcgggcaagaatgggagacatttttgatgttttgttttttgaagtggtgatgagtagaggttaagttgagatgttggtactaaaagtagacagagagagaggagattgcttgttttgttggtggtggtgatctgaaagatcgaggagctgtgttgatgaagctgttgatgatgatggtgatacaagaagggaaagatacaaacaggatgatggtcaagagttatatattactatttccagcaacaaaagtcattccatcaaagcccagaataaaccaccttgaccaacatcatctcccgaatcgatccatccggctggttggtatccaagctcgtgtaccaaaagcctggaatgaagctccagctcccaagcttccggctcctcttcgtcgtttacgccgtcgccaacacaaatcaggcgctcccacacacaaaatcgcatcaccctcacccagaagcaccagatcagccctacggccgtcagcaaagttgggtaacagctcgggccaccgcggtctcgttttgcctcaccatctggccagctgggtgtggaaatcgtgccatggacccctcgccgttgacgacgttggagagcttggcgccgcccgtggtgtgattgtcggaggtggccgggggtgggcattggcaagctgggctgaatggggatgaatgggaagtttgtgattgggcggagctgggcttggggaggtaaagtggaggtgccatcccaagtttgggctcggttggcatctgacatctgattttggggattctagattttccccagaaatccccaatgcgaccactttcgctgttgatgactgcacaaacgttaatccgaggtgaactgaacaacgtgacggtttgatctgggccaatctctcagatcagatcgggtcatcaagggatgggaaaattgaacctggaattcacaacgcggtttgctccgacatgtgagtttggttatggcaaagttggagcgggcaaagcaagtcggcggtttgcgatcctgatctatccggtgcctggatcgaaatctcatgatactgccttattctggataagatctggagctgagaggtttgggtctggcacaatggttgatatttgtcttcccaatgggcctgaacgacactctgagagcaaaagctcacagtgatgggaatcaggccgtctccgtccatcatccccacggtgatcatgatatcacatttgttgctcctgtattgcctgtatgagtattcgtgtatggctggggcttacctcgtccgttcgtattggtctttgcatccggtttctgcaattgctttttgtttcgtgatggccctcatccagcatacagctgattggagcgaagctccgtaaggttatgggtgaaacgcatggctggagtttgctttacttattgtaactgaaagctgataaacggaggattcttggcgaccaagagatttctggatccttattgacccattctcatatctggagcatttcctccttcgaggagacgaccggggaggttcgaggcccaatgtcggcttgctctgtatacttagccgcttatcatgcgaagtagtccctggccataatgaatgagtgttgaaaatgacacaacaccaggctgtcatgcctactgcctgagtgacaagagcgtgctcaaccaagttttggtgaccacacgctgggttttcaatatacagcaaatcgtcaacatatcccacaaaagtcacgggttagtacaaccatttttattttaggtcgaacaaacctcagcttcttcctgatcaccgtcccacaagtcccaccagctttgtcagaatcccgacgccttaagaaaccacatgccatcactcatcgccaatccatcggcttgggtaatcgtagcgtcgtagggcaaccaaacttttgtgtaccctcacaaacctggaatcccttgctttgtcatattctcggactcggtatccatcgacaccccgccagtccctcttccgctctcttcctcgtccccccaccaacagaaagaacagctctctctcaacaccacatccagcatcatcagctctcctcctgcacatcctatatcaagccaccctgccttacctatttccgccgctgatgcccaacccagccaccatttcccacggtgtcctatttcgaggagcgtgtaacacactcaatcatcaccacatacgggataaaacctcccgttctggcatcccggatggctcatcccgactcattcccatacgcacattaacagaatgcgcgggtcccagagaccacaaaaacgccacgccctgcagtcccatcccaccggtcccccttggccccgtttcctacaccctcatgtttcacatgcactgagaaactcggtgagcaagtaccactcgaaagtgaggcgagccgggaagttatcaagagatacctcccacagtgcaagtgaactcccccccccctctcccccctgtccttgaaccctggtgctaccctgttgcatgtgcagtgcagcaaagcaacccgcctttcgaataacgtcccccattgaccaccgatgctttgcatgatgcctcttgtagcggcgtgttgctcagatcccattcctacctataggagccctcgctttctcctgtcgttctgactggcaggcgagattcccaagtaggtcattgaccgaccgaaaaagcaagttctctcccctcccattgcttccccctacccaagtaaaaaggcacagagcccagccagcaagcattttccctgtccggttcctcaagaacgcaggatgttgattcttgttgcctgtctcaatgagtgtcgtcctgtggtcctcgaatcctcagtgccctgatcctggtcctgatctctccctgttgatattgttcggatcccttgtctcaccctgctatctcccactccttcgcaagcttcacccaagctgaatacctccatctcgtcgtatgccgctgggttgttgcgtgtttgggttatgtaccatggaaggggcggcttcaattgacctaccagaccaagtattcccccgcaccgagacatgcaggctgtgtccccagttcttgactggtcagaatgttggttgcggttctagacttgttggccacgcactgaaacctgcacctctgagcacactggtagaaaggtaagcatgcgtgtgccttgctgtgaaagtaggtcatgatgccagttttgaacccagcgtcatggtgaggagcggggtttactagaatgcgtgtcagtgaagattacgatagacctgtatgtgtgtgtgcaacgcgcataaggggcatgtatgcagtcacactcagatgggcataatgatagctcatatctcaccgcctaatgcgcgagtagagacaggcaagagagacaacaacgtctgccggatgagcatgccataggacatacatgacatgacatacctgctcccggcatgccgttctgagttctggggatccttctcttgtccatccccatgatagtggctttccagaaatgggacgatctcgctgcggacacctgcaaagccgagatggtcagaaatgatagatattatcatatttgaacggtcgtgactccacctttgctgccggcttccgacccctccccctaccctagggtcaagactgcgaatcggtgattgttgtcgagatctggggtcattctttgtctgcgaccgagattcagtcgccgatttctgagccgctcgttgttgctttttggtgttggaggagcaagccacattcgcttgccatccagtccccgtacgttcccgccctcctgcctctctcatcgagacccctcaatctgaccggtgggcaataatctcaggtaggcagccgacgagtctcttgtcttctgtttcgttgctcggtagatcaacaggtatcctcgatttatcatgctgctggagataacggtcgaggaatttgaattgtcgacatccgtcactctgtccaatactgttgcagatgagggatgaattgaccgagcaacaccgagaaggtgtatcatgaccgcatcatagacgcaatgccgaaaagcaatggaaacgtaagtccctgtgaagatccggagcagcctcttcgcttcacatgaaacgccacggtgcgcatcaattgttccctccaggggcggtagtttcgtcgattcgactgcaacacagccattcaaagggaacccggtggcccaaatccgcacatgagcccacatgacaccgttctaatgttgagcacccaggctcgaactggatatatgatcgggtcctccgttccgtaaaatgtccgaggatagctaaacagtcagcaaggtcggtttggagccctagctctgttacacaactgccccaagcagcatgtcaccatgtgcagagctaggtaggtcgtcaaggatgtctgcggatagggcgtcgacgaagatttccaatgcacaacatggaaatagaggctccccccaccccggaagctgccctgggaggccaaggcggaacggaagtgatctcggacgcaacaatgagcccgagtcactgactggccatatcggaacttttaagccgcttctttggtaccaccagctccggtactcttcgtagaaatgagctggaggaatctgggacaggcagaagaaaaaaagggtacctgaacagaaccccgcctcaacgacatgtctcattcgctcggagttcgtcactgcaggaattatgtctctgtctttgaggtgtcaaaatgcgcttgccgagacatgctctccaatgcaatggtacgctcccgggcctttgcattagaaacgaaagctcatatccatagggaaaagtagctcaacagtccgaactctgaagtcacttactgtgtgacgacaattgctgacactcgagtatcaatgaagcccgatgccactagtcgagaagtcactttgtaggtccttctagctttgtagcgcaggaccgtatgcagatagccgcacaaaggggtgtctaccggcccatcgaagggtgtagagaacttgactccgaagaagaaacgacgaatcatgggcctggggtcgcgggtactggcaggagtttctttgcatgatctcgactctcggtgaggtgcccgttatcttgatgccttgtctaccacgaccagcccgatacaaggcaactccaggctccgggagatgtttttacggaatttcaaaaggtggttctcgtcgacatggttgatccttggatacccattgactacccacgtcggcgaggccaggaacatgtctcacttgcttgtccccgcgaaagccgccgaccctattgatgtgtaaacatggtgctatttccgcattgtcactcgagctcagcgctattctcggccgagctttgtaatcagcagaccatcttgagaaggtcatccggagttcagcctgccattggtctgttgcaacatgatgatgcgatgttgatggcatccgaagcattcctagcggtgagatggtgtcctccaagcaacatcatcacctcgggtgaaccaaagtggcggatcgtcgttagcataaaagccgcaaacgtccccgtgttctgtatgctttgttgtttcctgagatatccagagtcttatccttcaagctgctatcccccaaacccccacaaagacaccacaagaacccaacaacaccttcttaacaagtcaactaaataacaccatgaactcatacaacaatcccgagtcctgcggatgctgcgtttggtctgatggtcgtctgtaccaaccggcaacttgccacgtttgcggaggcaatcttcgatggtaagagaaaaatttgggctcgatgtccgttctgtacacaggctaattcagtacaggggttgtggatcttgcaagaacacgggactcgaatgggaaccatgccctcattaccaccagtccaacgcgacgaggcgttcggctcagccagcatatactaccactcagcagtagcctcttagccatgttgagtgttctgagccatcataacagatcgccttggttatgtcagtgtgcgaggagttcccgagttggcggtcggttttccattcgtttactttggcttccgcagttatgccttacttggtgttacggtatggtccccaggtaacaagggtcttggtgttctggtatactttcttccgtatggttcgggtcgcgcaggagtacggcctttttgtaacgctggctaggattcgaggcggtcgtttgactttgatcaggctacaatgggttagcatagaggaaacttgagcaaataagaatagcactttcagcttaccctgcctcgcgtcatggagccatgtcgtcggttgtcgacgacccctgaatgcgaaatcgtgcatgaacatcatcccaacgccaccagaacggcaacgtgcatcggcgatagccacttcagagccgcttgggaacgactattccacatttgtagcgcaaagcaagctgtgttttcgtaatagtggagtagccaggcttggttctatccaggcaacgcggaagaacttggggcctgattggcgacgccagccgttatcccgttgtggccccgggaccgctggtgcttctcgggtgtggctttctttgtgattcacaggctcagacaatcattcatcttgcagcgatggactcgatcgatccaggtaggctcggcttcaatgtttactgcagtggcttattgtagtccggtgagtcggatccggaaggttggccgctgttgactgtcttggatgcaggaaatgcagcaagcatggccgtcccgcacaggcatcgggtagctgaatggaagtaagagtcaaacgtcaacgtctgtccaacgtcggaatgaacactgtgtaggctagccacaagcccaggggccctagcaactggtttgtcatgaggacctgctgccgaaaagcttgcctttcttgagaccccaaagatccaaattcatcattcatgataccataggttgagcgtgattactgacaaggtcgaagggtaaataatctcggtgggtaaggtatatagtcggcgagcccgacggatgttgatatctacgctgcgcggaaggagtgggttttcgagctgcagttgagctgagttagcaggaatattctcatctcttggacatgtgatgcaggttgtgtggtgctacttcttcctgtcgccccaacacgctgcgtcttcatgggaaatggcacggctatcccgataaaaaccaaccccaagtccgcctgaccgcctctttccaaagttgaatggagcagcaaccgacctggagtttgtgacaccacatcgtcttgatccggacgcccgtcaccagccacttggagacgttcaggggtagaaaacctgtccatccgggctgtggaagagaatgcggttccaaaggagcgtacagacagggtaacaccgctggtctatgtatccaatcgttgctcagacatcgaaaagagccaaatgatcccctagatcgtggtgtgccaatgtatgggatacaggtaggtagggagggagtggtgaatcggtagtacgggaaaagcaggtggtgtataataaggaggccaactgaagaaaaccatttcagcataccgtgcccaatacaaatgtggctggccctgagaaaagccgcgtaaactttgtgcggagcgtcaaaataaaattctcgctgttgaaaacacaaggaatgattttactgcaatgagaatgttgataagatagcattctgtggatgtatttcgagttctttcgattggaaaaatattgtcgtgctcttttctcagcaaaattccacgtgataaatggtctggctatttcgtctatactggaaggcacgattgccctgccttccaaacacagtgaagttatccccaacgttgctactcagtggcagaggttacataagtggagacgaccgcaaacatgacccccacgatggcgcagctgccgatggaatagccccactttgctgcccttccagcccgatcaactgtggggctatcgtctctacccccacagtgactttaattggatacgctcttccctgcacgacggcttctttttaagcagctcaacgtcgtcaagccgaagctgtgcagcccacagttgccgcaaaatcctcagcctctcccgactgtcgcattctatcatggattcatagcaacaacgcgaacaagatgtccgttattctatgcaccggtgagttttcctctcatgctatacgatgttgcgacccttctgagagatcctatttcggtgctgctcgctattgacacgcctggctgacattggggttcgataatagcgggttacgaccacacaatacggtacgacaagccggaatatcgaaatgcagattctctcgtatcaaggggctaacactcttgctcagattctgggaagctctatcaggcatctgctcccgaacgatccaacatcctgattcgcaggtcaaccgactctgcatctcaccagacaagcgctacctcgctgctgccggccaccacaccgtaaagcttttcgatatccgatcgacaaaccctgcgccacttctcgtcttcgagggccacacgggcaacatcacaggtgttgcattccactgcgagggaaaatggatggtcacgagctctgaggatggaaccgtcaagatctgggagacgaggactggcacaatacagcgcagctacaaccatggatcccctgcgaatgacgtcgtaattcatcccaaccagggtgaaatcatcagctgtgaccgcgctggcagcatccgactgtgggatctggccgagaatacctgctcgcaccaactaatcccagaggaagatgtgtctgtgacaagtgtcaccgtggcaaccgatgggacccttctctgcgccgcaaacactgttgtatgtggatctttcatgttctcgtttgaagctcgtgataatgagatgtgctgacctgccgttgaagggaaatgtcttcgtctggcgactcgaacagcagtatgagcgcaccactcttgtacccctaacccaattctcagcacacagcagtcactacatcacccgcattctcctctcgcccgacgtcaagaaattggcaacatgcagcgcggatcataccgcaaagatctgggaggtcaaagagatggaaccccagggtccagatagtgaaccacgaccgttccctctcgaagccacactcactggccaccaaagatgggtttgggactgtgccttcagcgccgatagtgcgtacctcgtcactgcatgcagcgatcattacgctcgcctttgggagcttcacagtcaacaaatcatcagacagtacaacggccaccatcgtggcgccgtctgcgtggccctcaatgactactcggaggccagataggacgggccctcggaagactattgcaaggacgaatcacgcggagaacgccgcaaaagcaattcggggtcaagacagcaagaccaagctcagaggcgactccagcaccccagacagaaacaacggacaaagtctgggacgaattacaaggctgcgaggaaagccaaggataagtcgggaccttcatcagcaccaccaacagtaccaacacccgcgcccgctgggccactggtgacagtagaggaagctacagctcgggttggtgagcttgttgtcactccccaggaatcgttgtcactccccaggaatccgcttctcccgacgatgcgagcgacgtgacccccatcacccccatggagagcaagagatcatcattcgttgaggttatcgaggggcaggtgaagcgatcagttgcagggagttttggtgaactgataatttggggatacaacgactatggctaagaagtatcagcatatgcagtgatttttctttcttcgcaatccatcagaacacgctctgtaggaatatgtaccaacaatagggttgatcagttgcgactgcgttttgcagagagggaaaggctgggggctgcatttgatgatagcgattgcgaagagtttggtgcctacggggcaaccggcaaaataattatctgatttctgcaactagcaagtagcgaccagtcgaatacattgtaatcctgggaacattttgccaaagattttgcggcttgcacctcgctttcccattatttggtttgtaaactatctacagcacattcaacaagccgcccatcaatcgcaactccatttctcctcgcatgcaaacccaaaacacaacacgaaaaaaacccctccaagtttgcttcccatgctttttcgatcgcctccaccaaacacctgaccaaaaccggtctatattataagtacccagttttcatatcgtcatacataggtctctcaagcagcgaaaatcaccacccaccccagccatcgtccccatcatcatccttgggcttggtatcgatcttcttcttcaccacaactggcttactcttcaccggcactgtcgtcttctttgctgtcgtcgcagtggtagttttacccaaccccttcggcaaagctttactcccccccaacactcctcccttcttcttctccgcctgctgcgccaaccaccccgcgaaatctggctccgagccatcatcaaacggtttacttgacgccgttgtcgttactgcaggtttcttctttgacgatgatggctccgcaaacggattgtcgtttgactgattgctcgatatcgaggcagtcatcttgttcggagtggatgtatcatcgtcgtccatgtcgcccatatcaccccacgcgtcaaagtcggcaccatcatcgttgttgtcgtcctctgggaaaaacaactcgcctgttgtcgatgggtttcgggtgaggggtgctgatggaggagggaatttgactgcttgccggtggagtggcgaggcagaggagttggacgtgatgggagctgctgttggtgggcgcgagggaggagcagacgaggaagctgggacagaggatgccccgttggaagaagtaatatcccctgctgcagcggagagcttgtttgtaaaagacgaaatggcccagcctgcccagccggctgctgcctctgcttggggtgtgcccatcctggggttcccagagatcgcgctttctggtggtagagctgtctcgggcatgctttcgactgccttcttgatcctttggacgtacacgtccagtgtcttgactgcttggtctcgaataagcttctccttgtcgatgagcgacgggcagatggctggaagcacgcgagtcgcgcagtcttcgtcggagaagtgctccgatgtgacagacagagccatcagggcagcgtttcgagcatgaatgaatggatcgcgaagtgagcgactaaaggccgctatgagaaccttggaacgggaagaagtccccagatgcttggcaattttcccaagacaaatcgtagtatttgtgcgaataccgggctgctcgtcattggctgttttggccaagtactttagcaattcgccgttgatagttctgtcggaaagtttggtgatgattgtgaggacagacttgagtgtctgttctctgacaactggtgctacatctgtgaaccccgtaacctagactacgtcaacacctgttaccgcaccactagttatgactcttaacttactatttgtggaaagatcttgtcattgactgttttttgcgagagcctgtcaatcatgaggggcaaattgtcaagtaagcacaccctgatagctctgtcagggttcccaaatagtcgaagaagcacgggaaggaccttggcgtcaaaatcctcattcgataacttcgtggcgattttcatgacgagtccgaaggctttgggaccgccgcctccgaattccactgatttcaatagctctggcaagactttcattttgaaaaagtcctccggaaaatcatcggtgagctgatcgagatcactgcatcgagtcagcaaacgctcgttttatgacttgaaaaaatcaaacacttactcaagaaacacttctctttcctcctccgtcttcaccccgagattttcaactccctcggttagtttgattagaggcgtgtcgaagaacgacccatttcgacggccttgttcaaggaagtgagccactgtgagtctggccttgggatttgggttggcgagacgcttatagcttgggtgaagactgggcggtatattcttcgtctgcccagcctggtcactgctgaaactgccattgaaaatctcgaagatcagcgcaccgaagtcgtacgcatctacagcagagtgaggactgcgcttgatcgcatcccatcccgattttgctagctcaggcggtgtataccgtcctgagtctgggacaagactgccatatgtctacattcatgtcagttagtcggtcgcacattggagaggaagctccaacctacatagatcacagcctcgtcatctttaacattactcaaaacctcaaaaccaccaagcttccactcgccactttctgttgtgtaaacagaagcgaccttcaagttgccatggactgacgaggcctcatcattgatgaatttgacggttcgctgggtcattatcagcattacaaaaccctggatagagacatcacacagtcgaatgaaactaaccgcgatgctgtaaagaccccatttcgccgtctcaggacttagactctttcgtttaacgtgccaccgcagaggtactaggcgttccgttgcgatgtatatatacgtctctgactttttcaaacatttcagtatgaagcagtatccgggttgtcgcgcaagctcgtacctcgaccgcatccagcacctttattacacccgggtgtcgtagtgttcggagcttcttcagcgcatttctggcgagagggagggcggatcgattcgcggcgatttcgaatgagaagatactgcaatcggaaccatcttcctactccataaatatagtcagctaaggtgtgttctgcgggtttgtgcatacggtagagaaaagttgggttgcgaagcttacccgccgagtgccattgtacagagtccatatagaggggtcaaggtcgactttatcgccaaaattataggggaatggcggtcccttcgctgccatcgccgaagcgacggcggatttgagaaagtccatgcagttcttctgtattcggtgcaacgattattgcgatcgatttcttggagtattggaggcttgacagagatatcgcagctcgggcatggtgtagttgctgaacagctgtcggaaaaggggactcccttctgcgtaatcgcaaaccgcaatctgttatcgcgggcgctctgctgccttgccaatgtgcgctaaccctaatacagcaggcggagtcgaagcttgttacagttctgccgggacccgttgcgcacgggccctcataactccgtctactaggctgctgactgctgtttcttcgacaattccaattcaaccttccccacgttttcattcctcaatccaaactggcctcgcatctgagctcatttcagctctgtcctgccccgactttattggttcagcttgccatccctattttccatggcacatggtgtcgtgacttggattgctgagggctgtggtcgccggtcggacgtagaggaaccacgaagtcgcactcagacctaagcggagtgggagcaagatacaggtagccaaaaagaaagcgacaggacgggagtgtcagtcaacaagcctacctatttccgcacttgtctttcaggtaagcttcactttcatttccacctctctcttcacctcttttacgtgtcaatgatgagcaattggtaaaaggtttgatagccgcgtgtgctcttctggtattatggttctgggtgacggggccttgcgccttggcgcgtctgttgccatgctacttcctccgcgctacctagagattgttggcaatgtgcggttcgcatggtggcaggaacatcgatgctggagaccatgattttcagcaccaccgctacacggagtctcgacttcactcatctctacgaacaaggggccaaaggctgtggtggacatctggcggatgaagttctccgaaccttgtctgccctacctcgtcgcccaacatggaccataaaaccgctgagctggctgtatgatgaccaaacataaactgaaaagacctgaggcacatgtcttgtttgatttctggacctccctgaaatcgtagatagtctttttcttgtattggcgctaatcatctcacataggtcatacttaggtcgacatcacgaacaagcaggacccatgccgcggtgcaggcgttgcaaattagaagcaacgcccgacaaggctttgtttcgttgtagactttgcactagatgttatcattctgcctgtcataggccactaccgaaagacccaaggtatgttttgcatctttatctccaagcttccatcattccccggcatcttgacagcctgccacctattcgatacaacgcatagctagccgtcctagatggtaaccaaaccctcgctcctggttggctgtcctctccaacccgccccccccatgttatatggagtagtgccccactgatagcctattttcccgcgccgcacaactcactctattgttgttttacgttctcaatctttgccatagcccatcctatctctcagcatgctcacctcactcctaacctccaaccccattgactaaccacgctctcggatagtaattgggtctgcaaaaactgcagtggcccgccagagaccaagaaacgccagtactatgagaagtcggcattggcaccctcatcgtctgcgcggaccgttttgcgagtctcggcctcgacagcctcccatgaagagggctcacgagaggccaccgccgccatgtctgattcacagtcgtctgcgccccgccgtcctcttgtaagtgaacgcgatgggccgagtgacgtggacagttgcccatggccagaatgcaatgctcaaatcaatgtgaaggaagagcccatgtgccctgagcaccttcgacttttgaaaggaaatagccgccctcgagcgcctgccgcgcccacgtcacttcccagcgtgaccgccaatttggctccgtcgtcaaagccaaacccgaaaaagacgctggaacgaccagctacgcttatgcgtaaaacagcctcctccggctttccccactccgactccaagcacggcacaccaccattccccccgccaaagaccaaagggagctcgtcctctctacctccagagcagaggccagtgatcaacgcgatggcttcgacgacagtggcctctgctcggtcccaacttccaccggcgccagcccgcgcctataccgcgcccataagccctactttgttgaaagatatggagcctccaaaaaagcgacaaaagatttccccaatcctgtcgcagtcaaatgagtctaggctcaacggggcaggtgcgtctgcagactcgctctctgctccggattccccagaaaagcggccagaaaaggagcggaggacgggtctgaagcacagtaagccgagtgcgaaagaacctgtccgaaaaatggcgcctatgagggcccttaagttcgccgacgagccagataatgaccttgcacgcccatctgtcagtgggactacggcaacgtcaccaatcaatggctcagcggaggttctttcccagcggaatcctccctctagatcggtctccttgaatttggatcaagggggtcacattgaccgaagggagattgactctattctcccccctcatcctagcaaacccactttgacatctcgtcacgagtcgctggagatatttgccactacgtccagtgtcgggcccagttctcatcaaccgaggacggactacttttccctggagaagaggccctcaacaagtaagcgtgacgattcttcagagtcccctccaatacctcctacagagacaaaccactctacaggaaacagcgtaagcactccaccgagggtgaaaaaaaccaagaaactcgtcatcactaccaaggcgcgaccgccagccaaggcgactcgtccggtcaccccaacagatctagactacttcatatactctcagccaggggcatccaccccacctccaggcttggagattccaggcctcaacaaaccccctccgacctcgccgtctgctgtctcatcgacagtctcgcagcagccaccaaaggcaaaaccagtagaagatgagcctctcgctctggacatcgatcccagaatacactacccgcgagctcattctctagcatggcacgcgatgaaggcccaggagatcgaagctcgggggacgagaaagcagcggtttggcaaggcggcacaaagtctgaaaaagcagatggaagcgcaggctgagttgaatataccttgggaggagaccttacctgatattattcaggaaaacccggcttgggtgggggcgttgaagagcctgaggggcataatgcctacaccggcagtggaagctgagggtggaggagacccgatggatctctgcacgaatgaggcgattgcaaaatttgcgaatgggagtgggacgagtggtcctgtggtcaatggagtggagagaaagatacgaaagatgaagaggacggggagcgggctgagcgttgtgaatcgagatggggttttgagttttggggaccggaacggcaagggagcggaagtgtaaataggagagctttgagctgagcgagtatggtatgaactgactgagagaaaacacgattcgtgtataaggttattgggctgagttatcggcgggctgctgtacaaagcttggtgtcggggagggagggactcggaggggaccagaaaaggagttgtaagcatgtttggcatcacattcacaggcgagaggagtggctgacgcggtgttttctctacacagtatacatttttttgtcgtcgagggaagtctagcaagacatgggctattcttataggagtacgggggggtggttttctatttctacggtttcgtcaaagcatagctgcattggaggggcgtctagttaattgagtttatcttgtttttatgtagttctgtgggtgatttgggaagatagcgtacatggctgagaggagcatagcgactgcattgcagtggagcaggtataggtgataagacacgagatagtcaaatcgatatgggtgaggggagaggctgagctgagagctaggtgcctgcaatagtcttatcgcgactacatgcgactctctcccagctccatagaacaagactatgatttcccaggcgtaaaaatagcaatagaatggtctcgcaccgaccaactagcgctcaccgaattgaaatttatctagcatagctctcgaagttgcacagtgtggacgcgcagaatggagcgagccatcggtcttgtaggacacacgcacactgtgccgtaagaaacaactagtcccaatgacctacataggtaaattatgcttgacaacgaccaccgacagtacaatacaaaatatcatttctcctgcttgtaggttaggatatcccccgcccctctccccaacgtctataacaaggctgcaacaacgcacctcatttcccgccggaagtttgtaccgcgacaccaacgactagaactgacacccgactaaaaaagccctctactttcagtgagctttccaaatgagagagcattggagcaacagcccgacagttagtcaaacttgtaaaaccctagatacatagctctcgacagccgaccaaccgtcaccaatctaaccggctgtatatcggtcacacagagaacaactaccaaaaaaaaagatgcgacccaacacacaagcaaacgcaagcaaacctttcgatatgttctttcatttccatctacaatgagaacttggtattatgtacaaaacaaaaaaaaaacatcgaaaaaaccacaaactttatcaatctcaaattccagaccgtatatatccatccgcacacgcctccaattttctgatgccaaccagccagagagccccctcaccaaaccgaatttttagttgacccccaggtagccaccatgcaaaacaaacaaaaggaaatgaatatctcgtaaactcgctcgcttgctttcgtataatgcacacccacccccctcttagacaccacctcccgtctaaacagaagcactcttactcaatagattcaacgcgctccccgccaaaataaacccagcctggtccttgctaacctggtgcttgacagggaccaaaaactcctcaccagtacccttcttggtaaccttgagctggacctcgccttgtccaccattctggagcatgtcatacaagcccacagtagcaacctcgtcaccggcagcaatcttatcataatcctgctcgttggctagcgtcagggggacaacaccctgcttcttgaggttggtttcgtgaatgcgggcgaatgacttgcacgcgatgatcctggcgccgaggtagcggggctgcagagcggcgtgctcgcgggcggaaccctcgccgtagttgtgctcggcgaccacgagccagggctggttgcgctccttccagaggttggccagctcggggatggtgtgcttggatccatcgagatcgtaggcgacgttgacctcgcccgtctcagcgttgacggccgtgttgagggtgttggccgagatgttggggaggtggcctttgtacttgagccaggggccggcggcggagatggtgtcggttgtgcacttgcccgataccttgaccaagaccttgaggccggaaaggtcagagttggggaagggctcaaagggctcgagaagggcaagacgctccgaggtgggagagatggcgaccttttcgttggggttggggggctgggaggcgaccttaaagacgtccttgccaatgtcgaagggagtcttgggtccctcgagaccgtggggagcagggaacttgaactccttgccatcgggggtggtaagggagtcggttacggggttgaaggtggtggaaccggcgtaggccatggcggtaacgatctcgggcgaggcgaggaagttcatggtgtctaggttaccgtcgttacggccgcggaagttgcggttgtaagaggtgagaatggcgttgactgtgcccttctcgacaccatcctggcgcttccactgaccaatgcagggaccgcaggcgttggacagcacaatgccgccggccttttcgaaggtctgaagggtgccgtctctctcgagggtggcacgaatctgctcactgccaggagtgacgtagaaatcagccttgggcttcagtccagcctcctcagcagccctcacaatgctttcgacacgggtcatgtcctcatacgagctgttggtgcagctaccaatgagaccggccgaaagcttctcgggccacttctgctcctgaactgtgctcttgaattgggacaggggagtggaaagatcgggagtatggggaccgttaatatggggctcgagcttggacaggtcgatttcgatgagttcgtcgtattgcgcaccctcgtcggccttgaacctgaagtacgcatcctcagaggcgcccgcgccagggaagttctggaaagcggcagcattcctgacagcctgctctctgcgagtagcctcgaggtatctggctgaggcctcggtgtaggggaagatggaggtggtggcaccaatctcagcgcccatgttgcaaatggtagccataccagtgcagctcagtgtctcaacaccaggacccgagtactcgacaatgtaaccagtaccgccacggactgtcaagaggccagccaggtgcaggatcagatccttgggagaagcccagttgctaagcttaccggtgagtctgacaccaaggaccttgggagccttgagttcccatggagcaccgacaagagcctcgacggcatcggcaccaccaacaccaatggtgatagtagacaagccaccggcgttggggctgtgcgaatcggtaccgagcatcatcaaaccggggatggcgtagttctccaagacagtctggtgaatgataccagcacccggagcccagaaatccaacccgtacttcttggcagccgactcaaggaagtcaaagacctcgtggttggtctgaataccagcttgcaaatcgtcatcggcacctttgctacccacgatcaggtggtcacagtgaatactcgcgggaatggcggtctgggggaggttgcacgacatgaactgcaagagagccatctgagccgaggcgtcctgcatgttgactctgtcgggcttgagcttgaggttcgccttgcctctgatatcgcggccattgttggtgttgttgaggagggactcctcgacattgtcgagatggctgtagaggatcttctcggccagcgtcagccgctgggcgcccagcactctgcggacctccgtgtacttgctgtgcagcttctcgtatgttggtgggagggaggtgatattggagtattgtctcgagcccgctgcttggcgaagctgctgggtttggaaggccctctgcgattagtcacatatgttagcggcgagtctcttttgtctctccctggaagaggaaacatactctcagggcaacgcccgagcggctggcaaggtcgattggcctcatgatttatggtctggttcgccaagttcgtccagctcggcggggtgtctcgaggggggaagaaaaatatttatgactgtccaaatctttgccggttgcgccatccgccacggcagtctcttggtggcccgtttcaggggtcttccgatagcggaaccgtgctaaaatcccgggttgtttacaggcttgatttgcaactgttgcccggaattcgactctgcctgatgggtattctcctgtaacgctgttcctatatacgcaagatatgacggcgtttctgaacgatgtctgttgttatacaatctcttgtgtagagaggcatcgcacttcatctttgaaggtgcccaaatcgaccctagtccgtatcggagacctacatcatggctccacgccaggatgatagcaacaattgaccaatcacatcgcagagaatgctaatcttcgaattgactgacaccaggtgtgagggcttctgaaagttcacttgtcgagtgatagtaagcgaactgtatagatggtaatatccgtctccaggttcttcaaccactacctcgctttgcctggttacaatcgtaaagctcgagcttgtgtccagcttaggggttctcctcctactctaccttaaaaattgtagcacagagtcgatggagacattgtgtggtagagtctgcaaagggagaactctttgacggacagtttggaagttgaaattattaccgtcacaggccttatgcaaaacaaagtgcaaaaatgaatgattccctggaaggaaaaggaaaaagcaaaatagattgatgagggtgggattcgaacccacgcctcttgcgagaccaggagatttggaccctcgaaagggttcaagcggaattcaggtgaacctgaacctggcgccttagaccgctcggccacctcaccatctgatggttttgatataaaattggactcaattgtgggcttttgtatggggaaagcctactgctagtgggtgctcgtgaataaggcagaggctgaaagccagtggagaataaaacgttgagtagatatgaagtaagacaacgaggcggttaccaacgggtcagtttttttgaagtcacatcgcagctgagaatgaaatttggggcccaagaacagcaagtcgatattgccattgctataatatctgagcctcaatgcaacgctctagatcgatacacgacattgacttgggtgtagcttgacagaaaatacgaggatatcaaagatatgataacagccaagcataccacttggagaggtcggtgcaagttacacagcaagtcgggccgcaagaagccgttctgccatgtccgtgacggagcactttatatgtctgataaggccgggatgcagaagcacatgcgaatggacctccgatgagattaagaaaataccgctctggcagaggggcaccacgtcgccggtcaatctagctgacgggtaattgttccggcggcataacacaggtcacaatgtctgacgttaggtgtggagactcctacttggtataagagcactgaagacaatgtgataggtcttttaaggatagctgagaccaatctcctctgcaaagaaacgagctctgtaccgcgtaaaagcctcggaagcatcaaatcagatcgtgatatcacagaaacctatatgcagagaagatgcataataaggcagcctcgagccgtgttgaaggttgacgtgctcatgagccataggatattgaatgtgccgaagtattgcttatgttggtacagatattggtttgtttgtgacatcaagaggtggtttggttgtcctgtgatgcgactacaagggtgatcgagcttcatccttggccgtcattctcgatggggacaatcgcgaatcgagatggcagttgtcagtgggaatgatcagctccttgtgaggtgatcaatgagcttctgaagctccactatttctagacggaaagacggtccccagctgctgacctgtgtgccagtcagaagcatgaaaaaattggcagctttggcgggcagtcgccttggcgcacggactgacatggggcagtcagcggccaggagcctgagccacccttttcgacttccagttcccagatccccaattccaactccatcccgttcgaaggaaggaaaaaaaaaaaagcgacggctctcagcttcaggccttcttgtgcctgcccccttcccccttcccccagtccaccggccctttcccacgccacagggctcctgtcaaatccactctgtctggttgctgtctgccagaagagtgtcagaggagttggctcgcctctgtctgtcacctggccgctttcgctccagagcaaaagcagcctgcaacgaaacaccataccaaatttcacaggagcacggtcactttttttggtttgcaaagttgagacctggacagccctgcttgctcaggtttggacttccccagccagaccgcgatcgactctggggatcctgccctgccgttccctcttgacaggccgcagttgcgctttgctccatcgcccaactgtgacgtacggccttcgtctcggatccaactcgagtttgttcccatcgactctgcaccgcaggacggttccggctgcaggtgttctgactctttgctcccgacgacccaacagcccggcatcaccagcaaacaaacgcatgccctcgaagcggcccgggcgctaatatcacgattccctgctctcccagctccggctgtcaccatcctctaagatctatccccgacctcacacccggtcccacacaatggctgcggtaacccgacggaaaaaaaccatcggtcaacgtcgtcgtatcgaggatgacggagacgaagaggccggccctggccttgacctcgacgatgactccctcacggacccatcgagcgacgagcacgaccccgccgacgatagtgacaccagcaacgtcgatgaagtgtcgccgaggctgttgagtgctcgcaaggcactgggtaacgggtcagctaaacatgtatatcgccataaaccagatgttgttagcaaggacagcgctaccaagaagcctgagcccgtcatcgccggcgcggatgtcatgctggagggcctgaccttgggcgacaaggaaaacagagcagaggaactggagtttgacgacataaagacagatactaagcctgccacggccccctctgtgaaggattcggcgccggtcatagtgagctcgacttcgattccaggtcaacagccgcggacttcgctgcaagatcagaagcggcgggagcatgatgaatacaggaagaaaagggatgaggatccaacctttgtacccaacaggggcaacttcttcttgcacgaccatcgtcatgccggtccagctgccaatgggttccgtccatactcccgtcagccattgcgtggccggggaggaggtcgtgcgggggcatttggtagagagttcattcccatgaagtatgttatatggatccgcacgataccttgacgctctacacggatgctaacaatgctttccagtcctttccaaaacccctctgatcccaccacacgaggaccttggcagcatgatatgcatgaacaggttgccgagcaccctccgccagcgccctaccggccatcacgctaccgtccagaccctgaagggcctgccaatggcaatggtgtgattccatacgcgccagcgccagagagtcctatcaaccgtaacatgtcatcagagaaagtcttgggcacggtaactgtccgggtgtacctcccaaatgttttcgatgggcccaagttgtttcctggtctagtgctgaaggcctacaccaagttgcccgaccaccggcccccccttcgccgagacaaacccgtccgaatctcgctgccgtaccattccgcgccggttatgcctcgctatatatatccaaacccagatcgatccttcatcttcatcccaagggcgctgcggcctaaccagcagcggacccggggcaaaggtcctcgatcgatcatgggatctgggccattttctcggagaacaagtgtatggggagggagcatatatggaagcatgtactcacccagcgttgcgatgagtcgtcgttcttccattgcgcatgatatgggacgtgatttcatgctttcgcccactggatctgcgatctcgagaccgcctctgcctgctgatgccaacaaacctgttgtacgactgccacccttcgctcaggctcaggccccggcccccatcatgcaagctccagctccagctccagctccagctccagctccagcatctcagccaacacaaccggatggtgctgagaaggttggtccgtctgcggagtcgtctatcaacgctctgccccagccacaaacgcaccctctcccccaaaggcctgctttccaagaaaacaagcccaattcgatcccaatgcatcagccccgtccccagaaggcagtttctatcgacaacatcgagtctcctgttcgacagaacgccaatgcgcctgccccgtatcagcaagctttccttcaccaggtcccgccccagatacctaatggctttccccccgacgtccacgcccgccacccttcctaccagtctcagctctcggctacaccattgtcacaaattccggagcgtgcgattcatgctgctccgttccagccaaacacgtttggccagcccggctactacgctcagccatatcctgcgatgcagccacaacagggttactactacccacaaggctatccgcccgccaatatggcgcccaatgccaacgcacctagttttgtgccagcaggcccgccagctccgccccccatgaactacgctgcatctgctcagggtgatgttcccagtgctcaggctcctggacaagcaccgacccccaacctggtgacgcaggaagtcaatggcactgtttattacttcaatgccaacgacattccttctgtccccggatatgcaccatttcctcccgctcagccgtttgctcctggcatggttcctgggcctgacgcatattattaccagcagcctacccccggaatggtctactatcctcagtaggtaggaggaggagtggcattcacaccggctaccacaggccttcttgttggcactgtcatagtgcccaacgcgatggaggcaacaccgccaccacagcaaatcgaagtcctgtagcgaccggcaggagaggccaatggctgaagggaataattcttttctggacaggaataacaagccgacgctttaccaacttctttttaccacgtcagctgtttaacatgttagaagttgaacatcttttgccgccttaattacctagcaaatgtcggcggtctatgctattcagctttatcttttgagtttctttttgtgtggcgttgttgccctgcttgtttcgcccaagtgtttgttaccttttaccttggacgggcttgcatttagcttttcttgtttggcttgttgtagctttgatctggaattgcggattctcctatgggggcttcttgagcttttgcttttctggcgagctacacaatcttctacgctgcttgggcgattgtttgtacaaggcggtggtctgacttttttggtcaatttctagtggacgagctggaaaatcaacacggagggagggatggtaaggcgggataggatggaaactgagtgaaggaagatgagggcttatgacatggaagatatcacggtgatgcggggtatcggttaggatttatcgactttgtgtgtgcgtatggaaatgatattaaatgaggcgagtgttgggaaacaaggggccaagatgggtggacagatgtaggatggtagtggttattgaggacaaggagggaaaggagaagggaaaaggtgcattcgacgcatcaaaacatccaacacatttgcccttttttaaccacggacatgttaacccgctatcagcttagttggaagaaagaacggaacacgttgtttgttggtggtgtgttgatccttggttactctgcgctgctcttcactgtgcttttccgggtgtgttttgttgtttgctgttgttgcttaagggacgtcgcgtgttaggggcatttttgcaaggcgtttatagggagtgaaagggggcggttatctgtctttgcatagcgctttgcctttctctgtgacttggtcattatgctgttgtggtgcgggaaagataagaaaaagaagcaaatgtagaactcttttctttgtaatcattacattgggtggctggcggtttttcgacttgcgatgggaacaaaagttgagactggggtttggattttggttgaagtctctcatgagctgagagagaagacgatcagcacgctcattattattctgattatttataaacattttctgcacttttttttctctttaccttttggcagatgtatataacacttgttcaagtgatgttttttgtgccaaacaacagtgtttttccatactacgttgagcacagcctcaggagctcatttcgtgtaagtgaagcagtgaggtgatccctgttgtgctgtgttatgttgcgtggcatttcattccatccggtcgatgactcttttcgcaagcatatttttggcaactgtggcctttttgtgtgaaattaccacggtttcaagaagaagaagaaatacgaagttgacacggtggttgatgatttttgagcgaggcgcagctgaggttggtgaagaagctgtggtggtgctataaaagctcggtgtgtggcctgccctctgcaatttcaggggggagcatttccgagtccactttttgtgacgacactttgtcactttgtcacttataccacaacacacactccctttttttggacttgacggttctttgcaccttgacaatttacgctcggtttttttttttttttttggtttttttttaaccaaagacaaattctggttcaaatggcttctaaggcgagctcgaatttgccgtcgcctcctgtggagactgccaatggcggcaacaggaggttggggatcacggtattttcaggaggtatgttcaattgtggttttgagtattatgaagaaaggtctttgagattatggtatcttttcaatgccatctcagagagtagctgccccataagactcgctgtttccaagcggcgcgatgtatacgtcttatacatttagctcgaggttcacttacacattccctaaaaagcattgcatagacagttatacatatcaatcaccacttaccactgagttcgcacaacactcgcccatcacttacgacacctaccttgtactatactaacccacctctcaggcaccgcagccaacaatctagtcgacctcttcaacagaatcgcccgcccatcatcctcttccggcacccagacccccacctcctcattcgccagtaagactggctcctctgacgaactcagccgacaacgccagctaaactacatcatccccatctccgacaacggcggctcatcctccgaactcatccgttttgtgggaggcccctccgtaggcgacatccgctcccgcctcgtccgtctcatccccaccaccccctccaacctcacctcctcctccaaagaaacctcctccctccgcaacctgtttgaacaccgcctctcgcccgaccccatcgccgcgaggggtcaatgggccgatatcgtcgagagccgctccctactatgggcttacatccccaacgagaaaaaggagctcatccgttccgtgttgaatatcctgaatgcagaaatcgtcaagcgggcaagaccgccgaatgtgttcaactttgccggggcatcggtggggaacatgttcctcacgggagcgaggctcttgacggggagttttgaggcggggatttacctgctgaggatgatatgtgagattggggggtgggtgagggtgctgccggcggtgaactcgaatcatacgcatcatatcagtgctgggtgggttaacggggagacgggggagaggggggtgttgaccgggcaggtggctattagtcaccctagtgagccgactagcattcctgatgaggggttgccgccgcatcatatgggaggaggagggatggggaggttgttggaggttgatgatgatgaggggaatatgccggggagtttgcctgttttgcggaggcagaatttgaagtttagcaaggaagaggaggaggatttaccggggggacaggggacgaggatcgagagggtttggtatatcaatttgtatgggcatgagattatgccaaaggctaacccggaggtggtgaaggagctgagggaggggaccgaggtggtggtgtatagtgtggggagtttgtacacgagcattgtgccgagtttgatattgagggaggtgggggaggcgattgagaaggttggggggattaggaagaaggtgttgattttgaatagcaagttggacagggagacgagggggatggatgcgagtgggtttatcaaggcgatttggagggcttgtgtggagagtcggaggccggaggatgtggaattgttggagtggaggagggtggtgacgcatttggtgtttattgatccggagatggtggaggagagggagatgaggaaggatatgccacaggttgatgtggaatttttggaaaagctggggattcactgtgctccggttcaggggagggcagtgggagagggtaaggcgaggatgatgaggtatgatgaggaggagttgagagagacgttggagaggattatcgatatgtgagctgtgaaagaggcctcacaatgggcgagtattttctcaagcggttatctcttttggaggcacaacaacctggaacgtgtacagcggtgcttcttcatggaatagattagagcgttgatgttgtacaaaggtggtctgagatacatatatacatataaattacacaaactactctggccaggtcgagttggtctcgaaaagttacctgactgtgatcgcgggagatgtgcatgcagaaacgcccaggcttgtcctccgccttgcttttacgtggtaggggaaggcctcgtggcataccgccaggccttgaccgagtcggcatcggatcaaatccagatgactaaaacgcctgagaggggcaacacagcatctgcgcctctggctagctgttcatgttgcggcaacccaaataaaacacgaataaataacaggatctggaatttcaggacaccgagatcggaacattcttccctgaatgatgttcactcggtgggaaatcagtttcggctggtatatatctgcctcctgtttctgcctctaacagcacttgagaatgggaaatggaaatcttttcacaaacaaaacagcctcggtctacgagaggagatacgaatagccagaccgtctggtggatgccccgccgtctggaagcgagtttcgggtcagatgattggtaaacgggagcacaaggcagcttgactttatatatacgactctgatgagctgtacaccgtcctgcgcggaccatggggcctgtaccacttacagcctgatctcttcatgcagccagcatccagcccggtctggaatgcttgacacgtatgcgagaagttaagggcgtgacagaggggatcagcctctcagagtagggatgcggcatgaaaaaggctaagacgtcgtcggccctttaaaacaggtcgacgtaatccttgccgccgctcaccatcaggtggccccttgcaagacttgctcgagctgtcagtggccaatagaggctcgtgatcagatgcaaagtgcatttccagtgcatctccaaaagaggtgcgtggtaggctccgagtcgatctgacgggatgggaaagtggggagcttgacgtgctgcatgggactggggcgtttttccgcttggctgggggcgggtcctgatttaccccacctaggtcgcccagcacagcaaccaacgcaactccacgtgaggggtcagctcccaaggtgccgcccagataggctttcgaggttccattttccttatcgcgctctaacaatgctgcggtatcgcggggataactcccatgggcccattctgacccccatttgacatggaccggaccgtgtttgcttgctttccgagtgcgtcaacaaagtgtcgtcctgttcccacagaactgcatgagatataagagccatcatcccgacactcgcgccccgtcatcgtcgtcatcaccgccatccgccagccagcagcctccacccctcaaccatcaaccagcacattcgacagccttctcagatagctgacatatcgaattggaattattcaatctaatccaaggcaagtggtgacagccttgagtggctcccatacccgcgcccagatcactccaaaaagagccaacagcctgtcccagacaaagaagggtgacgacacgacggccacctgacaaacaattcatttgaccggactaccattgtgggtttggtctgcgcagaacataggcagccccaaaggacgagtcccagagccgtcagatcactctgctgtaaataccgccatgtttgttagcgggcacggtctcttgatgcaccccagtgtttgggccaaccttatccatgaataacacgggagaagtatcgctgaccgcctcctgttagtcgtcccgtaggtctcacccatttgaccgcccaagcgccagctgttcgcctctttacgacagccgtttgcctcctggaattacgaggcgccccatctgcctagatagctagcctaccaaccaccaggtacttcatacctacctttgttgggcaacaccaccccctacgtccaatcccccccagctttcacttgacttccttaccttactgcctgaggcccgtctgtctgtggtcattgcgtcgctcccctccaaagcttccgaccgaccatcccattttgtccctatctccccccttccttccttcctctcatccatcctcctcgcaagagcatccagctctttcaatcaccggcctcgactttcaacaccagtccccgccgcttacaattgtacaccacagcatacaagtaatccccgatcttccggaccgatacctcccagttggacatccagtcctgcctccccagactttgtccgctgcaatcggatcatcaagggagggcaatcattacgacacctgtcttgctcacgagcagcattttaggtcgtgagtcgctcccgctctttggcttttgacacatgcaaccaacacccccgcctcacgtccagtcagcatgtggtctgtgccgctgggacagcctctccgctctttctctcacctgcccatcatctcgaccatcaacaccgccatccacaacattgctgtttcttcaaaagcatcagttttcatcgcttgctaactgatatctgcccccaggcaatcatgtccgccgccactatggcccctaacatggcggcagctcctcaggtcacgccagctactcttgtcaccctcaaagtcagctatcatggctcaacccgccgattcaagctccctctgcgggaaatggttcctgcgtttctggaaaacagggtgagtttggccgtcgctcgacttgacaacgatgatactgatggctctggatagatccgaggagttctgaacattcgccccgatgccgatgttgtgtttgagagatactccgactctgccacctcttacgtagtgctggacaaggccaacacctcagtatacaagcagctctaccgtgctgctaaagctaagcagaagctcaggcttcgtgtgacagtgaaggagacaccagcacaagcatccctcgattcgctcattcaagctgccgagcccgctgaaacccccgtggagaaggttgccgaagagcctgtcgaaaagccaactctgccgattccgaaagagttgattgaggccagaattgccgaagccaaggctgccgtggccgccagggaaggacctaagcctgcttcggtggccgatgaggttgaggaagaagcacctgcagcagtctcgagccctgccgaaacttccgaggagatcgagcaacctacacccgtcgagccagtccaacctctgaagatcccagacgccgtcctcgctgattacgaattggccattttgaagttggagcaacagagtcaggcacgtttcgctgccgagatgaacctcgtgccccctgctatcaggtcaaactatgctgtctgctgtaacagctgcgacaagaatgttcctgacatgcattatcactgctcaaagtgcgacggcggcgatttcgatctctgctcggggtgtgtggatcaaggtgtcgcttgctacggcgctgaccactggttgatcaagcggttcatcaagaacggcgttatcatcaacagcaccaccgagacgctgcctcccaagcaggtcaagcaagcagctcctccctcccctccatctcccccaagccctgcggccgagaagccatccaccccctcagcttcagagcgcatcattcccattttcaacggcctcgcctactccagcatgcgcacttgcaactgctgcgtccgggagctccccgaggtggactttgtccactgctcgacctgcgaggattatgacctttgccgaagttgtttcgccaagaacacccatggtcaccaccccaagcacaccttcgttgccgctgttgagggcacacgcttggagcctgatgtggctcgccgtctcggtgctggccgtggccaaaagcacaatgccatttgcgatggttgcgatactaacattcgcggcatccgtcacaagtgcctgaactgtcctgactgggattattgcagcgagtgcatggcgaacgcctcttttattcaccccggtcatcggttcgtgcccatctacgagccactcgagtacgccggtatttccgacttgttcgcccgccctactcaccagggtatctgttgcgacggccccctctgctcagttaaccgcaacaactacacctacatcacgggagaccgttacaagtgcgctgtttgcaatgataccgacttttgcgaggcttgcgaagccagccctgccaacacccacaacaaaactcatcctctcatcaagttcaagacgcccgttagacacgtcagcgtcaccaccacaggagaaaatgagaacggccgtgccatccctaccatgggagatcgccgtcctcgtgtgaccacttctcgagccaccgagactgtcaacgcccctgtgctgtcgtcttccaacgtgcagactgtcattgacgtgaagcccgtggagcacgagatcaacaaggaggtggaggagaagcctgctgagaaggtcgagatcaagactgagacgaccgaggtgaggcctgtggagcaggttgctcctgccgctccagctgagctcgtcgccgtgttcgtcaaggacaccgttgctgatggcaccgtcatggagcccaaccacgtctttgagcagacctggattcttcgcaacgagggcaagacagcgtggcccgctggctgctctgtcatgtttgttggcggcgactatatgggtcatgttgactcgactcacccggcagctacccaggacctccgtgcgtccaacgtctcgactgtatgctattcccccatcctcccaggagaggaattccccttcaccgtcttgctcagaactcctctgcgcaccggaagaattgtttccaactggcgtttgaccactcccgatggtctcaagttcggccatcgcctatggtgcgacgtcaaggtcgagcaccccaagtcggtcgctcctgttgtttccgagccagtgaaggaggagcgcgaggtcatcgccaagcccgagcctgcgcttgcacccaaggaagaggttcagcttcaccagagccagatgatcttccccaagcttgagaaggaatcgcccgtctccagcttgcacgaggatgacaagtctgagtcggcggttacgtacgagcagtacgaagactgcgaggatgatgactgggatgctgccgagtcggaggagggattcatgaccgacgaagaatacgacatcctcgatgcttccgacgaggaatactccgaggctcatactcgcaaataagtattcagcaacagtatctcgatggatcatgacatgaactcctgtcgcccggctcgacccgcgaacaaccaccccgtggtttcttaggtaaccatggcgggatgtacacgaaatactgtatatcacgggacaatgtgcgaacgctggtacacggtgagcagctaggcacatactactaggcgctgtatggtggaataagttggccggtctattttgggttgattttggtttgcggttggttggatggccattcattctttgctgaggaactcaaaacaaccttgattaggattgcggctcggtcaggagcaccaaaaacaaaccaggcggtcaactcttctggttcgcactggcagttttgaggtgatctcttccaccattttgcaaagtgcgtggggcgaaacagaatctaggagcccaacacgggcaaaaaggggtggtatcattcagggtttgtctgccttgttttttccttgtcttttttctacttttacttttacttttaccgaagataacgtggtcatgggttgaaattaagtcccctctttattttgctttgtcaagtgcaacttttcgggtcaggcagctcaatttcagattgttattctcagttttcacgataagtcactccgcagttagggaaaggttagcgaataggaacaaatgaaccaatcatgacgaagtcttcgtccgcttcttgtgttgactgtggttttgaacacacaaatgggtatactatctattagatatgaaagtcttccaatcccaacctgatcattacattcctagaaggaaaggttgcattctactcgaaagtggtcttcttgcccgccggcgcaacaaccgcaccagtaagcctagccacgttgatatcttggtggaacttggcccccttggcctccatcctcctctccttcatcggcacccacaccttcttctccttgacctctgcaacaccttcaccaccagcaccattctgctccctcctttgggcagcgcccttccctctgaacctcttttggtatctcgtctggtcgtcctccgccagctcaatcttgagcgtcctgcccaacagctgattaacccaccatttcctcgtcttgactctgggctcctcttttggcacagccttcttttttggcttctcctctttctcctcatcatcattgccatccttttcctccgcttgcttctccgtgccgtcgtcggccttgtcctcctccttctcatccacatccataaaatcctccaccgtgtcgaccgtctccttgaccttgacaaacccctttaccgcccactgcgccgcgtccgtagtctcgaaattcacccacccgtaccccttgcacttgcccgtatcctcaaacgtagccaccttcacccatctgatcggcccacacttgtggaagtgttccctcagatcatcctccgttacctggaaggatagattccccacaaagaccttggttgatgtgctcgctggagtggcggtggtagcagcggtagatgacttagccccattggtgaggtcaacaggcgcgggctcttccttcttttctggacggccctcgaaggacttggcgtctttgatgaggactttgcggcggtaccattccgtttctgagagggcaatggccgcgacgttggcttcaaaggtggcgaaatcgacgtaggcaaagccgcggttttcggtggggtttttcggaccggcgccgggggccgaggtgggtttggcggtggggaggtggacgcgggtgatgtcgtccaaagtgatggtgccgcccgagttgtcgacgaaccactgtttgagttctggctttgtgactgtgaagcggaggttgccaatccagatgccgtagggggagcgttctttcttttcctttttggtcttatcggtgttgggggtgtcggagtcagagttggagccctcgtcgtcaaatttgggctttgccggaagggatttgccctttttgaggagacgtttggcctttttggaggggggttcggggaggttgacgtccacttcgatttcggtgaggtcggtcttgcgctttttggaggaggtcttgtctttcttgacctcgggagaggagggtggagaggatgaatcggatgccattgttattgtggtggtaatggtggcagtgggagaaaatgggttgtctgggatggtcgaggttaggaccggtgatgttctccagtgcgcaagcaggcaagatgggaatttttgggcagtgttggaaattttacttgagcgataagcgataaggaaacaagcatccgtcgattgcggggggctcggcaggtagccgcacttccaccgactgctccacaccccgctagatcgcagttcagcttcaatgacggcaccggccaggtacacacgaacgacggccgctgagctaatttgtctcgtgtaaccagtcggtttggttgtacggtaagccctcgaggaagctacagtatatcactcgtatagaatagagcactaggggttatagaatcacgagtttgacacagcaacacaacaagactggatcttaatacatgcacatttgcgccgatggagtacacaaccattggatgaccctcaaacaccgaggttgtcccgcggccacacgcattgtcaggtaacaaacatgtcgggtaggtacctgaggtgtgcgataatatagggatgtggtattcgtcatcaggcggtcatgggggagggtgttttgcgccgctcccaaacatgcacctcctgaagcttccgaagaatgtaaggggcggttgccaatcttcttcttatggccttcatgtagagcccatggatcttgatctggaaactggtctcgtgggactgaagtcagttcttccagccgtctgtgacgggcaacaagcaagctggatccaaagctggtggatccattggtacccgatccgttgctaaggtaaagatcccattaaaactcacgtgttattaatgggggtagcttggcagagaacaaatgcaacaacaacaacaggaaccttttcacgttagaccgtttttgttcctctggctaaagaaagacgcagatgcaacaaacactgcgtgcgctgttccatgaaaagactgcatatgtgtgcaaggcaggagactgcctctttgggctagcacaggcccatcgccagcaaaccagcagcgggcaaattcctcgtcggctctccactccggcgcagcccttgctcccctaaacttcctttgaccacctcacacttcacttcctgactggtccgacccaagcctgcgagccggggtcgcctggatgctctctggtcactctccgccgcacctccctcaattttcccatcccactccacacagaccgccgcctctcatcttcctccaattcaccatctgacatctggcaatcggcgagtcgtccgctctgctgtgctgtcgaccaaacccaaccagacaaaccctcgcagtccacaaacccgacgtcgctaagctgcagagggacctgctttgctgcacccgcaaccgcacaatgaacgctgtgttgtcaccgcaaccaccgattttccctcatcagcacgaaaccacccggatctcgccctctcgatccagtacgtttgagtcctcccctccctgctttgagcccgccgtccatgatgatgcacacacgcaagcggatcttccgcagcccagcaactggtccccaggtccaatttactgaccctttctcagtgtcaccatataacaacatggcatccagaaagaggaaggccgacgacgataacgacgacatgtcggtctcgcccctgagctcgccagcccttccatccagaccgattgtcaggccgtcaaaaaagatccgacaagccaacgacgacgtagccgcccgcccgctgtcacttccccgtcttctcgaaactctcaccaacgaccagctccgaacagtcctccaaaccatctgcgaacgacaccccgatattgggcacgaggtggtcactagcgcgccacgaccgaccgtcgcctgtgcgctcgatatcttggccgggtaccaggagaagctacacgatgcaactccacttggccatacgaactccgactatgcctatttccgagtgaagcaacagctgggcgccctcctcgatgccatttccgatttcacgtcacaattcctcccgccgttggagcagcagacaaacatatcattgcagtttttggacggtgtcaccaaagtcattcacgaactccccgactgggaaaaccaatcacatcgccaccacaaggatgctgcgtacgatgagatttcggcggcatgggcacttgtcatcacggaagcttcaaaaaggggcggaggttttatcgttcataccggaggctgggaccagaggctagtaaagcacaatcaacagtcaggaggcaaaatgggacaggccatcaacgccttggcggtggaagtcggatggcaaggacagaacccgattaccgacacaccggctccgtccgggagggaccctaattcgatcttgaaccagcttattaacggtgcatacggttcacccgttcgtgttggaccttggtaaatagcaacaatctaggttgctacttcaccggttcttacatttaaagaaggggcgtaaatctttgtgacgaaaagcctttgcgacaattttctttactagctatttccactctcgggaaatgaaggattcaggggcgacaagggcatagactttggggtgctggtcatggggcgaggggttctggcttttttattctttttctttttcttttgttggtttacgcacacacactcggcgttttgctgttgtactcctttattatcgatatccagacaacaagattcttccttttccttactcatcaccatgtacagggcaggacgcaagcaggaccgataagggtttattcatggctttgagccatgggaaacctgcttgttgagttcttttcttttgtatttaagtatccttcttatgtctttcggtgtctttggcttggagttattgtttgaggggagggtatgtaccgtggcgtgggtacaatgggtggatgggaagcagctcagaaactttgtacaaaaactgatgttgctttgttgtctttgcagccccttgtttctggtgattgtgggctgtggtgtatgcagaagtacttttcttcaggctgcttcaatttcatggcggtggatctgttgatgtggatttgttttcccttcaatgtctggtttggtctctctctgtgttggactggtcatggtggacatgagtggtggtcggcatgctgaccgaccaagaagggatggtctggagtcttgctttacatatatatatctaaatagaacatatccatttagtttcgtttagtgagttgtggtgatcaatatagtgattccttatggggatatgacggttcagacggttggtttggggagtttgaaacacgactcctgatctacggatggagagagaaacagaggatggaaaataactcaaaacttggctggctgtgcgtttcagttgttggggtattggggggatcaacggatagaaggttactggctatgctatggagggtctttacccggttcagagcttgtgggtgttgaaacaagatgtaaaccatcatgttgtcaatagaaagtcaccaactgctttgtttgaaagtgtcaaacaggttctgaaagatagtaagccgccccatcccaactaatttctgtggcttatcttcccattgcttgcagtgaacaaggtctgagatatcagtacctcgggggttgttcatgaggggcaccagccaggcagtggtggtgagccccacgtgacagcctgtagactacgcgaatgctccacaaggctgcctggacccaccctcaccattccccatgggaatacagtgcaagcacgcgtctgttgcctgcgcgccgcctggaagacgccaaaaggttccgccaattcccaccaccgccgagcacacaaattggtccttctcaggaacaaaatccttcttcgcatcgaactccccaatatccagttcatgcgataggagatttcctcgactcagccaaaatgcctgcgtatgttgatattcttgatccgcataacgcgtctgaatgacctgcaccttgacggccaagattgactaacaacttgtactctcagtcccggcgaccagcacacgagcattgtcaaccctttcgaggaccagaagcccgtgatcaatgagtttacagctcagcaaatagctactctccaaagccggctcgacaagcaactgggtcccgagtacctctccgtccgcgcaggccccggcggttcaaagctccactacatcaccgccgaaaaggtcatttccctcgccaacgaaatctttggcttcaatgggtggtcgtccagcattcagaactttcagatcgactttgtcgacgaggatcccaagaccttgaaagtaagtctcgggctttcggtcattgtacgagtgacgctccgcgatgggacctaccatgaggacttgggatatgggcacatcgagaactgcagaggaaaggcggctgcgtttgagaaggcaaagaaggaggggacgactgatgcgctcaagcgggcgttgaggcactttggcaatgtgttggggaactgcatctacgacaaggagtacctgaagaaaatcgggagtataagggcggccccgacaaaactcaaccaagacaacttacatagacacccggactttgtgaagtcgacgactgggccggttgccgcacaagttgctgctcctccacaacctcagcctgccgcaccggcgccggcacccgcagcagccccagctcccgctccggccgccgcaccggtgattccatcttgttagtagctatctcgtctcaaaagctactgttgatctgtgctgacatgaactagcggtttccgccgagtcgtttgaggattttcttggtgagctcgatgaggccgactttatgattagtgaagagggtcacccagacgaggttcttatcaccaactcagcatccgatacaagtactgttagtgtcagcgataagtcagtaagtaatggcagcaccgggaatcagatgcaacctccagcagcgaggccccttgcgagaactggatctgctggcaccagtcagttctctcggcctcaacagcaaccgcagacccctaatccgatgtcacggacaaacgcctttgttggagcgggtacccagatgaacagcaacaacaataatggtccacggccatcgacagggcagttcacctccgggaaccagttcaaccagaaccggccttccatccaacagaacaacaactacaaccaaccacctcgacctcctgtggcccaaaatggtgctccccagaccaacggtcagaacaacaacactgccaacggcaacaacaacaacaacaacaacaacaacgccgctccagccgtggccccagcggaggtcggtttcttctcggctcgggcagtgaaagacataccggaagacgccctcgtcgctggccaggttactcccctcaaggcaggaatgggcttcaacccccgtgccgaaagcccttcgattcgcaagacccccggaatcgaccacagcacatccaagcccctgtcaagaagcgggcagcatgttcccccaaccaagacgaccgaaaccaaaccagctagcggccctgtaccacgaccaggaggcacgggtgttgtcccatatcaacgtccaagcatcgccggagttacgaatcctcagttagactctacaagacggatcggggtacctggttcaggaccgggtagcccgctagcgaacaggaaccagtaccggccacctacgatcaagagacctgcccctgatgccgggaatggcattgggcaacagcagaatggcacgagggagccgttggcggatgggaataagaacgcgccgattgtgcagcaggcgaatggggggtttccgggaccagaggccaagaggccgagggttgcttagtttttgttatttttcatgatttgagacgaaccggggttggtcatcggttagagtggggagccgggtttgctgtttctattgcttgtatcgttgcttatacttgcggtgtctttcctgagaggtataaaacgcatcgtcacggatgggatgggattgggtgtcatgagcgggcgtttgggacatgggagggtcggttttgcacgtgttatgaggcacaaataggaagggagtagttacacatgaaagggttgacaccacttggtggggaaatttgtcaattcaacggttactacctctcaattcttttgttcagatacctatggacatggtcaagtaaaacccaacacttcgcaacggggtcaagtgtatcgtagcagccaaccttccagacccctccccttttcctttcctccccatagcccaaaagattgctcttctccccaaattctctttcataacaaacacacacgtagagagagacacatcgccatcttttttttgctcgcttgctcgcagtttgcaagggtataatcgcaatgataaaatgaaaaaccagattccaacagacagcaaataatccaatcatgtgccatgtggctctcccaacttcaaaaaacatacacatctacacacaaaaactcgagaaaagtcccatccggtttccatcccttccaacccattcgcaacacaagataaacagatatggtatccccaaacacaatcccaacaaaaaaacatccataatcaaaacatcacatcaacgacaccaagacagaagcctgtcctgtctcctcttccatcccctcgtctttattatctttgtttttaacagcttaaaatgtatccgtatcctgcgagttcattgtcccaaaggtatctaatatcctgtcagctcccatccaactttttcgtccatctgcagtcattacatacctctcttcctgctcctctgctggctcccctgctgtctctcgtcatcctcaaaatcactccccaacgggctagcgacacccccgctccgcccagtaggcgtcatcggtctcggcccagacggccgtctgccaacctgcgtctgcgcaccagtcaagttcctgttctcgggcttggggctgcgctggccctcgctgatgtagctggcagtaggcacgccatgcgtcatggtgccgtacccgctctcaacgctgtggtgagggagggggctccccttttggagcttgctgaccctcttgttctggatgggggtgccaccgcggaccaggccaccaccgccggggctgttggggatgacgtcgttaaggggctccttgggggggcgagggggaccgccagaggtggcagtcatattctgggcagcgggggactgcgaccacatttgttggtattcctgggtggctgaaccgtagctgtcccggttggggttgcgagggaagcggttgaggctcgtggcggagccagcccagtcggccgacttgggggacatgggagtgtcatagcccagggcttgggactcgagggcggccttgaagcgctcagtctgtccctgacgaggctgagggtgctgaaggttgagcgagtcgcgatgagccttgtacttagggtcctcgggcgtcccggggaccatggtaatccaattggcagtagggggcccgcccggaatgggctggttgtagagatccccatcgtggtaggtctgctgctgttgttgctggaacccaccctcgctcaagtcctgtgcggagaagccactgtggagcttgtcggtttcaggggcttgtccggacgcaagctggtagttctcagagtagtgatccagggaccccgagcgagatggtccagtgggaaggttgagttcctcagtcttggtggactgcttgctgaggcgagactcggccacgccgctggacgcggtggtttcagaccagcgcgaaatcttggggatacggaaccagctggaccgggacttcttcttgccttcctcggtccgaggcgtattctcgttgctcatggaggcttgcgcctgagctggtgcctgtggcggagtagccattggcacagactcggcacgctgaatatttgctggggtcatcagcatgtcattgttgtcgtagttgacgctctcattccctccacgagcatcatactcttcctcactgtcctcgggaacggtgctaattctgtgtcccgaagtcatgcggtcatagccaggcttcacagatgttccgcgagattgcagcgagaagtgagactgtgatgggtggctcgctgtcgaagtaccagcgtggccctctggctcatagccgtggtcctgctcatactggccttctggctggaggtggaaggatgatcggtcgtcctgaatagctcgctgttgtccaggcacggtttgcgccttgagaacgtccacttcggtcaacaactggttcagcatatcctcgatcctgccgaggtcgttggttcccttggctcccaagcccaacagggcacggcggaagatgcttctcttcttggcattgatatcatcgccattaaccgagccaccctggatcgagcgagccgcggtgctgccggggtacggtcgtgggccattgatggcgcgagtgacgctcttgtcagtgttctccttgacttcggtgatgatgacgtcttcggtatctgccaacagcttcttgagatcctcaaagttgttgcgcatctcggtagcagagcggacaagggtgaccagaatctcggtatcccttgcgctgcgctgcgcgtccctaaccatcaagtgctgcatgagagccataatatctcttgattcgatgttgtccatgcccatcccggtggcaggatcgtacattggcgaagcaatgccctgagacatgccgctaaggtggcgtgggttgccatgattgtagaatggatcatccaacgccccacccggtccacgagtggcaagcccgaaatcaacaccctttcctttgtcctggacgtcaggtgtcttgttggggccttgggaaatatagccctcgtcgaccttgagcccgagtgggctacgggtgccatagtcatcgtaagcagcgtcgaatccattgcctccgagcccagggaggttggcgatggggctggttccctcataaggatttgtgaccagggtgtcacgcttgcgatcttcggaggtgcgataccattcgtcgtgctcttggctagcctgtcggctgtgattttgggccatggccatgccagcagcagcaccgagtgcagcggcgccggcaataacaagatttcctccgttgcccttttgctgcgcaggcgaaccatcgaggggttcgtagtcgatgccatcatcaggtgggtactgagcacgctgccgaggcgtggcttcctcaggccactggccttcctcgtcacggccgccatcatcgtcaaggagagatgggttagtcagaagatcatcctcatacccccaatccaaaatttctggcatgagctcgttttgattcggtatatagctcgaagccattgttggtttctcatgctcgctgccaagcttctcggtgctgagtgatggatcaattccaggacgtggtccattttgtgtgcgctccttgaaagagcggttgcgctggacaccagcaccctgccatgcttgctcttcctgagtctcctgctgtcccttcccgttctgcgcccggagagcagctgcagcggcatccaccgcacggctggcaatcgcagcttctgatactgttggggactggcggtaggtagtgttctgtggaaccttgcgcccatactcatcaagctcatactgtacgaactcgcgagatcgctggccttctgaagcttggctgaccacggagcgcttggttgggctaccgagctgtcggtcaatttcctcgtcaagagtcgccatggattcacggccttggtaaagcttgtccgagtccaccgtcaaagccgatccttccaacatcgaggcgtcgatgagggatgcgacattggactcgatgccgacagggtgcacaaaggctggattcaacgcaacagcacgtacagcctggcccgaggttacgcggtcgagttcgctgccggcggggcttggtccttgggtttggtcgacgttggagctcctcacgcttcggtcgtcgtcatcgtagcctgcaaaattgcgattcattgctcctccatcctggcgtggagacttgttggctgtggaaatttccgagtcgatagtgcggtgggtagctctcgaatcccggtttggccctacgtcgctaccagcttccgtatatcccgagacgctggggatagggctgaggccccgacgttcgggttgataggggacgtatttgaggggtggaggtacgtcttgggtgctgtaataatcgtatgggttgggtggatattgtggggacggctcctcgtcctcgtcgtcgtactcttcgtcctgaaattgccgcgcatggcgagaagggactttcttgccattgtcatcaagaacatactggtcaggatcaccagtgcgttgacggggtaacgccttgaggtctccgtgcgagaggttagcgtgttgggctcccagggcttgtagagtgttgacaggggtcctggtgggagtcggcgtcgactctgacgaaatcggcccttgggtcaaatcacgaacaggggtgagctcctcgctggccgagtggggtctgtcggtatcggccgacaaaatggatgcccttgtcacatccgaggcgttgacatcactcatcagaggcatcggtggggctggaggtgcaagcaggtccgagtcttcgtactggtcgaacgcttgttgttcagaactacgatttcgtctctcgtcccttcgtcgtctccttgaccgttgcttgtcttctgaaggggaaccaaacgcctcgtgtgcagcaacggcggcagcgcccaaagcggccccggcggctgcaactttcaggggctcaatgctgcgaactggtgtgttatcgaggtcatgggagtcttctactgattcgtggctgagagcgctgctgtcgtcgaagtcgttatttcgtgcctctcggtctcgtctctccttgctggtcttgaggctgtcgcggggtgtcagcatcttgtcggtgccattggaccgtcgtttgtcgctcgcataatcatccctcgacgctgatgtagcgctggatgtcgtagaatcgcgccggcttcctcgccggctctgttctcgcttgagggcgttgagttctggtagaatgaggcggcgaatggcatcctccactgtctccaaaagtttcggattattgatggacgatgtctttgaggcgccagatctgatggagtgctggtccacggaccgatgactgggggcaagagccgatgaaaccatgctggagtcggccactgacaccatggactctgggtgtcctttacttgacctcctacttgaccgatccgcatacttgtcatccttgctgacactgctcgtccggctcttgctagacttgtgcttactgcggtccctctccttgtctcgagacctagtaacaaccaccctttcgcggcccccttctcgtgtccgggacttttcagaggcggctgtggcgctcgcggcggcacccaagccgacagcagcagctgctacataatccggactcttggagtcggatgctctgaatgaggtggtcccgccagatccatcgaggaagctgtcggttggtatggccgaaatgtcactcatgttgccgcctgtgtaactggccttgctaccatcagcagccggtatgagagggctcgccgggcggcggcggcgagcgcctcgctcaatttcgatgtcaatggggtttcgactaacgttgctctcctctgtggctgaagcatatgagctggcgtcttcaagatcgttgctgatggccgacagcgtctcggcagcagagcggcgaccgccgctcgcttttctcgatgatcttgactcggtgatccgaatgtggtctccgtcggagcccctgctgctgcgacgtttgctgcttggtgtcaagcggactcgaacactgggtttgcgcgagtcggccgacgccgagttgccgctggtgctcttcccaccttcgaagtactcgatcaggagagatgtctgcgatttgcttgcgcgatgccccgctcggatagttacgggtgtaccatcatctgggatggaataagaggacttttcgtctccgggggcagatacctcgctgccaagttcggtccccaggtcagtcccggtcggcgctgcagtgtggatggtcgattcggtctctgtgggcactggcaatggcggcggccgactagacttcttcgtgtctgcacccatgatggcgtgtaatgtgtgttgtgagcccaaaggggtgttggtgtggtattaggtgtcaacagtggcccctgtgttgttgcccaattattactcccaggttggggaacccccttacgtgtggaggaggacggccagagagggtggggggattgaaacacaggaataatcgcgggaaaacggcaacgatgtgttggccagccagaaagcgtcgcctattaacactcgcagtccagaatcatcagaatgcgggaatgtctgcaggaaatgtggaatatgtgagcaatgagggatcgcgtaggcaggaggaggcacgcacccaaggcacgaaatgcagctaggttcgccgatgatagggcaggagggagggcagtagggcagaaagagactcctgacaggctgcacgaggcagtatcaggatgtggaagtgtcgctggctgctgggacgtacgagcagagaagcagaacaggtgcacagaatcgatggggccgagtggcgggcggcctgtcgaaggagaaaaagtgagtggcggcgcaacgagacggacggctgttgttgataggagcaaggcggacagggattctctcggcagcggggcagtttgcgtcgataaacagaacctggaagtcaacttcctgttcgtcgttttcgaaaatcaattattttttcttcgtttcggccgcagttgaatgtatgtacagagaaaggggttgctgcaggcgatatgccacctcctgctggtgttggccggagagggcggtgggatgcgaggcgatgggaagaagatggaagacggcggcgggataggcggtggcctcctcgaagctagcttgtacaaagtaggtcctccaagctcgaatccaatgccgagttcgagcggttttgggggcggatccagaggactggtcgcaacgtgatgcgcacgcctggccttcttggattctggcaggaagcggacctcggacacaggctgggtgactggcagagcctatgggagactttgttgttgtccaggagcggctgggattgctcgaggtgcttgatgtgctggcgctgcttcaagggcccagccaattgcgcgtggagtctggggtcggtggtgcagcgaggtgcagacaagcttgcaacgggacggcggagcagcgagagacagacgagacgaggctgctgctgcggagtcgaggggggagaaatcgagcaaaaaccgcacaccagccgccaacggtgtcggttccactgtactttcttgagcagcagcgtacaagatcgttggtgagatggagatgtctgcgatatggtaaacgggagagaagcttggagggggtttgttgacattgactttgctgccaagtacatcagcaggcctgaccaccaagtgagcaggacccgactaggtgctaggtgacaggacgggggctgggggatttatcggatgggctccacagtgacggtttacggtagcacggaggtacagaacggacaatcgccctgagcgaccggggcaagtgcccctaagcccagaggcctggctccttccacacctaaggcgtggcctcgcttattctattagtcagcattaagccgtcttagccaccgtataatttactatcgtcgctttaaattaccggctacttatataaactattaactactatataaactattaattattacagaaattattaattatctacttactatattacctactatgttacttatctattgggtttggcgtatgggtaaagtgtgggaaaaggtgtaaaagtgtaaatttcacttgcgcaaatgaccattatccgttctgtacctccatgccaccgtacggttgggcgatctcgtctcacgcccagcttcaacattgtgccaaacctggaacaggaacgccgtcaccgcctatgtcacccataccaccaatagtcttgataaaatatgtttgtccattgctctccctgcttcaagtctcttccgtttgcctgacctctgcctctcgaacttcttgttggatcgatccagctgaggctacccgggcgtcccgccattgccgccgtccaattacgccaatctcggcgcggggaatagcttgaggtttcacgggacacgaggatagacccggtagggctactttgtgttaattggacttgattcatccatcacgaaaactcggaaggcgacctcagctgcggtgttttgtctacgaactcggtggggatatatgtggtactatgaaatgctttagaggtccggccgcaatattatgtacatcgtcaaaacaccaggttaaagttgggagtcgttcaaggaaaggccttcgcaagactttcgactgttcatcttgagctcgacggccttgttccatgaaccaagtctctgtgttgtctcttggagactagctggttgttttgagagtgacatttgatattttctcatggttactgacatcaatgtatcaaatgttgctgttaaaaggtctctgaattgataaccttggatcttgatatcgatatcagtatcgataagctcatggtccgtgcatcagccacacgtcaaccccagaccacaggagcaagacccaaccaatgatgcgccctgcaggaacccttcatctgaatatcgcgtcgtgtgtgtttggagcttcactgtaaatttcccaggccagcaccagacgacaacggcgaccagcaatccgacttcgaccacccgaaaccccacacgattcccagaaacttggcttctgacccctcggactggcgctggagagctgtctcgcccgccccgtactcccagacagcagcgacctcagtacaaacaaacctcccctctccgatttcgacgaccaccacgagaagcgcaatcctacgatactgaaatagtcaaataaaatacagatccattttcatgttctgagaacccccacacacgaaccacagcaacatgacagactcattgcacaacgtgtcggtagtgctcgacaatggatccggaactatcagggctggcttcgcaggagacgacgtacccaagtgccacttcccatcatgggtaggcagaccaaaacatctccgcgttctggccggtgcgctggagggagaggtgtttatcggccagaaagcggccacagagctgcggggcttgctcaaaatccgataccctctggagcatggtattgtcacggactgggatgatatggagaaaatttgggcctatgtgtatgacgagggcttaaagacactgagtgaggaggtaatgttccggatcctcaagcggaaaggcgcaatggctgacaatcccgcatggacatatagcaccctgtccttcttaccgaaccaccactcaacccaaggtcaaaccgtgacacggctgctcaaattctattcgagacgttcaacgtgccagctctctacacatcaatccaggctgtactgtctttgtacgccagtggaaggacgacaggtgtggtgcttgatgctggcgacggtgtgtcccatgctgtaccagtataccaagggttcacggtgcccaacagtatcaggagaatcgatgtcgccggccgcgacgtgactgaacatctacagacgctgctccgcaagagcggttacgtcttccataccagcgcagaaaaggaggtcgtcaggctcatcaaggaggccacgagctacgtcgcgagggatcccaagaaggaagagaaggagtgggcagcttccaagcaggaccagagcaagtttgccgaatatgtcttgccagatggcaacaagctcaaggtatgcataacttgtgtgttcacgatgttcagggagtagcaaatctaacgctaaaaaagattggagcggaacgtttccgtgccccagagatcttgttcgaccctgagatcatcggtcttgaatatccgggcattcaccaaatagtagttgattcgatcaacaggacggatctcgacctgcgcaaggacctgtacatgaacatcgtcctgtcgggaggtagtacactcacaaagggattcggtgacagacttctcagcgaagtacagcggcttgctgtcaaggatatgagaatcaagatttttgcgcccccggagcggaagtactctacctggattggtggcagtattctggctggtctgagcacattcagaaaggtacgttgactccctgatagacaggaaataggggatggcaaagactaacactccaatctagatgtgggtcagcattgacgactggcatgagaacccggatattatccataccaagttcgcctaggtgtagtcagtgcgaccgtagatcgagcaagattcatttgatgtcgtcgactgacagcgcgggcgacactttgcgggtgaagaaacaacacttatccgcattccctattcgtgtcgagattcgatgatgttatgagtatgaagtcttggaggggatccccggcccagtacagcgaagggaagagatacagcacaacaagtaaagaaggtgtacaaatttatccagggactccagcaaagctttgtacacaagacgattagaactattgtaatatctggggatacatacttcgttggaagaggagtcaggagggggagtggttggtggctggtactacagcttttgttggttgataggttttagtgaacgtacatgtatctttaaaggagaggagagaggggagaaggagtgcggtagtagggtgtagaagggtggatgaagggagtgatggaaaagaaaatgaatgataccctttttgctaaccatctcgaacatgcaattcttctcttgtcgtgatttaaagacttgtacatgctgcttctgtcttggcttttggcctcgatgcttttatacaggtcgatcaccgctaggttgatacctgtctaaagatgcctagctgctatgaacttgaccacgtctccctctgaggcgtttgcgatgacaagaccgacggggcaataccatcaggatccaacgtcatcagtccggagtggaacttctgagcttttttccaacccgtgctgcctacttacttgtttctaattcttgtcctctatgctttggagcggtcgtagaagaaagcaaagaatatcatcgcgacactttcttccaccgcctcaagtggcatctggtaagcaaagatatttcgatttgattcatatgtagaggtacgaaatccccataactaccctattataaccgtcgggttgataaggtctcacctgggtcgtcataccaccctttttttgggtctattatatacttggcaatcatgcttctggccgcgcagccttttgtatgaaattgatcttgtttgttttcttgtttttgaggagacaagtcagtatttgggagattgtttttgtctcgggggtgtgtcgtgtgaggaagtggcaacgacaagagcgtggttgtgtggtggagcttgaggaaagactgggagtgttttcttgtcaacttttggcaacagccctctcttcttggaataatggcagattccaaagtagaagactttgtagaagtctatagattctcggcctggcactctcctggcatctgtataagtttgtgtacggcagacttgtgttttgagtatctctttgacgacaagtccttgctggaaggattcgtcatattaaggctatgtacaaggatagaaagcttctagaatggctcaacatgtatttacgagagaacgtttcggattgggccatctccagttaatttcgacaaggcatggctacttggtttggactacatacatttgatgttccaaggctacggtctgtgtacttactcattcgtatgcagcacgaaaaaccacgttgccttgggaaattcagcggtggtggttacccatgagctgcccctgattttaaaaccgataaggaacagaaaccgcacggtatgttatcccctttgttacccaacgttcactccagctcttcgagttccagattctcagaacgaactcggttgacaccgtacctaggtcccaaattccgctctctccgttgaaggcaagcttgaaagtccctgccaggtacctcaaccaaattgcccaaaggggattccgacagtccaggtcagggtgagcgggaagcagcaagcacggaagcgggggaaaagatctccttctttgtccgatttggtggcgtggtaagaatcttgctgtacacgtgggactattacacacaaagaaactcggcaacagagatcgcacgcgatttttagagtttgtttcgtaaaggtcaaatttggagaggcaggagcgttgaggtgggcaggcaaccatgcaggcagagagtgatcgctcaacagtgtcaagagaagagaattgggcggacatatcacatcactcattctaacatcattgcaaaacatggcagtaaaagattgctcagttacattcccattttaccgggagtgaaccaaataaataacaataatccttcgcacactatccatcctccaaaatcgcaccaggggggtatattgattcgcactccatcccaaaaacaaaacagccgtcaaatcaaaaaaccactattcaacagaaagaaaaccgcttcttattctccattgttcataactctttccccgtccaattctcctccgctccttttcttcaaccgaaacccaaatttcccgaccgttggtaccggtagttgaactgccggtgagatggtgtgaggtgaggtgtttgttttgttggcgcctcagctcgtgtggagttttgactttttgagttggagaccgctggagccccttttcccaagccttgctccacacatcccagcacaccaacaaaccatccggtctctcgccaaacccaccaacaaaggggtaccggttcgtctgatgacagaattcatcttgtcgaggtgacaaaagattgctgagctgagaaattttcggtagtcgttgcttcgttgttgttggtatccttctgaggcccctgccctccgtgacaaaaaaaaaatgaaaaatgaataactttttgatatccccttcccgattcataaaaccctccggaacgccgtgctgtgttgtttgcaaaagttggtgtggtatgaatatagacaaatgaaacagaagcgcagagcagatgagtcgtcgagtgtgtcgtctcaacgactcacgacagagtcagagtcgacttagtggccgaggctgctgatgcggccccagaagccagacttagtgctgccgttggtgctgttggagtctctccggctgagctcggtcgagttcttcttggtggaggaggagctggagctgaagatgttgccggcgccaccgcggcctacgtggctgatggtggcagccttctcgcggacctcggcgcgggtgaactcctcgtcgaaggagaggacagggcgctcggctttggcgtgagcgttgccggcaccgccccggccggagtagaaacggccggtgctggagggggtggtagcagcgggggtagggacaccggagggagcggtggtctgaggagcacggaagaagttgccagcaccgccacggccagagtgggtgtagctgttcttagcaacggtggggtgaggctcggtgatggtgtagagagaaggcattttggcggttgagtgtcttgtttgttaaggacaagaggttgttgtgttgtgttgttgtgagggtggtactcgggtgtcagagacagagcagagagagcttgaagctttgggcagtgaatttgctttttgatggtgtagtctggtcgagatatccttgtgtaaaaaaaggagcagacaaaggagagctattatacccaaggcaaggaaagtgccttgtgtgtaagtgaaattgccaagcatgggccaaggggcagacagatggagacgggaaacgggaaacgaaacttttccccaacaagcccccccctcctggattccagccaaacaaagatccagcgccgtagcacgagctctgggcggaaagccgcatgatcatggcaccctggcgctaagccgcctggaaggacagcgaaaaaagagtacaagcctggtactttgccctgtagccctctttgttccaacgcccgatggcgccctgggaaaattttgcagggcaaagacgcaagagcttcaccaagatggcctcttttggcatggcagtgtcatcatgggcattcgcaagatctcgccattcggactgttgataagcttatctaggcatgatacactacatagacatagagtcagaaatgcgatagattaccctattctggttcttttggtacatgttctcagtcatccatcatcaaacacctatgcggagagtgactcggccttttcatggagaatgcacaaaaatgatgagcccagaggcctggaattggccatgttagcgattgcgtcaggtgctgcagtggacctggccaggacaggcttacaggctgtgcccagcacgactgggctgaaaatttgctgccgagagtccacccaagctttctgttagcttatgaaaactcacctggccgtcacgaggcacgctaatggtgctatctgttacgaaatcattactccatcgcaagctcccctgtcatgtaccttttggccggacgccccggcaaacggtacttggttggactgggcagccctgcaagggacagtgacgactttgttgtcgaacaactgtgcgaccacctgtttttcccatctccgctgcgacgagggaaggaacttgcagtgacatgagacgacaaatggccagtatgaccaatattcaagggcttgcaccatctcacgtcaccttctcatgaaaacgaacaattcgtcatgagggcgactccggcccggccagggagcggtcaacatggcggccacgattctcaaaaaagacaggtcgatgatgcttcgtcaagacagaaagaacagaattttaaggtctcgtggttcaccccggacctggatgaagcttggctgccagaacaggggaccaaattggcacatccacgctggtgggtttgtggagccgttgtttaaaggctaccaaatgaggcatcagaaaaacaattcggcaagttggccgtggccaggttccccagcagaatcggtcggccccggattttcaaggatctgagagctctcccgttcgctggttcccgcgatccccgtcaagacaggcatccccgcattgtcgactctgcgctggctgtatgtcgtctcgttccccgcagggcattgaattcccaaagaacaatctgacgaagcttcgactactcacctacccacgagctcacatcagaaggacaaagatgccctcctgatcacacccgcagcaacgccttcacatactcacttctcgactctcattcggctgccgcccggtataccttttcctcctccaagaagtcaatcaagcggcaagggcgatggcgaacttgtggcttgggcgctgggcggttaacgccggccgggcacgcaagatgacttctttcgttcagctctcacagctgtctcgcccctggccaagcgcccgcccctgtactgtgtggctgtcatctgacgtagagacatttcaacattgtttccagaagctcgccgggcattctcattggccgtgactgttgtagcattccgtcatgttactctgcgcattgtaggctcccaggtaccgtgtgacgctgggtgaatcttgatgcaggagaattggtgactggaggtatggtaagttgtgtgagagttggcggaacaagatatgtagaccatctgggcattcgggacacccaagtagggaagccgaagtcataaagttatccagggttgaagtgaagatggacagtccgggccgaagtttcatgacttctttaccgggccgaccctcaaagtctcactgcggcaatgtttcgacacagcatgcggctcttgctctaagtgggaactgagtataataacacaacatattatcctcgtatagaaaaaacactttcatacatctcgtgctcgattctgagcactttcaattgttgagcttttcctgtgatttctgtggtacgaggcggccaccagccaactcgaaaaaaaggcctacttcagcccggttcagtcatcaaacactttcatacacccatctccattcctctcaagccagtcaaccaactctttttgggcatcgccttttgctatgaagagcggttgtcgttccctttgcaaaatcgatcccacccctttggctcctgtctcaacatggattgaaaggtagtttgcggcaggaccaaactcgcatggttggaacaatctctagggaagagtggacaaaatgatggcagaaatagagggaaagcggatgtctttgggcacatcaaaagtgggtggctgtggtgcctatcgacgagaacctccgctgtggcgtttaagacaccacccacgacagactctgtaacctagtgtacaagagttaaaataaacctgagagaaaggaaaattcgggattgtctttccagaccctgtcttattatcttccaggcagatcaaggaacaacttgacatactcatatcgaaccctcatcgaaaccagctccaggcttctgatacaatcattttggaaaatcgtcaaccgtttgctgtgaaatattctcttggtcgtttgctggctgaccccctagcagtttgcaagcgagatctttcgtgtgcgcaccacgccgttgttcgccggtaagcccctaggcagtgtttgcacacgcttcagcannnnnnnnnnnnnnnnnnnnnnnnnnnnnnnnnnnnnnnnnnnnnnnnnnnnnnnnnnnnnnnnnnnnnnnnnnnnnnnnnnnnnnnnnnnnnnnnnnnnnnnnnnnnnnnnnnnnnnnnnnnnnnnnnnnnnnnnnnnnnnnnnnnnnnattggagtcggggggatgtattatgcgggccgttcattcccagttaccacggcccgcccaccaaccacgttgatccatccagcacgttgttgatccttgccccgcgtgatcgacacccttggggccctcacatccctgtcctccgtttgaagccgggtctcattcccttactgattggaggatgccggcaagggaaaatcacccgaggtcttcacccccatctccccctttaagccagcgcaaatccgcgtttgaggtcatccccaaatggaaccaaccacccccttaccccggttccaccaccacctacccccccggctacaacttcatcctctacctcaagatcctcataaactggtacaacacctaccacccaaccggccacctgggcaccttcggctcaacaatctgctaccacatctttcaccccaccaacctcgcccccttccaccaaaccaccctccgtgagcactgggccacccaacccagggtatacacctgcccctcctgccccctcccctactcctcctgcccacaccggtgcttcaccccccacgcgggcaagttctttggtctatccaacgaccctaccatcctcctcgacgacctgttgacctgcttcggaccggagaaccatgacctcaacgaccacaactgggggaagatcccgaggatagagtttcagtcgctggagcagtacgagatgtttcttttggggggtttgtacacgatggacaacaacctgaagaggaatatggagacgcggttgtttcaaattcacggtttttacgtccatttcgaaaagatggtgagggagttggaagggggggtggaggggttgcttgagttgtacaggggggttgtggatttgagaaacggggagggggaggggaggattttggggggcgtactcgaggagattagacggcgggaaaaggaggaggtgatgaggaagaagaggaggtggggggatagggggaatatggaggaggtgatggtgggttgtgatggggtgtctaccgtatcttctggcagcagtgaggggtgtgttggcagtgacaaggctgctgacaatgataagcgtgatggtgggtttccttccccgacaaagaaacgcaagtcggttgggacgacggatgatgaggaggatgaggacgccttggggggccgattgctcagaatataacgctcgcatgacgcaggagctttgcaggcggcttgatgaggagagcaaccaggagaccaagaggcgccacggcctgactgaatacgagatgtgattttggagggcttgtcttggttttgattgaaaagcattggcttttggaagttgggggacagaaacgctgttgttactcgggtatcttgaaccggataccgcagctatgatacgatctggagtttgaaaagggacggcgtcgtttttaccatcttgagttggaaacaaaactggtatatggttcctatcggagttttacttggagtagaaggaccccaaaggttgggctgggaaggcaaatctgtttttattaccaacagatacccctagatttgatatggtatggcaaggagccagggaaagggacagcgttgtcatttaacttggttattcgggaactgggagtggtttctggaaagtgttcggtttactgtcgttatggacacacatatgagacacgaaatccaaagagaatgtttcattaacccaacccaacatgctcactgcatatgtgcgtgtattgtacaagttttgcccgcccttcctcatcatcatcacgatacctggcactgcgaattagatcaacgcagaaatgctgaactacgccctaaaaataatcaagaccttcttgtggatagtcaacaggccctcaaaaatcgttgataaacttcaaaagatagttattcggtctcaaaagagagttattaagcctgaaaggataattacgatgccttaaaagaacatgataggtcttgaaaaaatagactaaacgcctgttttcttcttgaaaaggcccagtagaaatcatctctctatatgatacataggtacacacatacaagtctagtcgtgatgggatatctcttaaaagcagagccatagcaaggactactcaaaacacaaccacacctccgcaaataactcggatcaaaaatgattatataaacaggctaacattcatcaaaacaaaactctcaagaaatatccccccatctcccaaggagatagactccaaaaaagcttcaaaaaaacgcgtcagaaaaaaaaacgcaaccaaggtatctctaaaccgcccacacccgtggtatccatcccccctcgttttttcatcccctatgaaagagtttctcatgtcttcgtttcaaacagatattaccctggtatcactttagacacccctaaacatcctcacaatcaagaaccacaacgcgccaataaacttgaacgcactcaaaccagccacactccacaacaccacctgcaggtaaatgttggccttgtgggccttggactcctcctcggttctccccgaatcgtcctccacaactctgtccagaccgcccgtgctcagcacgacagcgaccagggcaaagttcatcaacatccaaatcaacacgaccaccgtcctgacgcctctgtagtaatccatctgcttctcctcgagctgagccggtgttggggccttgacctccttgacgggcttgcggctaaagacttgcatttccctctcgtactgcgcgttgagatcgccctcatcaggcaaatcagtcttaccctggccgtccttggtgctgactgtgggcaaagcatccggcttgtcgtcacccttggtaccccacgagatgtcgtgcgtgttgcaaaaggcgtacacgttcaggacgttggtgtaggtgggagagagcaacatatactgaatcaacgaggtgaacatgtgccaggggtcgaacatcatgagcgaggcgatgaaccaaagaccgtacgtcgacagaaccgagatgatcaacgtgtagaagacctggttcttgaacaaagaatcgatgctgaagttgttaacttgcagatcttgaatgatggcgtcaacggcgatgtatacggctgcaaacatgagatagatgaagatgatggcccagaaaataaccatggccatgtaatatctcccggaaccagctggcctgttgcccatcgccaagacgaagcatgtcatgagcgatacgccgtacagccagaggaacaccacacccaagatttcgcccactttacccaatagtttttcgtctcccaagcttgtcgtcaggatcttgaaaaccaaaaagaagttgccgatagcgaaccaagcgaagatcatgttgatggtgttgaagatgaattcgataaagaagaagaatttgcggaaaatagagtgatcggaccggaagaactgatggaagtggacaatggcgtagatagcagcgaagaaagaaccgttaagccagcgacgacgctggagaatcaactcggtaaccgtgtctggcacatcagtctcgcccgtggccgacttgacgtactgaagaatccagtggcagttccgcttggtgacaagctcgaagcacagaatacgatcttcggcgaggtacatgttggctgtgaaaataccagcatcaccgccgtgcagtttctcaccagcaaagtacttctccaacggcccctgaccgttcttgtcgttttgcagcgcaacgtaccggtaagccgagaaggcaccgggcaagacggaaatgaaaccaaaggcagattcgagaggcttgtccaatatgttactcatcttgtactcgaagttttgcgtggccaccagtgggttgatcaaattctttccacccttgcctacaagcgatggttagctacttatcatgggaaaggcatgcgtaaattgatagaacccacctagcatagccttgatctcgccgcaggcaccaccgcacatgggctcaaggtcgaaagccttccaaagctggtaaatcgagctgccaccaggcttggtaccagcgtcgatcaacacgcaaatgttgggatccagcacctttccgaaggcgtcaaagaaccaacgatgagagttgatcttcttctggttcttttccttgagacagaaaagcatctgaacgggctgctgcttgggaataagctgcacaacgtcgttcttgatggccatgccgacctgggtggtgtattcgtagatgtgtgccgtgacgtccttattgttaacttgctgtttggcaataccctcttgatacacgcccataccagcgagcaaagctctcgtccttgggttaatcttggcacgaccgtcactaacgacgcacaccacaatcttcttccacgcatccttgccccaggtcttgctctcagtccgtttgcacatgtactcgacgttcttgaacacaccaatcatggtacgcgcaaacagaatttcgtcttcgttgtacatggtgaccacaatgaacagctcggtatgtctgggcttgctgaagagcttttggcggagggtgaagttctcgttgtagaaatccgaaggatcgcaggtggcagccgtatatctcatgtgggtgaactcatcgcgctccccgtggggaagctggttcagcagctttggaggaattgggcaatcaagaaccaagttcccgcggtacaacagaacctgcttgaccgtcttccacctcttgatcgcattttgactttttggcgcctgctgcttgtcgtgataggggtcgttttgcccaacttgcgagtcgttgtgcgtcaacatcggccgtctgtcgtcctcggggaaatatcctccacccccgtcatacccctggccctgcatgggcgttggctcatatggctggttgtagtaggcatcgtggtgtgcctccgggttcaccccatacccccccaagttgtctacggattgctattccaccagagtcagtcttccgccctcaacatccccccattcccagagatactcacagcggtctgcatttgtaacgaatcaccagggctaaatctaccaggaccagcactgggcatatccaaatgggagtgtccgtagggcgcgtcgtcaagttggtacccagattgcatgggatgggcaggagaagggctcctgcgtgggttacgcgtctccatgggatggctctcgtaataatcgtcgtctgtacgtccagaaagttagccttgatccccttcccctgagtaaactttcgcccctagcgtaggccagctttcccacatatgcaggccaacgtaatacggacccttaaggtaggtagaattaagaataaaccaagctactgcgccgcgagacctgacacagcttccactcgtgcagtaggtcgaatgctgagctgagtaggaggtatggtaggggtgaaaagccgacttgcaccaggcaagacagaggaggacgagaaacaatgatgcggctcggacagaggccgcgggccagaaaaggaggaacgaggcacccagaaaaaccggccacttgggctttgaaggggtaaagaatgtgatgtgatgctgggatcggcaaaggtgtggaggagcgaaaggtacaaacgcggaaggggtagggaggaggaagggaaacccagaggattaaggtcgggcctgcccttgtagagcgacccaccgccacctcgaattcagggtctcatgaggatggatcacagggaaatgtaagacgaagggaagtgtggttctcatgacaactggattgatggtaacaaaagagtgtgtgacttacttaaacgattatacgccatgtttgctaatgttgagtcccttttcgggggactaggaccttatttctttcctgtctacaagttgtagatttcttttatgtgtggtatgtggtggtggtggaacaagaaaaaaggaggtggttgtcgtctgctatccctcggtttcacaagttgcgccctctgctggaatgtcgaactttcttgctttctccttgttcccctctctcccttgagctggccgcagcctggcggtcactattgctcgaacagaaaagggttgaatattagttggccctctccggccctttgcgcggcggcaccaaaaacgcggcacgaacagtctcgcgggtcgtcgttcgtctcgatttctttctctagcggcgggaagggttgcggttcggtgcggataagttacagatgcgcgttgctcaggcggtcggtcggtcgaagcgctcacgacagaatagagtttctgctgccaagcgagcagcagtgtttgggtgctttgggctctgttgcaaagagtagcaacgggatctcctggcgagtggaattcttctcaaaaaaaggcgggagtcgcagtttcgtgaaggtcaagccttaatggacagctgacaggggtctcgaggggcaactgacgggggaggctcagcgaatggacgcgaatgaaggggcgttgcgtcccagggagatgcccggcagagccacaagcactccgctgaactgtcttgcgtttcagcgcctaacttgggaaggtgtgacgttgggacctgggcgggacttgataaggcgcctgctgattgggtcaagcgcaccgtttaaggggttgaaatggaggggtggaaagcctgtttctgtttctcttggactgtggggtgcttttctatcaactatcccaaaagatcaccatcaacctcaccttgtaatcaaaatatcttgagatgggccgagttgtcctttggcagcccaggctccgcatttgacagagatcacaggcattgcttggccagcctcagctgagctgagggaacccacgactgaatcattcacccacatcctcaacaaacaccaacaacaagcaagcaatccgagagccgcccagcggctgtgcagcgcggcaaccacagaaaccgcctcttccacacctcacccctgctctgttttcatcaacctgaagatgctgccatgcacccgctgcgttccgctctcattgccgctgctgcacacccccaaaagaagcatccaattcgacgaccggtcttcactctgcgtttgcgtttctgcagtgcaaccatatgaatccaacttcaaccccaaccctccagcctacctatcgatcaagattgagcttgtgatacactatagcatccatccatcttatcttcatttgatcacatagtagcagtcaggtcgacaatcatcaacccgccaggccaggccagaaccccagacccaacctggaacttcccactcctctctgcctttccatcctttatcttcacgtaagagtacacctgacaacggtctcgaccatcccaacggtgacccccttctttaacctcccaacccgcaggtcagcccggtccccaggtctaggaaaaatcccatgctatttttacattttaacttttcctcgtctcgcactctttgacattgtggaggaaccaaaaaatcgggccgtcttgtctgatgtccttgggccccccaattggaaacggttccttttttttgcattgctagcaaaaagtcaatccagactcgccgcatttcctcgtccattcaggtatccccattagtataagccactcgtgccacgaacacagtggcaaccgtgactatcaacattaaggccaaggcgttttagcttgacattctccaactccagaattcggtagtgcgcaataaattctgcagaaaaaaaatgtcgagattggaaactacaacaacaccctgcattttcttaaccgccaagcatagtgtttcgagcgtgtattcgtaccctcaccacgtaagccctccttcaacgaatcctaactggacaaagcacccgctccaatcctcagccattacatttagcttccccgtgttcaactgttcaacggcttggatgcataccgcacattcgaccaattcacatggtgatcccgccggctcggattcggtacgactccctcgcctggtttcatatatgctgccgaaatatgctcgtcacaaattccaatttcctcccacgttttgaatattcacaatgacaaaaaatgagcaacaataatattccgttttgataaaccccttgcctgctctacatactataactcagtcatattatcccactcagccaaccattttgaagatttcagtttgctgctaagaaatctccttcccaagcctattcagctcctcggtgataaactgcccggcattaatcagttcacttgcaccgtacaaaactctcttcttgaccttatcaccgctcgtggctcctctcgcagcccactcctgcaagttgccatactcatccatggacccgccgcccaccatgaacaccagcgcctccgagaacccctgtctccgctgtccaaagcttgcccccattccaggagcgcctccaggaccgccgggtagcccaccgggtgccccgccttgagttgccgcccggaccggttgtggcatcgtccctcttgcgtttgcgctccggggatcaaagtagaggtagtgctccgtcttggcaatggccgatgagctggccgccgaagggtccatgatggattcggtaatcttggttactgtaagatcacggtccacgggcaagaagttcttgatgccgccgaggagagaggcaacattggatgaaagggcgttagtcggcacgccagtctccttgagtctgtcagtaagacgggtggagatcgccgagaagcggttgaaaaggtccgaagagccagattgctgaccagttgattgctggttgctgatggtagtgagctgtgtcattttggtggttgctcggactctgtgtctgaagttagaagcttgctacgtgtgatgataagatcgggaactccttactgtctgatgtaagccaggcatgtcttgtcacaaccagcaccgaccaaggcctcttcgaactgttgccattccggcctggacacgtcctgctccgtgctgaggaaccagataataaacagacggagcttgtctgttggttgacccttgtcgtctgttctgatcatttccaagatctgggccttggtctgcttggccacctcctcttctagctggaaatagttgtccagcttgcggttttgaatttcctgcaaaatagcggcaagaatgttcatgtgcatatccaacgtggccttgcgttctcgaagctcgggaagcagcgtgatggctgctttgagatgttgcgcgctggcactggtatcattttgcagatcttcaaagtccgtgacaccagtcttcttggtgatggcttctgcctcttccttgtacttggtgagctcggcatcaatgtcttcggccacctgagggaatgggaggcaggcattcttggcccagaaaaagtcattggcggccaaatcgtagcttttcttggttgtgcctttggcggggttgttggagtccacgggggtctcgatcgtaatgcgattcagctcagacctgaagacgtcgaaacacaagctctggtaggtccaggagtgagaaagcatggggatcaagtccacgttgcgatcaaggatgattagtacaggtcttgacgtgggtgttcccgccgccacgcctggtgttcgtgattgagaagaaaacaggttgtctttggagttcaaaacgtggtcccggagcttgcggtcaagtctttgagctatcacctcagctgcagcaccttttggacaacgaatctgtaagagcaaacgattagcatgcttcctcaggcttacagttgttttcttggcggtagacttggtgttggagaacctacaactgggattacacctggagaaactacagttagccaaccagcgcaataacaccacatcaaggttggtgaaaacatacctaacgtcaccacaacactaaacaacccactgacaatgcgatctactacacgatccagctcttcgtcgtttgtcttggcactgttcagggcccagtatgtgtgttgcttttgcatccctagactgaagagatctggttctgtgacgataaagttgagatactggtcgtagatctgtgcgatctgttctgatgtttccgtgacagctgtttgcgcagcgaagtcttccaacagcggccgtgggatcgaggagaggaagttgacatagacagagctgtagagcccattcttgaggtccctcgtgatcgcctcgaggtttgcgggtgtgggctcgacgagatatatcgctggtacatcgggaattttggctctgttggctgaaatgtgcctacaccaacagttagctacaggtcgccttggttactggaaatggtccgcaacccacatatgcatcgtcacacccagtgaccgcaggtccgacacttggagtactggactgatgacatcacggccaaggtcctgaaagagacaaagctgttagcctcttgccagagttataagcttgaggagaggtgccagcttacgtcaaacacaaggaccttccagataggcgttccgtccttcagtataggggccacgggcaggccattggcattgacttcgtcgccttcgctgagctcgagagcttcatttaagttgaggatctttctgatcgagactaagttgcacagggcaagtcagacatgatggtcaagtcgagcgcagccaatgattacaacagtgacagaaaaagaggaatgagcatacggatctgcttatcgcgaagcgcattgccccgcgccgccgccatgattgtgacctccaacctgttgatactgtgtactgtattccaaagctgctgctatctcccctttcctgtcttttattggcttcggcctcgagttcgaacgattgggacggcgcaagctccgccttcaagctggctgtgggtgatgtggatgtgcagggagctgtgctatacttggtagtcgtcgaggatcagctgtgttgtcttgttcttggtgaagtgtaatcgcagttcattcctttgctaggtttacatgctcaggtgttagtgtcggcgtcggccacatgttcgaagattgcccccacaatgaatttcatggacacctttacgtccactcttggaacttgggggccactgtcataaggcagtaccgtacctgcctgcctggagcactgcagttcggtgacggtccggctatggggaagatacagttgccagtcttctgcagccaggtgccgcctcggtgagatggtgaccgattgagggggtcgatccgatttagattggctgacaaggtcttcccgccacatgcacggaccagccgccagccagccagccacgcccagccctttaatggcaccggcagctggctttgcgcgacgcagagccaacttttctctttcaacgacatcccgtggctctgttcccaaaacctcttctcaacccaaacggaaatccccaacaattctcctaactgccttactgggtgttgcgcgctcaagtcacggctttttcatactcactcctccattccagcccactcgtataggcaattctgggcctggacagagatttggagcgttgtttaatttcggcgcccgtcgattcgttctcacttcttcatcacactacagacgcgtcggcctgctttttaatcatttgaaattagtccagccctgggttttctgtctagatatacgcggaaaatgttgtaaggcgccgggcaggctctgctaacgagacgtacgtcgcctgcgaaaggacggtggtgatgacgtgtctctgccacacaacaccgcggaagggattcgtgttgcaaacactgctggacacacaagacacagctacaacaaagggtatgcataaactcatccgtccccccaaaattccacaagaagacttgagcaagcagttggatgttgtatctcccttatcggccatgaaagaatacctggaagtgcctgttcaatcacgcagtcttgattccgcagccggcgatctgcagtgcggactccgaaggacttgcgaagagcgacggcagccaacgtggagcggtggctacagaggagggccgttatctgactgcaagtaacacttaaactcctgtcatgggaccaagtgcagaacacgcgatggagagcaaccacagcagcagagagagcagacgggacagccactggcaataattcaatgtcacagtcgtcggcccatccatccctggttaattgtcccatgcacaaatccagatcttctctggcttgcagaagagcagaagcacctgacggccgagctgctgcggggcatcctgaggtgcgctgcgctcccggccttctggcttctgggagaggggcactttcaggggggtccccgcccagcccacctcacacccacacacacctacagacacacacacaacacacaccatggaatcatctcttccccttgagatcggactgatgaatgatggccaccagaaaatgggaggaatctgttctgcaagacactgcctgtctgaaatgcagtccatccatcaaggacatcatcttccggtttgcccggttggttccagccattgggaaaattaagccctgggcgcaaatagttacccggcattccaagatcagtcactcctcaacacaccacagcaccacggcccggacagagaggccagcatcgacgtcgcggaaccactgcccgacacactggacacagacaggccggtctcgagaatcagcttagcgaccctcggttgcgactgcgataaaatgactattgaatcaacacagaaccgtctctgagtctctcatgataccgtgttgtccctcgccttctctcgctgtggtctgctggctgctggctgctggctgctggtgtggtggtggtggtgttgttctctggtgttgcaggctgctctctgctcttcctgggttggatggtggctctcttggctcggaggatggagatactctccagtcgttggctgctttttgctcacgtcgcacaatggcgcattgtttttttgccgggatcttgttggtgctgcaggttgactgacacttttccgctttagacacatcgcactagtccgaattcagaaacgccccacacacaactcgctgcatgcacttaaccgatttgtgaacctctcctttcgttcgttttgttgcaaaatacccgatttcacgaatcccgattcttctatccaagtgcttcacttccaccatcaccagttgtccaactaccgatattacgactgaggtttcaaagagtttgaacgacttttttttcgatcgaagccgatatcactattgttggtggctatttcacgattttcgccaagtcccacctgtcaaaattgtttagttgcatataggttgccgagtcacgtggcacccctttttgcctcgccaacctgaaggaggaccatggaccaaagccatggccacgacagtggcatgccggactgggaccccaatgcctttatatctaatgacacatgggatcatcagttcatgaacccgaatttgggctttgatcaacctaacggaggcgaccacagcttccagaacacagagtacctcggttcggcaccaatacacccgcagctctctggtgctgctgagtttcgggattttgatccgtatctatcacaacacaaccctggcaacttgtggtcgaactccagtcagacggaagcccagtatggacaggattcagcgatcgacccctcgttctatcaagaacaacatcagcatcatgcaagagagccaaacccgaccaccaacagccggttcgccctcaacgttccccaaaacaatgactttggctctcatctgcataccccgaacaaccaggaggcgactcacagccttcttaatacacccgaacccacacagaatgcctatgctcagaattccatgccccaatggcataatcaggtagctgcaagttatgcccctggccaccagtatgagaacccacttgctgtatctcaggcggcaactctcactccgccagttcaaaacggctccccttctccgtttggctctgcccgcaacaccgctgcgcaatatcagccagaggtaccgccggtacaccgccaacatcagcaacaccaccctcagattcaacagcaacatcaagctgtcaatgctaggtctgttcatcctcagtttgctgcgggcattaatgggcaaccacaacagcagcagcagcatatgcctgttagccagctgcccatgtccggtgttggcagcccccatgtatcaccccagccacagcctgcccagaaagccatgggacatcaactggcgcaacaagccccgcgctcccagcaaatgccacaacagatggcccaacatctgtctccacaagtaccgcaccagctatcgccacatgtatcacaaccccagcaggtgcctcagcaagcggtccaacaaaatccattccccaagcaaatcgagcgcgctcagcagcatcaaagcgcctccgttcaatctcctcagtctgttcctgctcagcagccgataagtcagcctatcatcagtcactcaccacagcctcaacagggtttgcctcatcaccagttgcagcagcagcagcaacatcagttcgtagtgcaacaagcggcgtctcctcagggtcaaaagcggccgtccgatgcccaacttgtgtctgccattgcagccaaaaaggccagaatagtatctgcgggaccagccatctcgaactcgcccttgccagtgcagtcccagccagtgttgttccaactaccagtgccggtgcaacaacgaccgcgcaatcttgagcctgctccgccggtttacaccatcaactttgaagacaccaagcttctggagtctgttcgggatcaagatacgcttaggttccctggtgttcctaatatcgtgatcggcgcggagccggttaagctgaagaagagccctccaacaaaacgatatgtgaccctcactgcgagacctggaaaggcacctctcttccctgagattgctcgcggctggatcatggctgagagtttggctaaccacaacgaagcctacaagaatgcaaagactgacgaggaacggtatcaggccgatactcgacttgatgtggagatggctagggcgggctgtgaaatgccggtggaatggatgaagaaagtgctcaaagagcatttggggcctagggtaaggaaaccctgtgttaatctgtttttctctatcgtttggactgtgctgacctcaatattttgcgtaggctgctcttccagctccgccacccgagccaaaaaagacgcttatcaacgcaactgagaaagttcggcttcaccctgctcatctggtgaacaagggcttgttcgaaaaggtcaataacgagtattatctatatgtgcttgaaattgcgtcttcgttgagagatgtactcgctcggctcaagaaccccaaccaatctgagcccagagagaccagagatccagcagagctgaagctgaggctcgagcaggcaattgtggcggggatcacatacggccatgatcaggtgttggcagagttgatcgttgggactatccctgggactgctgagaagaagcaaccagtgaagaagcaacatttggcagtggtgttgtgcaacttggtcatcaagttttacaacgccggtgaactaaactcgtcgctgaccaaggcaatcttgaagctcttcaccaggttcacaaccatgacaatgaagctgctgaccctggtaaagatgaagcagatcaaaggcgtggtggggaagaagggcgacgacgagacaaaagcactggttgctcgcattttcgaaatcggagagagcaacccaagtgaatcaagcgacagcgagagcgacgccgactctgacgcgcgagaacctagtggaaaagttagtggggcgtcaaagcagaaggacagcaagaaactgtccaaggagggctcagcttcaaccagctccaagtcaacaaacgcaatttctggcagcgactccaaaaagttgcctcccacaacgttagcttccaaaatggctaaacccaacagcgacaccaaaaaattgcctgcaacctcagcgtccaagacgatggcgcctaataatagtgaggtgaagaagaaggtattatcgtcagcctcgctgcctgctggactcaaacgttcgcgtgaagatgatgctgctggcgagtcgcgctcttctaagaaggcggcgactgaaagtagcacttcctccgctgctggcataaaacctccgccgtcattgttgtctggtagtaaactgcctgctgccagcaaggctgccgccgccaaacctgccaccactggtgcttcgtctacaacagcaacaagctcccaacctaaagcccggtctgccctcctgcttcctggaaaaacccgcccactcacaaagcccgcacccaccaagcctgagcctcccaagcccattgtcaagcctgtcgagtccaaggctccagtggcaaaggttaccaagcctagagctaccgagactcccaaggagagctcgtcatctaaatctgccttctctgctttgatggatgaaattcaccagcccaagaaggtcaacacgccagttctgcccaccaaggccactccagaggttccgttgaacgagactcctgaggagcgcaagcgtcgtctgcggaaggaagagcgacgtgcactgagactcaaggttactttcaagcctggcgatagtctggtacagatccgcgagtttgctcgtgagcccgaggaaatcgagaacagtgccaagatggccggtggcgccaacaagtacgacgaagccgagagcttccgtaaggtcaacagcaaactcggcatcagagcccacgaaatcgaggaccgcgactgggagacacccgttactattgacttttcccacatccctgccgacaaacgtaccgaaacttttgagactcgcggtgggcttaagacctttgagacggacgagcagcgcttcattgctgagcatgaccgcaacgagttggtcgtgatttacaaccacctcaacgacatacctcccaccccacgttcgccacaatacgagcccagccttagcagttccggttccgaattgcgcttgcctctcgacactcctaactacgacgagatcagagtgcgcgctgatgagtgcagaaagttcggcacccgccaagcctcccgctttgcgcaaggccgcctcgaaagcaagacacaagctgagagagtgcaggcaaaagccaagtcggtccaacaagatcccaatacattctacagcccgacaactgctgttagtcgcgatcaagggacctacgaggttattgtttcggatcgcctcaagaattggagagatcccaacccgcttccggctcctgatccaaccaagacttcagaggaaagactcgacgccgtacttaaggctttggatatgctagtgagaatcaacgttgcttctgtgtctgctcggagagcgcaagtgacatcagtcgcccctgctcaagctagtgctcctatgagtgtgattccagcgcaggttgcggtgtctgcgcagccttcagccccaacgccagcaactgctccttcacaaaccgcagctgctgctcccgattattctgcgcaatgggctcagtactatcaacagcaagctcagcaacaggcttggtacaatcagcaacaacaaggctcggcacaggcaccggcatttgctgctccccaagctcaacagcaggcgcctgatgtcgctgcccttctcgctcagctaggcggtcaagctgctgcttctcagccagcagttcaaccccaaaacgcccagctccaggctgttgtcgccgcactcgctggtagcaaccaagcccagggccccgaactccaggccatcatggctgcgctcgccggaaacaaccagcctcaaaatgctcagtatgtcgccaatctaatggagtgggcgcagagtcaatctggcgccgcgaagccgacttcaacagcagccccgactgccgcctacagtgctgccgcccatcctgcctaccaagctcagtcgaactacggtcagcagcagcagcagcaccagggcggctatgagtcccgctcctacaatcagtccaaccaaagccgtcccggcaacgacttctccgcctccatgtacgacgacgagggatacgtccctcctgcgaacaacaacactggtggcggcaactacggccgtgatcgtgattgggatagtaatcgggatggtcctggcggcggcggcggtggtggcggtggtcgccgtaacaagaagcacaagaagcacggcggtggtcatcacgatagggacagggataacaacaacaaggacgacgtccctgagcacctccgtaatatcaacacccggcttatcggcacgaagcaatgcgcattttatgccaaggggacctgcgctaaaggggacaagtgcacttttaggcacgattaatggggacaagaacattgttccaacataattctttcctctgttatcggttttattgagaagcggtgtcttggcatgggcattgcatttttgcattatcaacgacgacgaaaacttttacacggttttttctgcttccattggggcagttgctattatcataaaacttcagcgaagtattgcattttcggcgccagagaagggggatgcgtaatatggttcagtgggaaggggtttcatacttgtgactgggagggcattgtgagcaattgtatttatatggggtggggaacggagagagagaaagcggaaaaggagggtggattttaggtacactaggtttaccttacagtattttaatccatgagtgattacattactttgcttgttttattttctcgtgctgacacgttgcgacatttgagagattgttaccatttctctattttattttcggagcatctcacaacaatttctgagagttatgatcagattctataatcaaaccaaacgacttcatgctgtgacctctgtttccactacaccaggcttccagtccccccaagctaaatatgtgcaatgatgagtaccaacagacagactcattgatatcaataaatgccagtcttcccaaagcgccgatgcttccccatgctcaacctccttcgcctcaatgggcatgcggccctgtcaagttcattctgtgtacaatgacatcgcggattgtctcaacctttgccatggcgcctgtgagaagcggattagtatctggcggttctgtgtaggtatttgaaaagacaactcaccatctcctgtatcgccgcaagcgagggtcctattaattcagtagtcagtttcatattcaaagcagtggtgatgtcagctcaaaaagcggcaaatcctacttggagatgggctgtgtcacgaaacgttagcatcactcccagagcagcatcaagggtatatgctgaccgggataacttgaaaccaaccatcgatcagtctcgcagctccgtctgggtcgagcagtgtctctctgacgccccagtcctcccgtaaggtgcgaatctgctttgctgtgatggggtgtctccacatggcctacgaacatgtcaactctcgctccacggtcttgggtaagaaagcttaccgagttcatggctggcgcaacggcaatgtatttctttttgagatcaatcgaaccgtcgatatcccaggctcgtataacggatgtgagctatataggagtgagcggcagtctcgtaaaaagaagggatgaggaacattacaaggttgtcagacatgccgttgacgatctcacacatcagttagtacacataacatggcatcttcttagtgagagagtccaaccttggcgagggtgtttgcacttagagctaccagattattagctaccatgtagagaagggcggacttgggtataacacatacgagcaatgacaagcatatcagcccctattcctaccgtcagcaccccgtcccaatccaactgaataagatcacccacatcttcggagtctgttgagaaacagcaattagtaacgattgttagccagctgccgaaaacagacacaagtccaggggtaaaaggtcacaaactcgatatgcaatatactcgctcccctcttccaaggctgcggcccccactcatcctcgtctcgatagactgcgtcgacattgggcagatgaagcagggacgagacggtaggctgctcatcactttggccgttgaggaactcgctggcggatttggtcaggatgatacggatcgaaagcttagctgcatatggcgcgagggcttcgacgatgacggggactggcaaaaaagcattagggtcacatatacaaggctggtagaggtgagagaggcgcacgtttgattgtggctacagaacccgacgctctatcatacacattagtctctagcctcacatccaaagagtgccaggaaaatgggcaggcgcatacgcaagaagcagatgcttcttcccatcatgaagagtcgcgctagtgaggcgacggaatttgattcagaagtcatgaagtggttgtcgtgggcgttgccgactgcctgcagcatggtgttattttgcaagagcaagtgtgcgaaatactccgtgattggggatggtcgtcagaccggatgccgaacgggacgtttgcaacagccgagctacttcctgctggtcagtttttttcggcaaaagatgtcgattcttctttgatgatacggccgatacttccccacattcagttagtcaaatatatacgttgaatcgtgatagtcgcaagcaggaaggtacgatagagcagttcaggtaatgaagcatgaagatgcgatgacaaacccgattacggaggggtgatctcatggtatatcggtaggtatttagttctagacctgtccacgtttatacattactcacgtcgtatatcaaagcaaatctaacctatttgcagcgggatcgtgctcttcttgccaaatctttgtttgctaacatccgttagagctcatgcggtagcttacgatgaagtgacgttgggacgactacacgccaccaaagcctcagtcagggtgaggggtccatcccgatgagaactggctacgtcataaccctaacccggcgactgctgcctctcaagcttgagagcgtgcgtaacagtgcaacaatgccagcccattctggagtgtccctatgtaatgaggctcagacaaacaaagagcttcaaataataccccatacacttgaaatcaagatctcttagctctcagtgtctcagaagcttggttaaggcctgagcttgtcaccgcttggatcgtcctgcaggctgtcccactaatagcagcaccccggattgcgattaagcgtgcaattaaccaatcagacgcgtctggtgggctgaccttcgcgcgtcacaagcttcgcatcacatcgcaggtgctgcgcagctctcacagctctcacagctctgtcccttgacaccgacatatccaacctgtcatttaatcgcaaccaaccccgctagttctttcacacttccacccatcaattgaaccaattctaccacttcatctcaaatttaccacttgaaaatcgttaaatcacccgaatcaccaataatggcgactcccacagccgcctcaacaggcactgcgactcccctcgagctcgaccctgagcaagcccagcagagcctcaaaatctccctcgccgacctcgccgccaaagccgccgccctcttcgcccagaagaaatacgaagatgccgccgagcagtacgcccgcgcagccgagatgcaagccgagatgaacggcgagatgagccccgagaacgcagagatcctctacctctacgggcgcaccctcttcaaagtcggccagagcaagtcggacgttttgggcggcagcgcgccacaggctaagaaccaggccaagcccaaagctcccaagaagaagaccgctgctgccaatggcgctaagaacggcgagggcagctcctcttctgccgccgcgaaagctggggaaaaggtagagaaggtggttgctgaggctgctgggaaggaggcggagaaggagtcgggtgctgagatcaagaagcccatgtttcactttgagggagacgagaattttgttgattctgatgaggaagaggaggagggagaggaaggagagggtgaggaggaagaggaggatgacgatcttgcgactgcgtttgagattcttgacctggcgcgtgtgcttttcctcaagaagctcgaggcgtcacaggccgagagcgaaggaaagggcaaggaagctgccgaggaaggcagcgataaccccaatattcgtcacttgaaggagcgtctgggtgatacccacgatctcctcgccgagatctcgctcgaaaatgaaaagtatgcaccctcatcaccatccctcacccaagttatcacccgctaatcttagttgatcagataccacaccgccataaacgacgccaaagccgccctcaaatacaaacaagagctctaccccttcgaatccgaaatcatcgccgaagcccacttcaaagtctccctcgccctcgagttcgcttcggtgaccaagcaatcagacgacgacacagccgaaagtaaagacgcctcctcgggagaggtcgaccaatccctccgcgacgaggcggccgcctctctggagcaggccatcaactcgaccaaacagaagctccaaaacaaggaagtcgagctcgccaccctccacaaccccgaggagaacgactcgactcgtgaagaaatctccaacgtgaaggagatgatcagcgacatggagcagcgcctcaaagacttgcgagctccgcccatcgacatcaattctgcgcttgggctgccgtctcgatcggaacaggaaaagcaaaaggcggataatcttgtgcttgggtcggtgtcggacgaggtcaagaagaatgcgaatgatttgaccggactggtgagaaagaagaggaaggcggaggagagtgttgctgtggaggaggtaaaggaacaggaacagcctgaggcgaaaagggccaagtcggaggatgtattgggggcggcttctgcggcgccgactgctaactaggaagagcaaaggagggtgtgggaggaggagaataggaggttgatggagaagtacaaggctgtgtggccctgtcgggggtggtcttgcgtcaatggaatgtatgaacagcagtgattttctttttgttttgttttatgggcttttctatatttggtacaggcgcgctttttactcttactctctctctctctctctctctctctctctctctctctctctctctctctctctctctcactcattcatcatcatcaaaaacttggatgggttattcaaggggagctaaagttgggaatgggaaagagaaacagatgtcaagatgacatggtctagttgaggtatattaaccctggacaaacaaggctagctaggtagtctttgaatcaacactccaaagaggttcagaatcaaaagcaatgtgtgccactcttcaatcgagcattgattaactagtcctgtatatttgaatcccgcaccaacttgacaaccgcactttgcttgctccagcagtcccgttgcccctatcctcatcttataattttgttcagttttatcttccccatgcgttacccccaaattgttccagccatcttttcctcccaaattattacaacttgctatgctgaaaatgtgaccccaacccatagcaccagaagaaaagctcgctcgccctcatccagtctttcatccctcacagagtaaagttcatactcgcactcctactcccctccccaccctgccctttcaaatgggcactcgaccccttgaatagactctgccagatataggcttcactcagcagcagctcaatgtccttttccgtccagtcacccgtcggcaacgactgcaaaaacatcatgatttcttgaaagtccatctttaccagcttgtctgaccactttaccaaaaaggcggcacagacgtataggtggaattccgagaagccttgttcttccgcctgttgatttgttagcttgtttctccccaggaatgcaaagggggccagaagtgcctaccatgtatgtatcccacatccgtatcgtgttcttgacacttatttctctcatcaacaggcagttcatccacctgaaactaaactggatgaattccacctgctccttctccaagtgcttcgccagcccggcatcaattctcgccgtcaggtcccgcagtgccgaaacctgtctctggattcctggctgcgccacgatataatggtcctggatcccgtccagcaatttagtcagacaccagaatgaatccgcctccaccgcgtcaagaaccgccttagggagctgccccggatccataccactttcgatatctgggtctgtgatgtatgttcccaagaaaacttgccaaaatggtgtcactaggtcgttgataccctggacatagccgctggccgggtgacggacagcccaaacgtacagaatgcgctcaagagaccgctgcgtagcttcgtagctgtagagttcgatatgcgggtttgtgcgggggacatcgatactgatttgatgccagatggcctcgtctaggcctcggttcgttcctcggggtggtgcactgcttcctggcgctggttgcccgcctcctccgaaggcttggcgcacgccgtcaaggtattcttttctttttcgttcgagtgtggctacccttctttccgagctggtagggaggtagctgagaagcagttgccaggtcatggcgcgaacctcttctgggacgccagaccatgccagtgaccggagatctggtagtgggatagtagaggcttggaggagcttcttgaacttgtttattcttgatatccttgaatttatggcgtcaacttctttcggggtggcattggcgggtatcgaggggtggttgattaggtgcaaggcgtttgccggatcgcgcaagatctccttatactgtggtcgtagaatctttccttcactcttcttcggcatcgggtaacttgctgctggcctctcgatcgctatgtcttcgctgttcgagtagcgtctttctcgaccgccgccattgagtccgtcgtccagatgcgccctgctttgttccgccttttttcttgtcctcctcttcatgttggatagactgggaagcccaaaatcgtctccgtcgtccgactcatagtcatacatatcctctgcttcgtcggcggtccagtcatcgttggtactggaaaggaagttcatgtattgcttgaaaggtggtgatttgctgattcgtgtggtcggggattgtgtcgggactcgttcaatggccgacgtcgctgatggcggggttcttgggcgcgatccggacccagatatatttctaccccctgatcagtcctgcacatggaaatgtcctgggggaaaacccacaaggaatcaaacttgagaatgtcggcatgtgaataggcggcgccgactaccagactcgagtcgcgtgctggcttctttaaaggcggggtgtcccgctgaggggccttccagaacggtgaagcagagctgtcgatgtcactgtcagtatccctgagaatacacagcaggttcttctagaaggtgtattgcatactcggacctctctacaatccatccaagggtatagttagtatgcaggtattctgggaatcaaagcgggcgcgaactgcacataccaacttgcaccatctcctgctgcagagcacagttccgtcagtcgctgccagaggtacataggatgggctgagaacaggccgacggaagcttacctgggggagtggccttcttgccgccggcggaagaagaaaacatcatgaagtactgaagaggtcgtcttgcaatggcatgaccttggatcaggagactggttgatttattggtcttggtagagaggcgccagttcaatgtctgggcttcaagagaggccagctgttgccagcttggagccagttgatggccctttgatcgctggctgggctaacacaggaaggtgcatggctgactgacctgaggtagactgcctggccagtgcgtcattccccattccccgcccaagcgcccgcagctgctcagattccaggggcccagccactgggtgaatgcctggccaggctgggagacccactttgacacaacaggaactgcgccttgactttttggcaagcttcgcagtcgaactctgacttccagtcaacaactttatccgtccttcaccaaccaggaacgcatttttgattgccggtatcgatttcttcatttcggagcagttggtcgttggccctcttttcacttctcttaccgactcttcgcttcgtttgttttatattcggcgcccgtacttaattccactactcggcgcgataccgcgtttgacatcttgaccaccaccacgaccaaaggcgcgtggagaacaccgacatcatgacagaacccgagaacttcgacgatgagctgtttgccgatctgtaagtcgcatctttttatacttcctgatggtcatgatgagcaggcgctaaccagcgacagctataacgacgatgatgcggcaccagcgcccaagccggctgccgcagcccagcctgttcagtacgcagccgtgcaaccgaccatcgagacccggcagaatgacagctacgaccccaatcagtacaacgactacggtggtggaggtgaaaatggcaacatcaaccaggacgatgaagaagaagaggacgatgacgatgacatcgatttcaacctcggaaacggcccttcgaccacgctggccccccatgaccagcaagactacaatgacagccataacaacaacaacaacaacaacagcagcagcagcagcaacaacaacaactctcaccatgaggagaggcagtcctacagtgcgccctcggcgcctcctgctcataccaaaggccccaatgccaaagaagacgggtaagtcaaaatctctgtttgttgacatttgacaagtgtgcattatgaatcatgtgaaccgcgccacttcgatcggaccactatgccggtagagcaaggtgggaagggctgggaaagggaggaagctgggcaagggctacgggatcaaaggctgcggcctggcatggttgaggatatgggaaactgggccagcaagaggcaggtctcgtggtggacaaaatcatgcaaagatgatattgcagagagcggtgcgacatgtgtgttgccaggcaatgtgtaatgccgtcaagaggagggctgtgctgtgagggttggcctcccaaagacataccgaaaacatgcgccaaaatacgataatggatgaggagtcatgctcctgccctctgtatcccagtcgcagataatcttagctctgaaggctagagaaagatatcgcagcgaatagcgcagcaaccaggacagacgtacctagcttgacgataggcaagaagagctcgagacaggaaacaagaaagatttcgacaagaccttttgctggcactcctgcgctgcaccttccttctcagttgtgggaacctgctgtgcatcgcatcagttctgaacaacggcttgaattcttctgctgcgaccgccgccacaatggagcatcacaacacgactcgacctccgccctcttctcccgaagactacattcctttatcaccaagcgatgcttctggggatgacggtgtactcggccgagactacattcctctttcctccagcgactcctccccgcccatcttttcaacctcatcgccactttcatgctcggccatctcgctaggcacagcagaggaactaggagatcacagcaccagtagcgaggatggcgactcgtgtgatgaaccctccccgaggatcatatacgcgaagaaagacaataggtgtgaactttaggcagcggcgaccaaaaacacacacgggaagcagcattggttcaatgtttgcttttccaacccaccctcccatcttactcttttttatttctcccgagcctgtctctctctctcccccccccctctttttccatccgaaccggtgtagtcagccgggtttgtttgccagccaacccagcggacaagcattttgatacacaaaaacacaatccaagctttccggaggtcggaggagagcaggaggaggggagaaggggggaattgaaggaatgatctggctcttcttttttttacttggccgataagatgctaataaaaacaatgtttcatgattgttatttcatgagataaaagagaaaatgaagctaactctacggcacgatgtgccgctgtattttagaaaaatgttcatcggcggtctcaactgggaaaccaccgaccagtccctccgcgactacttttccacctttggggaggtggtcgagtgcaccgtcatgagagatggcgcgacgggccggtcgcgcgggtttgggtttctgaccttcaaggatcccaagacggtgaatatcgtcatggtgaaggagcattatcttgatgggaagattgtacgtctttgttcccccatcttccttccctgttggtcatttgtgagagatatactgactggagatggggaaaaaagatcgatcccaagcgcgccatcccccgtgatgagcaggaaaagacaagcaagattttcgttggaggcgttagtcaggaaaccacggatcatgagttcagggagtattttgcccagtttggccgggtggtggacgccacgttgatgatggacaaggacaccggtcgtccgcgcgggttcggcttcgtcacgttcgagtctgaggccggggtggaggcttgtctctctgccaaccttgagatccacggcaaacccatcgaggtcaagaaggctcaaccgaggggcaacctcagggaggaagaggagaataaccgccgtggtgggggtgcgggaggcaagtttgggaagcgtggtggacagggtgggaatggaatggacgatgggggtcaaatgggcgggatgggcgggatgggtggtggtcagggggccggggggatgacgccgcaggtgatggcgcagtatttccagcggatgcagcaggcgatgagcatgatgcagcagcagatgatgatgaaccggaacatgaacccggccatgatgcagatgatgcagatgcagcagatgcaacagatgcaggccatgatgcagcaggctcagggtgggagagggggcggaggacagaaccccatggcggcgatggggcagatgaacccggccatgatgcagcagatgcaggccatgatggctcagcaggcggcgcagggaggtggtcctggcggtcctggggggccgatgcctcctgctggtggccctggaagtgtcggtggtcctggtagtcccatgggcatgcacgatcaggttggcagtcccattggtagctctggtcagggaggcggcgccaaggctggtttcaacgcctacgagcagcagcagtttgagcagcaaaagtacgagcagcagcagcagcagggccggaggggtggtagcagaggcgctcccgacatgcaggctgcctacaaccagggagggtatggcggcaacggcggcggcggtagcatgagctcgcagggcggacagggcgctccgaccagctgggagggcatgtatgatgatgtccctcagccgatcatgtctaccggcggtggtggcggctacggtggtggaggccggaatttcaagaaccgcggacacaacaaccagcaccaaatgtccatgtcgcctggcccgtctgaccctatgaacgcccctcctgctaatgccccgacgggacccaagaacgctggtagacctggcgccaacatgtaccgtggtggtggaaggggaggtgcccgtgggtaccatccttatgccagaggctagggatcttctggcagggataaacgggaataccatcatgaggaatattactgttgagtttggggggcgggtggtagttatggacatgacgagtgatgtaggagatggggaactggggcaacagaggtaattaactggggaagggttaaggacaaaagccaaaaaaagccaaaacatagggagtggttaggtagaggtgtggtgccagtgggcttctttgtattatagctagcacctttgcgcaatgatatttgctttgataccagcggtatttgaccttagatcactgatacaacctcgtgaatcccccctccggcggctgcagccaattcctctcatcatacttgtacccctccccctgctcaataacatgaaaagtataaataatcctcccctttttgctcaaattcctctcactcttgtgaagcaaattcccatgaatcagcaccaaatcacccgccttcacctcccccatgacgtactcttcttcctctacctttttatcctccccatacttcatctccctcgtatccctcggaaactgtcttccctcattctccaccatctccgcccccgtcctcccccctctgaccaacctctgcctgatccgactccaaagatggctcccaggcaaaaaactcaaacacccattctccctcgtcgcatcctcaagcgcataccaaaacccaaccgcagacggagggtcggtgtacagaaacgtgctatcctgatgaggcggcaccgctccccctatctcgggctgcttgcagataaccatgctctgcagacaccttgggtcctcgaacccgagatcctttgctacatcttttggcaacgccctctgccctggcacccccttcaacagttctgcaaacgggggggagaggccgtggagaaagtgaccgatcttgttgacggctaaatgtttgggttttgtgagttggccgtcggggccaaaggcgtcttgctcgaagaagaagcggattttgtcgcccgaggagaggaagtagtcgtcgcctacgtggtcggtgccgtcttgcccgccggtggagaattttgtcagggggtgagtggtgatgtcgagggaggagaggagggagtgggtttcgttgaggaggttggtgacggtggtgggggggagggccgaggggatgatgaggtagccgttggtgtggaagaaggagagttgttccggggtgaggccgggtttgggttccgaggaggtggacattgtatattgaagggtatatccaaagtccgaggtgatgaggtgagatgagtgcgatggtggtacgtgagatgtgaaggtgagggtgagatgggcaagctgtgagtgacgggagctaccccgctagagatacaccgataaccgttgatatccgtgcccctcctgataacaaggagacatcaccaccacggcaacacacaggatcaagtcaagatgaaatcttgaggtaacaatgagaaatgtattcatattcgccaggaaaaatcaagcttgcttcaggccagaaacttccattcctgacccccatccctagcccttgtgatatcaactcaaaaaccttcaatgtacctcgccataaagagagagcaatatacacacagcaatgtcccaaatttgcgattcccaagccaagcgaaaaagtcaaagcccaagtccgtagatatcaaccggttcaagtaaatcatcgcgcaaaagagtcaggtatccgaatagaagcatcgcaccgcaaatgacaccgcaacatcacaagccaaaaatccagtaacatcagtcagaaaccatcaaccccgtgccgccatgtccaacaacgccatccaccttttccttctgcatccgctcacttcctcaagacggcatcatagaagctcaccagcccaccgactgctgtgccgacaagcacacccttccaccccgagtagacagccccgttgattctcccaacgttcactgggtcaatcaggccgccaaaggtgactccctgcgcgtagaccacatacgtcgccaaagccttgacgatgctgaatgtcaacggatcaactgcgtactcctgtccgacgtcctttcttggcctgccccgtgtggccacagccggtccagaagacgagtgcgcggccgagagattgaagaaatagccaaacagactggggaggaggaacgacgtcaagaaccacgtaagcgccgggccccaaaatgacgccgtcaccaaagcaaacatatccgggagcttgacgggatgatcatgcgtgcccaaaaggttgattgccggaatagtaaacgcatagcggtctggtaggagttcttggcggagcttgtagagctcaaacagggcgatcgtcgacagaacagagtgaaccgtcgaaagccattctctcgtttggtgcgtcgcctcggggatcttggactcgaagtaaagcgtgttaagcctggtcttaacgagagccgtggaacgctccaccgaagcggcaacgtctgctggggtggcaggaagttggggaaggcgagcggcgaggctgagggcgcggcccggggtgcgaacgagggcggtggagagggattcagattcatcttcaggaccctccggagaagtagccggcgatggggaagcagactcggcgggactgcgaggggtggttagctacaccaaagacaagagtcagacaaggaggaacatactcgaccacaacctcctctttgaccggcaaggtctgccgcctcttggcaactgtcttggtcacagtcgcatccaaagtcacagaaggaaactcccgcttcaccggcgagttctctgaacgcgcgcgactgctgaagtaccccttcaacttggggtgggcctgaaaccgcgccgggctggcgctgacgaactcgtcgatggcctgctcgagatccgacttgagaagcttctcatagctgtgaaggagggggcgcgcgtgttagccatgtcgcgtcatcgcgagagggggcgtcagataagttaaagtggaatgcgctcggccagtgcgttgcatgcgcgcacgcgcaaagtgccagtgaggataagatagggcaagtccatcccttgcgtgtgcatctgaacagtgtatatatgatgatagagagagtaaaacatactttgtgagcccgatcgcatccgccagatcaacgagatccgacttgcgctggcgcgacagccatccgtttccgctagacatgttttttcttgttctctccgagtcaagcgatcaaaagatatcgagttggaccgcgcaaatgaagcgattgggataggtttcaacctatgggtacaaaagcggtgtagggcgaaagatggggcgacaacaagaggggttacttttgagttgttttgtttgtgtcgcgaagtgggcgggtggttgttgtttgcaagattgggggaggggagaccggcagaatagggcagtgtggggaaatgaactgggatgatgccgatggggggaaccacaacaacgttggacggagctctcgaggattgtgctcttttgggctgacgacctcccaaactggacaaaattcggggggctgggagaggatggcctcactgaggtcatctgaggaggtgatgcgctggccaatcaagattttcttgttgtgacctgtcagcgatggccctgcttgttgagctgtcaaccagttggccgggctatgtgctggtgaggaagtaacaacggggagagctttgatgagaaatctggaattattcagatagtgtatatacgtttaaactctggctctctatgacagcttaacatcattgacaaaccgctctttccctctcttcactatcctcacaggcacatgtttgcccccgtgtaacttgagcgtcaggaccgacgttgccttattcagtgtcttttgcgcttttgcctgagccttcttgtagagctctcttctggctgctgcgtccatattctccacctccccgtcgctcgcccactcgtccaccgcgagctccacactatacttttgaaaaatcaccgccagcacagcattcatctccaccatggcgattcggcgtcccaagcatgaccgaggtccatcactgaagggaatgtagctacccctgaccggccgatagaacgaggcgctggtgtcactcccctgaaagccgccataatccaccccatcgccttcctcgtccttctcatcgtcggttcctgtgttctgagtttggtaccacctgtcgggcagaaaatcgtcaagatccgtaggggcgccagtcttctctgatgatttggtgggccaaaatcgcgggttgcgctgtacgctgacggccatcaggttacacgaaagtcctgaaggtaaaacatgagtcttcccctgagctgtgatggtctgatccgagctggccgagacaactttgggaataagcgtgaccggtggcatcaaacggagcgtctcgttgatgcaggcaccaatgtggctggccgtcatggcattgatgttcttttcatagtcccaggttgatgggtcggagtctccaaacaaagaatcgacatccttttgcagacggcgttgcgtggcagggttgattgcgagctcggcaatggcgaagtgaagtgtgttggcggttgtttcatggccggctacgatcataatgaaagcattgccgacgatttcagcgtcgtcaagaccggcttgtttagctttttcagacggggagaggccgtatttcgattgaacgagctgtcccatgatgtccattccctccttggtagattcgccagcctgggcctccttcgccttgtcgcgcaagaattcatccatgtactggagatagttggccttggcctcgtaagtgtagctcgcaaatttgaagggtagatgttctaggacaatgtaagtttgtgatgatgatgatcaagaccaaaaaatgggcaacatactaagaagaaagtcgggaaaaacaagaatggtgataatcttgtccaaggtccgctcaactgatttggcaaaggtgatggaatgtccgtctggaggatccagactgccatacttgaccagcttagggtcggtgtcttcaggcattttctgatttggccacaataaacgaaggccaaagccaacatagccgatgacattcagcgcccaagtcatggtgtcatgctcgagtgttgtgatggtcttggtcgtgcccttggtctctccgcccgcaccaaagagctcgtccaacataccacgggtctggtagatggcctcggaaaaggtgtgagcagcattcttctcgttgaaactggcactcgtaaccttccggtgtagcctccaggtctgagcttcggtggtgagaacattgtgaccaaacatgctgagaagactgtatttgtcaatgtccttgggaaaggcctcacgacgctgcgtgattctatgaatgacctcggcatcttgagtatacatcaagatgtcataaggagaaacagtcaggaatgtgtcagtcccaaggtactcgaagactttctgaccagttgaataggcccagtcaggagtcataaccctacatagtgttagttgaacaaacgcctcacccaagactgctcaactcacagtaatcggtactcccatatccattttgggaggatcttgatcataggtgaccaaatcttgattccaagctgccaccatagtcctattggtgaggcatctagatatctagtgtgtcagtgtttgatcatggcactcaagatagatgtcgatatctttcacttacgaaccacaaagtatttaagtcccgtctttcgagcaatgagcacatttcgccgccatgccgcaaaataagagaacacagcatacgccactgccgcgctaagcgctgcccataatgtaaacagcattctggggtacaccaatttggtataacagtggtgtctaacggttctcagtcaaatcaaggccggtggtgaggaaagggggcaagggaacaaaggtggtcgatagtgggaaagctagctggttattcaatgggccggccctggtctagggaggcggatttcttcgtgtgggcaccccaatggtggtgagttgacgataggtaggtgctgtaaaagaatcatgagggtaattcgtggctcctttcttggttccagtgagactctggggttggcgtgacgcgtttagccaatagtttgtgacactgtgaaacttgatctggttccgagggctcgatggcacggtggaaggaggtgcaagagggctcgtggttggtgagaggatcggggaaagtgtggcagggcccccactttatcagcttgggaacttcagggccgggaaagttcccgtccgaagcattttctttgggagatcgacaatggaagcgacttcaaatatgaatagcccgcaccttcatcaaccctccaatggctggacctctcgggttcggattcgaaatttgggggtcaactgccctgaaacgtatctctgccgcttggacgctttccagtccccgtcatcgagccaacggctgtcgagtgcatatgtcactgatatcggtttgcggtctcgcattccggaatctttcatgtctcggcagtaagccaattcacctcagcaagctcatcatcagccattctcgacaccccgacgctgtcgtgccgtcgtgctcatgaatgattgatgagacaagccccgccccctgacgaacctgtccactggagaacgatccacagcgggaatcttgcgccagggctgtttaagttggcgcaaatctcaacaatatcgccaagactgtccatttctggaacatcacatcttcaactgcacttcagaactcgactgcctccagcttcgatattcaatatatgtacatctcgaagctccgaccaatgcgacatacaaatgccccgaggcatggttacattctgcaacaccatccagcgcacgtggggaaagaagactgcaattgttgttcatgtctgacaataatattcttgttccaagatactgcacacacctgtgccgccatctgtcccaagattgatgcaaacatcggctgcacccgtcccagttacacaaacaccatctgataatctgcaagcaacgctgggcacaattctccattggggccctgccacacctcccatcgaacaaatctgcaaagctaaaatcaacctcctctgtcgatatggtcgagccgtgtcagccgtaccgccgtggtccacagtaagccaccacaaaacggccgagcagccaccgaaacggtcaccctctttacaaaggtagtcagagcctggtccctactttctaaaaggcgtaccggtacctatgacttcccagcctagaaccctgcccttccccagatttgcggcatatgaaggacaggccaaccttgtcaaccacccccaccatctttccctcttcgccagggctcatccctcccccgggcccagctcccgactcatcgatcgactccccttggcagttgatgagtgctcatctggactgaggaggatctgtccggtgtttggaaacaaacgatggtgggaggtctgatcttgagtggcaaggccccgagatcaggcttgcggatgggatgtcagttgggcgcgagtcaggcttctcactggtgtgagatgatagtggccgacacttccagcttagcttgatgctatcaaggctgacttgcaccaatacctcacacctgctgctgatttgccagatccaaaccttgactacagacgtacctgcatccacaccttggcccccgcatctagataaccgtctcatgatgacgtctcatatcagccaaagcttccagcccagacgggatcatgcccatctcagaagtcagagcgggatggcaagtgaccagagcccacacagtgtccagctttcggtgggccatctcatgaaggtgagggagtcatccaaggagctggcatccggagagggcagacgtggatctgaactggggccgttgttgaggagggtttgaagtcattcctctgctacgtgagccctctggttcctacagttgggcttcatacacggggctttcgtttgttgacgatatacttaatgcgagggatcctgtgctcattgctacactggaacctcatccaagaaccttgtgcaggtttgatatgcccgcagagtctgctgctaggtattgaatgatgtacggctggatctctggcaccaaacaacatacaaaggcctttgtaacagaatcttccaaagcatctccctccggctctccccctgctcttcccattttggtcttccgcctgttcaagggagataagtggctttcggcgcaggggagcgccggtgtattcgtaactccagtgatattgagctgtccttttgggaatccgtgaggagtagacgcgggggttgtactcgtgtgtttctggggattggcagttggtgttggaagtgacaagtggaagaggtgaggggtgggtaggagaatacctggttttaaaggagcaatatcatcattgaatcccctcatcctaagtaatttgggcatatagtcttgtcaaatctctggtcatttggccactcttttgctgctgaatttgccccttcaatgccccaactttggtggccttgtgatatacgagataaggatcctaacacccgaccacttctctcaaatcaaatctgtagtccattacgagaagagatccatgcgggccaacaaaaagctgggctggccgcataaagatagaagcctgttttggcccgtcttgggatgacattcaccgatgacatggagatttacatttcccataagtcacagcacgagaaaaatcactggaatcaacacctcagttcaaattgtcacatatctcacatctccacccaccaaaaccacacaaaagaaaaacaaggatatctctttaatatatattacacgaacctcctccctttttatcttgtttctctggactaccgccaccctcacagtcccatttcggaaaagacaagaccctctgaccacctatcccatcccaaaagcaaatgaccgacctcattaacgtaatcttctctccctgtccctacccgtctctactattcgtcccgtgtgttgtatcaaacacaacagcccatcccataaaagctataaacctcctcaattgaactccgacccgtcaccttccagttctgtgatccctataccatgtttgccgaactttttatgagcgcgccgaaagacaaactgaactggaaaaaactggaaaacgatgaacgagatgtagcgagccgattgaaaggaccgagaaaagaaaggcagagaaaggcatggcgggtataattgagagtgagggaaaagagaaataaccgagaaataccgataccaaaaccgtcgccgtgaaatgaaataaagacaaggcaatgtgatgaagggaagatgcgcgaaaatgctagtaattctttgcgagccggcacgcagggtactggcacttcacgaaaccccagatagtgttggtgcttgtgactatgctttgtatgacgatactgccgcactaagcatgatggaataaactcggatgttggaggcgtggatcatcactggtgtgaaccagcagatccaggggtggaaccaggggcagcataagcccctccatcctgactgccatgctgtgatggaaccatgctcgcacggcgagcaggagccggagccagctgggatgagccaaacggactgcccaaaacgttcgcggacgcatggcggggatcgggcagcacgtttacaccagacatggctgggatagtgggcgtttggtaacccgaccagcgaggctcatagccatacgttggggccggagctggggccgaagctgggaccgtttggttcacgcccgaggatgtgtaccccgtggtgccatacaccggactgctgtggttgcgaacatgcttaatgttggaactgtggaaggccgagccggggttggagtgctggtttcgttgattgtagctatagctgctgtaatcatttgcacggtacccattgttggaagcgcgaaagtcagacccgctggatgtaaagttattcatcggagcaggagcgggttggtagcccgagaagctgttgctaggataaccagacgcagcagggtagttggatgttgcgactgggtaagcaggagttgaatacccctgggagaaggttggagtggcccactggttgaagctagcatctgaaacagatcgctggtgcccagagcggcggccaaagtccaattcatagatgccgtttcgatcgtaattggaagcactgccgtattgaggaactgtccggttggtctgagcatcatatcgctgcgtattgtatgtcggcagagatgcttggttggaagtgccggtgcgagagtcatactgagtggtgctttgagacaacgttggttccagggtgcgcgggctatcgtaagtgcgtgccgtcacatctgtgtccctgggtactgggggataagtagggttgggatttcgttcgaatgtgaattcagaccgaggtggcctggaaaagtcgtgctcgggcgaaagggtgctgggttggctagctctacgaggagctgccgcagctcggggagcagacgtccttaacgcggcaccactggactgtgtgcgtctgtgagccgagcttgtcttggcctttgtcttcttcgctgtgtgagcgccttcaatgtttgggagaagctcaatatccgggacagcagaaagaaggccggcgtccatgtcattgtcaatgcgtcggagaatgtcaaggacttcaagcgtgctgtagccaccacgacacaagccctgataccaatcagggacaggcaccgaggatgcctggtggatagccgcatcaagatcaggctcatcggcgtcatccatctcatcttcctccgcctcggcatcggcccgggtgcgcttcttggatccctttcttttccccttgtcggcgtcatcgatccgtttcgcctcgcggcgcctgacagcaaccgtccaatccttcaagatgccgtccttgccgctcctctcattgtcgttactccagacctgaatacgcacaacctggatgataatcctttgaagtaaggttgattgatagttcatgtcagatcgatatctcgctcgttgatagtgcttgcggcacaccatcagccagacatggtcaggaacggcacgggtgcatgatttgtttctgccaaaaatatgggacatggacttgcgcatgttaatcttggcgtcagggagtgtgcagggcgtcatgacggagcattcaggaggcttgtcaatgtcgagcatccgaacacactcggtatgatcctggcaaacgtcagggacgaggtagttgtatagatctggtccgatccagaaccggccgacggtgccaggaggcccgacgggcaaattaggttcggatgccactcgccggtgaggaatgactgtgtcttcattgttttcgtaggaaagaagatcgtgagcgctgaaaaagatcttgttagcattggagtatatctaaggagggttgtgagacgtgacgtcaccagccaatcagaaataaagatcttatctctgatcactggcgcacagatacccacaaaatgacgaaaggccaagaaattgtggcagaaaccagtgggtcattttccgccatttgcaggggctaaccgctgcgacggtaacggccgtgcatattgccaagctcactgagctctggccgttgagatatttgggtgatagggggttttcgacgataatgtcggcgtggtagatgatgtggcaggacttgggaggaattgggaggaattgggaggaattgggaggaactgaggaaaagataaaacatgtagtaagtcaacgtacctattcaagctcacgtttgagtttgactgcccgcgacgggggatgataacgtcgctgggtgactgagctcgaaggggcaatacctgattgtgaccgcgggttgtgttgttattgttgccattgaaaccgatagcagcggagcggtaattgtcgctgtggttctcgagcttgacacgaggcgaagtctgaacatcttcgtcctcgtcaatattggtgaggtcaacctgttcggtcgccatgtccagattccgatgactgggacttgttcgaagatcaggtggttgatgaaattgatactgggccgatgaccaagaatctgatttgttcgggtgcctggagaaaagtgatgaagtacgggaaaagtccgaagctgtggttgtggcagaggtgaaggaagaaagggaactcctcgacagagagaatttatggcctggggagctggggctggcaggtggtgactgacaggcgggccttgggcattcaccactagttgggatagacttgggatcaatactcaaagacaatggtaatgaatagcctccagcgtcccacggcgtgcgattcctgtgattggtaacggccacgctctcgttgggagagtcggacccacttctttgcgaagttgctctgctgccgggtggtgacggagtgttgggaactgccgtagaggttgccgtggtctcgcccgtggcagaaggggttgaactgtcgatagagtccctccggtgcgtttctccttgctgtgttccgtgaagcgctccttcaaaccctccttgtagcccaactggaagacctccctggattcctccttgtagtcttcctcctaccccacacgatacgttcaatagcgatgtgacgtccattttgtagatggctgagacgggcctcaggcagccattcgaggaaaccctgttcacccgacacgccccaatgcttcgttcgaccaaccagttggccctccctaatctctcagggacaagatggaagctccgtctaagctcaggtctccgccctgtgtgaccttcagttcaagatagcgagctagcgtgttccgaaaacgaacgagacctctgagtaacaactggaaccttgacggctggtgcgtggtcctgccctcggctgactctgcaaaatgccactcgatcccctcggctcagtaatcgtccgcaagattaccggctatttcggctccgatatcgtcgggcacagttgtcaagcgtgatccccgggtccgtcacgtaaccaaacaatgaaaccaccctttcccaaatgacgtttcaaaattccaccaagataactgacttcagcttgaagtcgtccaaagacctgcgtttcgatgtcgagagtcccgctttgatggccgtccctggcagtttcctttgggcctgtttcctttaccgacacgccgacctgtggatgattgatcgagtcccagacaaacgcaggactcaaccgatcgtgctcaataataaggcaaggatacacgactgttgctgatgttgcgtcgcttttcttaaccccgtcaggttgtgttgccgcgctcgctcttgttctcgccaccgctgtcgtcctcgtcgatacgaaactgtcaccacaataaagacttgcttccgatgtggtgatctatagggcgaagaaggttcggaaccagcagccaggcgagctagacgggtggtcctccaccttatgttctccagacggctcggcacaagcgaatatctgccccacgccgcgggcgcggacaagcttatcgaagggatcgacgtttgagactcgcactgacagtcccacagacagtttgatgggacccgaaacaccttggatccaggcactgaagaatggaagtcgggtagctagctcagggttgacaaggaggggggggaggaaacatttggcagccaacagcccctccaagaaatctgtaacaggtatgagtggatcgaaacaaaatatagcaacttcgcgagctgacactgacttggtaaacaggtggacacaagaaaatagctcaaaagaacccgctccaagaaacccgaagagccaaccggcggccgtctgtcgtccagctcgatcacgatacgaagccaagcgaacagacgagtgtcaagagaacagcaccagagctgtcgccgcgtctcaagacagaggtcgaccaagatcagacggaccgtataatgtcgaagtggtgatgccgggtgttggatggcaccagtggttgccgaggcaagagggagaaaagggaaggaatgagctggtcgcaacagcttggttgagcaaaaggaaacaacaagaacaagttgagacgattcctttggcaggacacctcgagccaaaaagaggaatggggatcaatgaggggataaggctggcacttgggtgcatgagtcgaagacacacagtccaaggacagtacgtgtttgagtgcgtggtagggtacatccggggacagcgaccgggaagaccttgagggccgccgaatgtcttgctggggtgccaaaggtgatgtcctgtgcccgactgggatcaaccaagcagccatggatcagagatccggggcgggcagcacgacgcaggctggccgaagctctcaggaacgggcagatgacagaccgttgcacggtcggagggtcaggacggcaagggttttgcacagagtttccgtctgcagcgccgctcccatgcccttgcgctccctttgcattgaagaaggtgttagtcgacgtttagggttccccacactagacgcagtggtgtagtgtaatggtggtggtggtggtggtggtgtggtcctgtggatgggaccgggctcgcagatatcccccgagggggtgtgtacgtgcttggccagcaggtagctaccagactttgtggctcctgtctttctgtgatgaatgtacagggtcatggaccatggtccctgatgtggccatccttgtggagtgcttggtgcggatgcaacatgccgcagagccttctcagtcatccagatccctggtcacccaaagtcttggctacatcccatatgccgaccgttttcaacatcgcagaagcctacccgcgcgtcagattggcccgttcaacatcatggcgtcagatattcgtctgaagcgctacacagaggatcaccagggcgagaatcaaaaccagtagctgaagaccttgttgcattcgttgccaacaggcagaggaaaaaaccaacaccactcacatcttgtttggtctcgctttcacagaagcacaaaaagacacatggggttgagacagactcggaggctctaaaaagcacatggcccgtatccgcatgcccttgatggagactgccatctcaggattcggtgtggcgcagcactttttccaggatcgacaagctgagactccgagatggggcgtgaaacgtcttgagaagccatgtttgccaggagagtggaagactcgaatgaatccaggcacggtttctcgggtctcttcttgtaaccggattcatcaattcacaagactgagagctgtccacgggcataggcggtcgatcccattgcaacggtgctagtgagaacaacaaagaagctaaaggcgcgaaaggggttgccagaaacccgccgaggctaacggcaccagaggaaggacagggttcagcagcgctggatcgaaaacggagccgttgtcgcggctaatttagcaaccttctgcagccacacgatacccgaaacgtcatgtttgggacgatgtaaccctatcttgaactggtggaggagaaggcgtgggtgttgatgttgacgaaccctcagtagagttatcggtgtcggtttcttttttctactgctgggtagcgacaccactcggtattcgtcacaccatttcagaagatgggaagagtgctcaaagtgctgcgagctattctcttcatgtttgctatgttggcaaatggcttcgcgttagatcgcctgtcacaagaaaaaaaaggaaccggcaggggggtgtatgagaggggctgccgggagttgtccgatttgaatccgatcgagcctaggcccagccagcccaagggaagtaggtgagcgtaccttgagcagtatcaccaacaagattaggactaccctcgtcgaaacagcatcagaaaccaaacacaagtttgtcgaaccagtataggttgtggtgatatccattcatgacagtagtctgaagtgatggtggacagaaagcttgtctccatgtcgagtgggcgagtgggcggaagatggtccgagttgcgattggctcttctggctcctggaggggtgtttcagaagaaggaagctcaccactgcccagcaaccacctgaagatggagagcgggcaatgcaggggacgagatagggtgcgtctacagatgtttcagcgggctccccagttcatgcgaagaagaaaaagccaaagtctgggtcgccaagactccttcccgcagcgggcgggaggcccactcttgatgacccggagagggcctactaaccttgagtataggtgatttgaatagggataggtaatagtattggatactgaagaaagtgatatcaacaggctacctacggtcacggtactaaatggacacttctcaccttcctagttgctctggcacacgtcgcttcccctgctaggttcctactcttgacaggccgctggcgaccccacccactaaaccttcgtccaccagctttccactgtggcaggtgcgtcttggacgatcattcattcatgctttgccatgtctcttctgacggcccttggaacccggcgtgcccggagacccctttcttgttctcgaagcttcagattcccttgtcgtcgatcaggctctggaagcgcaccaacaagcgaaggtaacaacatttcgaccctggaccgattgaaccggctgggctgtcttgacctcgaaataaggttggttcgtgtgtttttgggaacctgggaatctctatctgaatccctcgtttgtgggtgacacgagaatacgggtgcctaattgtcgatccaggacagacagttcaaaaatagcatacggcatgtttctggaatactcagggagccctcatgcggaagcgaggctcagctccgtatctttgccggccgctcccctctacatccatcacctcacctcagtcggccccggccatggtccgaatcgtagcctcggatgagaaacgttcaatcaactactgtcccccgagtgcaaagcttgtttctggccttcggacaattctcaacgtctcgggcatcacaacatgccgactctgcacaaatcgtcctagcaagatgccacacaagaaacatgcaacacgaggcacaggaatatcaagcaggtggccccacccgaacaaactctccgccgtgttcctcgtcttcggtgatacaagctcaactaccagccagctctcttcaggaaacagagcccgacccagtattcattcgggccatggctcccaaacacatttggcatctccgatagcgctcccagtgcggcacctcagtggagcgttactctttggaagctaaacatagtttttctagtatgtgactaggtagacagtcacattgagcatccctcccctaagcatatcgatccatcgcgcattcccaagcatgcaacctggatctggagaatgagatatctctgaaagtcccggccgaataaagccagttgcaagaccggacgagatgactgtgccactcaaaccccggaatcagttcggactcttgatctaggcatctggcaaagtcgccctacgccccctttgcgcggcttggaaccgagacggcactgtgccaccgatggggatgccaaagtctaagattgacaagtgttgcgtggtgttgtggtctcgaaacggtacacaaaacggcagaaaatatcctccgatttcaccttcctataggccatacgaaaagctgatgaaagccacgtcccaagtcacaaacggatgttcgggtagggatgcaagtttggctactgacaaggcgaccagcggccaagcatgggaacttctgatctgctggtcatatcgtccccggcgatgacactaactggactcttccaggttcaccatccacacacttcgatgcacaacattcaagacacacaggggttcatctcgcggtctggtgtctgcggagaatttcctacccggttgcgtgtcagacgggtggccgctgttgtaatgcatgcggtcaacttggaagtaacaaagacagggcggctttcctgcccggggagagagcaaccgggcctcatggccgaggggaagggggtggatgatgtggcaatgatccgatgtgatgatgtgtagtgcggaagatcggatcggggggtgcctgctcctcaaccgatcgaataaatgatatcgatgacagtctctctacatcagacgaccgtcagatggagacccaaaggggggtcacaacattcccccccttttctcctgcttgccgacttacaacacccgcattctgttcccctcacggcagagtttctcttccagtaagagacttggattgtaactgctgctccccgccgaccccgcgtcaagcagcgtggcgttatgtatctgtacgatactgctgttgcccgccacgcttgcaccaaactggaaggcaacacatgatggctgccccttggtctggccggacggacggggaatagcagccgataatgatgatggatacaatgggttctggaaccacgttgcgatttcccatgtacgcatcggaagtcggaagccaacgcccccccccccaacagtcagtaggtattcggagacttgcgtctaggattagcttgccccttttcttgcttcccctctatccacacgacctgcggaccatgacttcacaatgagccggaaggggtgctctgaaagagtggagaagggtgtgtacatatgtgaaggtacagtaccttgatgttgtgtaatcgcctacttgccatccgagtcaggccaacgtgggagggttggcggctgactgattctctgtgtgtgtgaggtgttcatggatttgttggggatgtaactgatcaggctgaagactgctgggcgggtcgtattgttcagattgatgtgtagagccgcatggtgttcggatgcttgtagtttgggccgcgtgcgcttgttgcctctttgcacactcccttcgagagatgggttgtctccccttcttgcagtgtcttgtcgcctggattttttccaagagcatcaatcagagaggaaaatggctcggccaaagtcagacttggtattcgatttggtgtgtggttcttaaaccgtcgggttgtctttcatgatacagtgggcgcaagtatcggatagacttcgtgtttcatgaaggtgtgatttccctttagtttcctcagccgcagattcatgatattcctagagatacgctggccagaccaacgccattacttgatccagatcttgccagtgagggtataggccattattttgttgtaaatagctgtggtcagcttccgacataattgcccggtcaaaagcccagacctgttgaaagctttgtagctggaagactggcatagacacaaaagactctaggcatacacggcagcaacaggtgttccatttgggctgtggagcatctgatatttttgactcggcatgattagatataggtgcctttatttcattgttgatctaccagtttcattttttaatagagcccttgattacctgccaggtctgcaaataaccgtggtacctcattcaccacaacctcaactacttcaagatcctctagacacttctcttttcaacagccgcgtctccgtgccatctcgaatacgatgatccaaatacctctaaccagaaagcagataaacttcaaggcccaaactgaatccccaaaactccaccggaaaagcacccaacagccgccacagtgtctgttactgttatcccagcatttcccgcccagattatcgaagcgatcgaggctattgccgagctcgaaactgtcgagcctatgcccgccccagcagcgcgagcgagcgcacccgtagacactgtaggcactgagcgaaggaagtctgtactgtgtcatgaggtgacattcggccaaagtctcggttagccaaaccagcgttcgactcccaggtcgatcacgcatgttgtattatttggaacgagggtgctcgcatacggcatcagaaagtttgtaccatatctgatcttggacagcaaccttgaaaccgtgagactctaaccattcggatttttcacgaagaggttgtccaaaaaaaatcaggagtgaaagttacatttgtcaagccaaacacaccaatacttgtctcccaatagcatactcctctttcagtgagcatccagcaccccctatccctagtaacaagtcaacaagctcccctacagctgcctgccaagcttcacaccactcaactttctaatcaccacccctcaactgatctttcaaaactccttgaatgctccctgaagcccttgaatccacacccgattagaatcatcacccagtctcccaacacttgccgtaattttcctcctcccaacaataatctaccgccacaacacacacacaaccccccatccccattgaatcttccatcctccaaaccaaactcatcccgttccttgatgatgatgtgcttctaaagacaatggaccatcaagccgtcttgcgccccctcatccctttcacagtcgccacttggtatttgtgtacagtgatggcgtatggaatggtaaccgggatcccgtgtacgccatcagtccggatggatggcatggccggcttgtcgaaagcctcggccaggaagccccaatggccaggaagccccaatggccaggaagccccaatggccaggaagccccaatggcgaggaagccccaatgcgtatcgagcaataaacttgccgtggcagggcagcagcccgttgggggacacgcgaggttggtgtctgcggtgtctgtatgctcccgtggtgcgaggttctctcaggcaagggagagagaaaaggtaggtaggaaggtggttgttgggtaagtaggtgggaggcgtgcaagaactggttggtgtgaggtggacgaggtaaggtaagctaaggtgaccttgattctctgggaaggtcaggaaaaatttgtggttgtttgagtatatatagaaggggggaaacgagttcaaagacaaacgcaaggctgaaaatggagaaattatgagttcaaaaacaaacacattgctgaaaatgcagaaggaaaagaatggtgttggagaagaatgtccggggggtgatcggatggccaggagttggattatatgctttggccggacaggacaaacactacctaaggtagacttgggaagaatatccagacagaaccagccagttagaccctggaaaaagacaaacaggagagtgtgaacagcactgacccggacagtcaccaaatcacaacacatatgcctcagacggatagggcaaacaaatagatttgggaatgcagtcgagcagaaccagccagtcaactgaaagcaaggaggaaagcagaccggcaagagaagacatcggacaaccacgtgtttcaaaacccgttcacaagcagcggttagcgacaacctgcaaacatcaccgccagcacagcattcgaacagcaagatcatcttcatcatccaatccattctttctccgaatactctcagagttatctaattacccaaaaaaataatgaaccacgcaaaaagctttatcacaaaatcagaaagacaagaaaaccccttttcatgcgccccttaatggaactgatcctccgtcacacccttacccatagcagccgtactgctaataccaccagtcaccatcttctgcagctcgtccacgtacgtggcacccgaccacttctgatgcttgaccacatccacaccgccctccatctcaggctcctgcaccagctcgccatacgccctcatgccaatcttgctgtacgcgctggcaaacttgtcgctgataagggcggtggtgtgaagaccagcgagggtgatgaactgccagcagtaacccaggccagccaggcgtctgatgtaggtctcctgctcctctctgggcatggcggtcttccagttgaaagagggagacaggttgtaggcgagcttctgctcgggccagacggcgtggacgcccttggcgaactcctcggcctgcttgtagtcggggagcttggactccatccagatggcgtcgcagtaaggggcgtaggcgatggcgcggttgatggagcagtcgcagccgccctcgagacggtagtagccctcgcgggtgcggggggcgtcccagttgaagtaaatgtccttgccgaggatgccgcgggcgacggcgcgggcctccttgttggagagctgcttgccgttgacgctgtcgcggtacttttgggcgagggccttctggttggggaggttggaggagaggatggcgtccacgacgtggtcgtcgaagcgcttgaggttggccttggcgagccactggtcctcgatggcctggagctcggcgccgttcttgccggccttctcaccagcaatcatgagctcgttgaggtcggggaggtcggcgttgttggtgccgaggatgaaggcgtggtcgcggggatcgatggtggtggtgatgagggtggcagcctcggcatcagtacgggcaatggccaggaggtcagagcccatgatgtcggcctgggcacggatggcaatcagacggttgatgtgctcggagatggggacgagaaccttgccggccatgtggccgcacttcttggtgccaggggcctgatcctcgatgtgaataccggcagcacccttctcaatgaagagcttggtgagcttcatgacggcggtaagaccaccgtgaccggtatcggcatcggcgatgatgggacggaggtagtcgatgttggcgagcttggcgcgctgcgccttgggaacggagagacgctcctgacgctgcttgcggtcgtggaaaagctgggccatgaagagatggccgaccttgttggggacggtagtctggttcagtcagtattttgctgctctcgtcatctccatgtcaccacactcacataagggtaatcagcaagatccgggccgggctcgtcagaggcagaggccgttgatgatgattgccagccggaaacatagactgtgtcgaggtacttggccatttgggtcaccattgttggctccaagcagccgtatgtgtaactggcatccttgttctgttttcgagtcaagtcagcgtcggctcttcggtcatctttgttgacatgacagtaaacatacctggaaccgcccctcaagaatcttccacagcttcttggcctgggcattgctggcatactcgatcttgaggttgcctctcttgttgacgatctgctcagcggtaaaagggcgcttggtgtaccgccatcttggctcgctccaccacttcttgacctcggccacctccttcgcgaagagctcgtcctcaatgttggggtccacggcgggattgaccatgttgttggcagccatgttgggcacgcggtttttagaattggtgatgggtgggtgtggcgtatgtaagaccgtttacggtttctttgttgttatgtataatccaaccggtgatatcagagcccttgtgtatgggatatggtggtgggtgggatggcagggaaaaaagggggtataagacaaacaactgcaagaaaagtataaccagccgaggaagaattaggaggaggcagacgactaatgtatctccccggcggcttccaagaaggcttatcggaacaaggggcgcaaagaaagggacgaggggttaccgggctgaggcagcggacattggtgtgggcgtcgggagagatcggtctagcggctactcaaagtagccagaaggggatgtagtcattgcccctgttccccacgttcgtttccataccttcaatccgggtctggggacatggtcgtcaactgactcttgctcgcgtggctgttccacggatacaaggaacggaccggtcacaaacggtcgagtctgtcggttttcttttgtgttagtgttcagagcgttggccatcatcaccacaagtcatcaactcgctaacctcttcccattgtttgccgtgacgacaacgacgtacaaaacatgcccgcatcgagtgtcatgtcagaatcctttgagccgagccatgttcgccgcaagtcccactatttccccaacaacgaccccacactccacgaatggatgcaagccgcaccgccgttgaccgaattgccgaaccgatgccggggccaatgctgctgagcgctgccggaattcaggcgttgcgattggcctgttgcgccctttcagcggcccctcccccacaattgagccactgtaaattttcatggaaaatggctggagatctgcgtcttggaaaacgtcagtcaaaggctgggcgcaatcatcaattctgaaaaaagtctggttcctttattattttgggctatttccctcccagtgcctcccactggcactggtcgcgtggccagacagacgtgaatcaattgactttctgctcgttttgttgatgtgtcttgctgttttgcctctggaaacctccccccgctgtttgcgtccgactgttgctggttgctgggcccatcaatggcatgtgaagatgcgtcataggttacaaacggactcgtacctggctgtaacatttcgactgccccacctttcgcggctcgccaatatctccgtgattggccattcccctttggaccgcttcgacctcggtcaactttatgtcagctgccacttcagcccggcccagcgacaacgagctcctccgctgtagccgtctgggaccgacggggcgccgaccaagctccgtctcgaaacggtgctcggccatcacatgcagcactcaagccacgagaaagcacatgtctagtgctgctgggtcctggccgttgaggttcaccccaggcacctgaaaccgaattggaacagtcacaaactttctgtctggactctgaacaaaaaaccatgctcatgattcgggggtatctcaatctcaaagctcatcatcctcatcgttgtcagaaagaaatatcgtcggcctcggcggggcaggaagggtattcccagcgtcctcatgtacaacgggaccgttgccttctccctttctcatgaccccctccagctgagcaccatactccatgacagcgtcatcttctatactaacaatcgatggcgatggctgctcctgtgcctcaatgacccttagctcgtccagctccttctccaaaagcttcgcctccctcgaccgatagaatgtctccaggcagtttcgtctctgctcctgtgtccagctctcgaccaccagcgcaaaaccagtcgcattcgcaaacccaaactcttttgccatcgaacaaaactgccgtctcattgcagctgccggcgggttgaacttgtagtggactttccacacgctgtcggtatcgggaacactgttggcctggctatctgcaaataatgcgcggtcgcctcccaattcctggctgtctttgttggcggcaagctctgctcttcgtgatagcttttcctccacgcgactggtgccaaccacttccgagttctcgtgcgtgtattcaaccccggcagaagccaaaatggcggcgacggcatcgctctgtggtttctgcgtcttgcggctcttgagcatgtcctccttgttttcaatcgtgatgagctttgccaactgactcatgcccgtctcgtcgctgtcgtcctcctgcttgacgaggttgatctcgtcatctttgtcctttgccaacttctccaggtcaatatcgctgagcaggacacctgccttggcctcggcaacgttggtcttgttgacgatctctcggagaacgacctggtcggggtggtagctaaggaggttgccgagcccgaatatctcgccctttcgagtgctgtccttttggacgcctttgaaataacgcctctcgttggatgcgttgtatccaatgttggcttgttgttgtttgtagatctggcgagcgtagacaatctcctcgatggttccagctgatatcagtcggaacacgtccacatcgcggatctgaccaattctgtaagctcggtcttgggcctggagatcgtaagcagggttccagtgcgggtcaaagatgacaaccttgttggctgaggtgatgttcaggccaacgccaccagctttagtcgaaataagaaagacaaactgagcagggtctgtgttgaactcatccaccacattctggcgctcctcgtagcttagtgagccgtctaagaagctgacattgtaatttgtattgttgaataggtgccggaggatccgcagtagcctcacgctgtgagaaaagacgaggaccttgtcgccattgctgtgccagaactgaaggagcttcttcaaaaccttccacttgccgcagaattctgggttggcaagactgagcatcgaatctcgctcctgccaaagtttctcccatccatcggggatgcaggtgcggagagtgctgagctccgtactttgcttgtcgtttgggtccgctgaagatggtagaaggagtgtaaggtggttggcaattttctgaagtgtcgtgaggcatggaaaggtaagactcttccaaggcctcccatcctcgagaatcttgtagcaacaccacccctgttttcgtccagatgcacacgggcaaggttccgatgcgcatatgatgtactgaacctgatcaccgtcgataaagttttgataggcgtggctctgaatatctgtcaagggacaaaataccaccttatccgactttttcggaagctggtcagcgataagtgtctttatccggcggagaaagtagtcgggcagcaggttgtgcaccagcttctttgctgttgtcctggcgagactaagctgtttgagggtcgcctcgtgagattgcccgacagtcaaaggcttggtgatggtggtggtccactcggccaaagttccaaaacggcccgggtttgtccagttcaacagcgtccacagctcctcgtacttgttttggatggccgttcctgtaaggcctatccggcacatcgcgttaacgcgacccatggcccttgtcgtttcagaccgcctgtctttcaactgatggcactcgtcggcaaccacgcaatcccagtcgatagcattgacagcgtcgcaattgttcttgtaggtcatgtaggtcgtgatcataacctcaagccgccctgctttggccgcacctagtacgtcttctttcccaacgccatgaaataggtcgatatgccaccagccccagcggttcaactcgttcttccagttctggatcagtgatccaggacaaacaatcaagactcttgggtaccaacagccccctgctcttcgcatttttctcatccgcttcgcatcacgctcgtctccagttttcccaaatgcggctgtgagaaatgcggccacttgtaccgtttttcccagacccatgtcatcgcctagaatgcagcctttctggtagataaatctctggtgaagaaaccgtacgccttcgacttggtagtcacgcaggtactgggcgatcgaagctgggatgatgccggctgaatactccaactcaatctgctttttaggacgacatggtttgattccgctcctttcgtcaaattgtggcctttctgcatgctggaattggcgttcgtcgtccgaaaaatacagttccgaataatctggtggtatcttgagtcctccggctttaagctgttccctgtctctgtcgaagcgcctccttcgctgctgtaagtacgcgggcacctctgcctcttcatattcctgctgtgtccccggatcttcgattttaatggtcctcttcctttcagacctgacccctccccctcgtcctgccccccttggccctccccttcccctgccgccagtggttgcggcagtggcacgacgcttagttgcccgtggctggttgagcgctgtcccatcatcgggatcatctgtccaaacgaccctttcctctagctcaggtgggaccggtgacttgcgcttcccaagagagtttgtgacggcgggctggtctccatcaaccgaagaggctgtaaggtcgtcatcggaaatctcaatctcatcgccatccatttgcgcggcgattttgcatgttgccactcgttctgcctgcccgtgggagaatatccggaattggacgctgtaagtgagttggagagcctgacgcggtttgaaaggcagcacagacaaaaggctgcgcgacaatggaacgtgagcacgtgaccacctctgggttttcactggacagtgagtgacacggtccagagtagttgctaccagtagatggtcttttctgctactatttcgaagcttcattttgatactatgcgtaaacttagagtatttcctacctttttccgacatgagagtcatcaccacaactgctttgttgaacatccaacacacagctccaaagccaaccccaaccctctccccgtaacttgctcgtcccccgcaaatcttggcactctttgacagcggcctctttccgcccatgaacccaccatccccggatttacaggggcaggatgggacggaatcccggtcaaccaaccactgagaagacaggaacaacatccagttcaaggccgaggctcgtggtccgcctgcttttgacgtaaatagcgaatacgttctgctggtattcaaaatgtgatttcacatcatctactgcagtcttttttatctcaacgaacacgtacccaccgttacaatggagccttcaagttcgaatactggttttatccagcaacagcccgtgatcaacaaccagttctatgatgatgtgagctaccaaagagtagccagatgtatgcttccctgtaggaactttcatcacaaaatcactaacagctgatagtattcctgccatcggatatccttgacaaaatcacacccgatgctgctcagatcggccaagaggtcttgtctcagcaagtcttcgattgggtaactgacgccgagcataaccagccatatctgcgcggaaatggccgggattcattcggcaagcccaaaagcgagctggttgttggcgagggatggcgaaagcttcaagactatggcttcaaaaaggggtaaacgtctacaagacctacatgccgggttgccgtgctaatgccatcgcagagtcgttgctttgaactacgacactgaccacggcccttacactcgccttgtccagtttttgcggtgccacctctgggaagcatcatgcgccaataccctctgcccagcggctatgcaagatggcgcggcccgtctccttcaacgtcatctgttcacttccgccgcgaagaaactctcgccgattgaacgtgaggtctttcagaatgcctacagccacctaacctcccgtgacccaaccaaaatatggaccagcggccaatggatgaccgagcgaactggcggcagtgacgtatctcagacagaaaccgtagccacttacgacccctttccttcctcagccccagtccccttggcatcacagtccgaatccatccccctcggcccatggtccatctccggcttcaagtggttctcatcagccaccgactcccacatgaccattctcctcgccagaacccatccctccaagggcgtatccgccttcttcgcccccatgcgccgcgataacccttccctagtctcccacacgggcgaaagcggaaacggcaccgaactcaacggtatcaccatccagcgtctcaagcacaaattcggcacccaatccctccctacagcagagctcgagctcaagggtatgcgaggttggcttattggcgaggagggcaaaggaatccaggaaatcagcaccatcctcaacatcacccgcgtgcacactaccgtctcttccatgggctaccttgggcgttcgctcggcatcgcccggtcctttgcccttgtccgccccgtcggaatgggcaaaggcaagcgaattgccttgtcgtcgcaccctttgcatatgagaacactggccaacatgacgactgactaccacggtatgatgctgctgacgttttacacaatccacgctctcggtctggatgagcggtttcttccctccaaccaagcggcgacaaaggtcccgactccacctaaggagttggtccagcctttactcagggtattgtccagtcttcacaagtcctatgtctgcgagacaactgtcccactggtgtacggctgcatggaagcgctgggaggggtaggatacatgcagaatgtcgagtctgagcatctcaatatctctagactgttccgtgattgctgcgttggtgctatttgggaggggacgactgatgtcttggctagtgatacgcttcgtgctttgaagcaccccctgagcgggaagcagtcagttcaagctttggattggctgattctgtcgtcgaagaatgcagggttggtggaggaatggcaagtgttgaagaacaagattgatacgggcaaccaggaggaactgttgcctgaggctagggggttggtgtttaggattgcggagattatcatctcggtgctgtacttggttgatgctgaggctgatctgggggttgagattgaggccatgtgtgctaggtttatggagaagaagggtttcagtgtttatgaggcgccggggaagagggcaagggaaggaggattgaagctcgatcaggcgattgtttatggcgctgggaaggaccttgctcagggcgcgaagctctaaatgttgactatcataaacaatcgcagcgtgcttcaacagtacagatgtgcttccaacagcccataagacgagggtcactacaccaagatttgcttgcatgctttagtaactgacactgagaaagcaaggaacaaaagtcatcctagcctcaagctcggtttccttgccccccagcttcatcgtccgagcattctcataccagcgttcgcgagcctcgagtgcttcagccaaaatatcgaagaaatgagaactggcccgtggcatcgcaagcaagcgaggcgcaacggatccgtgtgcgacgtgcctggtagcctgcttccgtcgatcagattttcgagtagggggaggagaggatgaaggaacagaaggagacagcatgaaccccaaggaggctcgccagaaggcgaataggcgggcaatcttctgtctctatctctctctctctcgctggcgtttcgcaacagttcagcgtcgccacatgttggcacgattctcgcctgcgagcgcgattcgtcggcagacgaatttcagccgagcatcttgtactcttcttgttcatctgaagttgacgtttgcggacattacacttctttttcggtaggtattttgagcctttctcaatctgccgcctgagcttttcctgctcgaaatgttggctttccgaacagcttcttcactccacacaagcatttgtctaaggtacgtacccttaggcagtgagatgagcaaaagtattgttgcttatttatcaaatatataggtatataacacaccccggtgacatccgactttatccccatctccaacaccgtattcccaccgcaaccacccctcactgccagttctcatccggcaccgggcatccaatcctctgctggcagccaaacccaggatcggcccctccacagcaggtcacaaaggccaaggcgtgatcatggttcgtgccggggcaaagctgaaggtaaagtgttgggacctgcgagactgggtgaggcatgaaagaggtaagacatacctgctgccaattcagagtgttaccgatggcagcgcagcacgtggccgatttcgaagggtcaacgtctctggagcacccacagctgtagaagcaatcaccggtcattggagctggtagcgggttcggggatctgatggcgttgggggagggagcggtgatggcggtggcggcggtcaaaaccaagaggagagtggtgaaggtgcgcattgtgggtagatcttttggcttgagttgagttttgatgatctttttctacctacttacctacttatgagagggaaggcagagctgtttgtcgatatatatctcgagttgtctctaagcagcgatggaaacaatacctccgaaagctgttggtcttttacccctgcttctatatactgtaaattcctacctgtttacttggcaggtagtagtgatgatgcgaccaggtacttttgcaaacccggacaaaggaaaagagactattgtggcatcacatacagcataggcataagcaacgctctcagcgatctctctaagggttagtaagagtgctttaagacctcgactacgattcggcagctcattacaaactcttcaggtttttgtttccgtcatcaattcccatttattatccgagaaatgggcagaaacatcatcaagtgcatggctcttgtgatggcacttggcagttggtgacgcggcctttagagcggagcgagcaatctgcagaaccaaagagcatgcaaaccctgcaggtttgagtcccatgatgcgaatcgtatggaattatcgattgcattcagacgctatcttctttaagcccccagaacttcatgttgttgggaccaattcaaggctctcaggttgaccctcaacctacaccaactccctaacaggaagactctctccaccattgccgacaactgcagtctcgggcattgcaatgtcatacttcataaccgtacatctccagtgagggcccctgtctacatagctattgcccccatcaggcctagggcaacgcgtcttctgcgaacacccatagccgttcttgctcccgcagcatgttgcgaacgtcgtagcgccagtgaggttcatcttgacgcaggtctgcctcaatgtcagcaagccatccactcctcattcatggtagaaatacaggggttggattatcatcgaaggtcccatcagtggaggcacagcactgagcagagagatcatcctcagcacaccagcagtcgtactggcacctgcgatcaatcttgtcgattatcgaccagaggaagtcagggacatgaagggcggtggtggtgctggccaaaccggccaacgagaaaagcaaggtagcggagacgcgcatgttgtattcgtggtagttaagcttgtgcgttatgccggcatccatgatggtaaaagtattctgcaaggaaggaaaacgcacctagtggacactgtgggcagatgatgagatgttaagacctacgaggtagtgtgtcgaggaagcggatcagctttcgatgacgtctacaaagccagagtcttcttgttggacgaatggtaagactgggccgagatacggagaccgaagttatactgctgcctatgaacttggcctcatcacattggttggagtgtttgttgcaaggttgaaaacatggaccctgcagcaacatttcaactacataatctttgtgtaacgaggagtgtaaacatggatattaattgacagcctgactacacgccacgtttgaagaccagctttacctgtcttatattcctcttttctcggttcattcgacatcacaagagataatcctctagattcctatttgtacctaggcaggtgtgtaccgaaacgaaactagctagatattccccgggggcccccaattaactcttaccaacgaaccggaatttccaccatcaccgtctatcaccatcagaacctcacactccaaagatctcccaccatgagcttccatcactgtcaatccttatgaccatcaccaactcccttcagctaccccatatcaactccctaccactgaccaggagccgggcatccaaaaccaaacccacaaccataaacccccccacagcactgggtgtaatcatgagccgtggtattattcatatcggcgcaccactatcagaaacatcacctgttagcaaccgcatgaggcaccccggcaggagaaatacatacgccaatagactcatcaaaccttcccccagaagcaacacagcactccttgctctgctcgacagagtcggcgcaggtgcagaggtagaggcattcgtcgttggcgagagcgtccctgacaagaggcgagagagcagaagacgcaggagcggcgatggtgctgcttgcgaggctgagagccatgatgagggtggtgaaggcgcgcattttggatgctctttaagtagcttgattgtgacaaaggtagctgtgttgtgaaagcctgtctcggtgatgctggggacaactctctcctttgggtgttcttcctctcaacttatatgctcggcgcccaaactcctggaaggttggaatatcgggatgaccccatagtattttgctacaccaagaggtaaaaaaagggggaaggcccagattatcaccaacagcatacctctggtgacgcggccataactaccgtgacgcggccatagctactgtataccaacacaagtcccccttcctattattctctcggttggcccctgatttctagtcctcaccacacagcatcaccacaagttaagaacttgtgtttgctctgccccataacgcatcacaccctcaagtccgccccttacgcaacactcgcccggttaggtatgcgctcgcctccccaatagggtaagccctccctatcacaatcggcatcaaacatcacaagccaacttgatggaacatcttgctgattcgccacgaacagctctattacatgctgcggcgcgctttggtcctatcctgctacccagtcaaagctgtgcctttccccttaaacacccagcacaacaacacccccccttaattcccccacctcgtcaccagaaagttcgcccacttcccaatatcctccaatgcctccaacaccaacccaatatcctccaccctcctcgtcctcccattcttccccatcatgttcccctcatccagcacattctgcgcctccacatggacatgcccattctccctaatctcgaggaggatgttcgccgtcttgttctcactgaacgggaacacaatctgaagacgcggaaccggaaggatggtgagagtaacatcaatgttcaagtccagcttcttcccggtttcattcgctccccgttcggtttcggccgcggcatcatcctcttgcctgatgccagcagaggaacccccgttcaagccggactgcatgaagccagaaaactcatccatgttagtttcggtcattgtagttccgtccccgacagtcgttggcaatactttcgtcgagctgaacgtgatatttgtgccggcgtccttctcgaagctgttctccagcaggatcgacaaaaagacatattgccgaagatggggcaacatcatcaccaggtgttgagggtgagaaaaggtgagctcggtaagagtcttgccatagactggctcgtagacgtagagagtattcgtgtggttcatgatctgcacctcctcgctttcgttggggtgcggaaagttggggatcttcttgtggcatactgtggtcctcgcttcggcgttggcttggtcgctgctcttaagattgccagtgttgggcgcctgggggagtaccaagttgtcaaaggtggtcagcttttcgggggcgctgtccaccaccccaacgccgagttgccgtatcttgtcccagagatcggcggatatgtgaatgggagggtcgaagatggcttgaaacacggcttcaggaagacgtggggcgtggagcagaacccctggatctgatttctcatcctcgggggttggaagataggtcgggggcgggtcgagccagtcaacgacagggcccaactcatccggcaatggcatcctctcaacgtccacactgatccatttgtcagagatgcgtactgggctgacggggttgtttgggtttagagaggtgcatccgatgaggagactccatgttttgctgttgtcgatcatctcggcggtttgctctggggtttcgctcttgaaatttctgccctgcttccaataatctaggctcagacctgtcttgcggcgcgagttcatcgttggtctgccacttctagtgcagagcgcgagacactcgatctcgaaatctcgtttgcccgcaaaggccggctcttctctcagcttttgcatttcccaatgatgtaggcgaagtaaactttcgtagaccccagccacggcctcgtacaaattaagtccagggttcaggctgagtttgtctagcatggcgagcctttcaaagttgtccgcaaatccggcgagagacttggttagggggagctggccgtcttccaactgcaaatccttgagaaggatttcaccggctgccgcggcgtgcttgctgacgatgtcggctgattcggggaagttgagactgagggacagcacgatgtctttttggaagtcgatagagagctccagggctgctccagctataatcaggctctttttcttttcgttgccgacaggcgcgtcccagaatacttccaggccgagtcttttggccagtcgctccaggccggcttcgctgacgaggccttttctttgctatgctgcaggtcagaaaaatagaatagcagaaagaggcatatgggccgtacacttaggatatcgatcatagcatccagcctttttgctcgttcatcctctgaagttttgcccaggaagcctgaaaggcccgagtccaaggagcccatgttgagtgcgctgagagcagctgcggctgatggactgtcgaagtttacggctggtacggaaggatgaccaccaagagtagtcgcgggtgattttttgacttgctgtggtgaggatcgtggaccgtgtggtgagaaggcactggcagcatgggcggcggagaacggagtcgagactgggggagtcccaacagcgccgtgttgtgactgggagggagtcttgccctgctgtgaaagagcatgtttcattggagtaggagttgtcattttgaattgcggttggctttcaccacctgaatcttatagggagcgaggcgtagtgttcaggattgcgaggagaagagcaacgtattaattgaacttagatcgcggagtttcaactgggttagttgtaaattatatcacggtgagtgattgcaatatcatcagaaattgactggctcggcagcagtcatgaaagatgatcttggtgggaagggcaaattggaatgaagcaggagaatgagagtgagagtgagagtgagagtgagaaccacaaccttgaacctagagcttggaccgcgccccactatctgaccgaaaagacagacagccaaccctaacccgtgaagctggcatgtatgtatcttgaagtttacaactaggttgaggattcaggcctttgcgatttttgggcaataagatggctcctaaacttgatattcatatctggatatccaggagagagcccggccagaggaatatgaaatctggatatgctgctggtgtgcggctgtctaccgacatatatggatgtctttgaagcgcacccgcgtcagggcgtccaatgaacccctgcggcccgagaaatgcaaaccgacatgcaagaaacttctttctaagaggagctgcatttatcttattttcactttcacctcaacgaggaaaaataatgttattatcgcatgcacagaagaactgcttgaagtccatccaacgtagccactgctgggctaggaacacccctgccacacacgctaatctaattgctgcagtgggcgctcccccagctgtttagtggatcaaataagtttgacacccaagcgccgcaacgctcaccacccaccatggactttccagctccaccatccctcctccagcagtcgcaatactcgcagcatcaccagcaacaacagcaacagcaacagcaacagcaacagcaacagcaacagcaacagcaacagcaacagcaacaacagcaacagcagctacaactacagctacagcttcaataccagcaacagatccaattctacgagcagcaacagcatcaacagcagctcctagccatgaacggcatgaacggcgccaacatgcagggagccatggttggcgtccccataccagccggccaggcatccgagttgacctttatctacaacatggtcgacactctcagcggacagctcgcccaaaaccagcgcactctcgaagaagtcatctcttgcgtcggccgtattcgcgcacgggcgaggtcacagtcgctaggaaacgaagagctgatcaacctgtcagcggatgaaatcaagggtacatctccccattttgtattcctttacaaactcaaccaacatgctaacccctccctctccagcccaagaagcagacctcgacacctacatatcagtcctctcagaagccttcgagaaagccagatactcgcgtgaccaaaacgctttcctcctccaccaattcgccgagaaaatgtcctccatgctccgaatcttccacgaatacaaagccaagcacgtcagcgacgtctcgacctggcacaagtcctaccgcaaacaactagccgatgcccgcgcggagaactccaggctccgcgaacaaatctgggagatgcaggcccacgccggcgccgcgaacgagaagctgaggaatttccggaagaaatacgacgaggacgaaaagaggtgggagaagagggtcgagatgaaggcgatgaggcaggagttgaggttctggaaacggatggcgatgccacacttggcagatgacgatccgtactggagtgacgacgatgacctagtggatgtggctgagaagcagaggctgctggagatgcagaagatagcggccgagaacctggcggcagaagcggcgcagttggcggctgcacatgccgagctgggagacatcaccggcaacgacgaggacggcggggatcaagaaggggatggggttccacctcctgcgccagcgccgccgtctacaatgacgccacataacttggtgcggtcgcttgtgggcggggtgccgatgcagaggagtgatgatggggataatgctgggcctgttccgccgccgaggccgttgagcgcggcgagtagtaccgggtcttcggggcagtgagtgtttgcagttgatgttggaggggtgtaaggggcggatagcatgtataattccgtaagattgatcagcgtgccttttgataccaccaaaacagagtttatcgcaccatatataatagcaagaagagctgtttgatgcttacttgcactgcaaatttattttgcttcagaaacatcttgactgccagcagagaagcaggtcctggccagaatacaaatatgtccacagacttgtccaagctccgaatatgtctgagagaggtatgcattgctactttgggtgctttgcacggccagttctcagtatcttcgcaccgcattacgagagaatatctttaagaatacagcataaccatccgttagagtgaattcgtgaaagactgggacaaggaagcgtcaaaaaaggtagttctcacccactggctttcatccgagttgtttggtcagaggtaagagtcgacaggggcttgtttactttacccctgagtggggctagcgcctctcgacgttggctcgaacttttgttttttggatggagctacattttttgcatagccagcaagagtcatgtatcgattcagagtctgctggtagtatttcgcatcgtttcctacatgcatcgaggaacgggttgtattttgccgtcttacatatccacagaccgcactgcaagcactttgaagtgctcaatcggcatctgcaaccgagtgattgatagcacatcaaatttgttcctaaacatgtccaaagaaaaatggaaatacaaaattgccggtaccgttttttatacctaggtatccctcatagagaaaaaagaatcaagccgttatcgcaaacacccctcacaataaacgtatcccacagcttactccttcttttcctcttccttcttctcgtcttcctccttcttctcgtcttcctccttcttctccacctcctcttccttctcctcctcgatcaccgccgccgccacctcctccttcttctcttctgccctctcctcatctttcttcccctcttctaccaccaccacctcctcctccccattctccccctctcttctcctccccattccccccccttttttttccccccttcaacnnnnnnnnnnnnnnnnnnnnnnnnnnnnnnnnnnnnnnnnnnnnnnnnnnnnnnnnnnnnnnnnnnnnnnnnnnnnnnnnnnnnnnnnnnnnnnnnnnnnnnnnnnnnnnnnnnnnnnnnnnnnnnnnnnnnnnnnnnnnnnnnnnnnnnnnnnnnnnnnnnnnnnnnnnnnnnnnnnnnnnnnnnnnnnnnnnnnnnnnnnnnnnnnnnnnnnnnnnnnnnnnnnnnnnnnnnnnnnnnnnnnnnnnnnnnnnnnnnnnnnnnnnnnnnnnnnnnnnnnnnnnnnnnnnnnnnnnnnnnnnnnnnnnnnnnnnnnnnnnnnnnnnnnnnnnnnnnnnnnnnnnnnnnnnnnnnnnnnnnnnnnnnnnnnnnnnnnnnnnnnnnnnnnnnnnnnnnnnnnnnnnnnnnnnnnnnnnnnnnnnnnnnnnnnnnnnnnnnnnnnnnnnnnnnnnnnnnnnnnnnnnnnnnnnnnnnnnnnnnnnnnnnnnnnnnnnnnnnnnnnnnnnnnnnnnnnnnnnnnnnnnnnnnnnnnnnnnnnnnnnnnnnnnnnnnnnnnnnnnnnnnnnnnnnnnnnnnnnnnnnnnnnnnnnnnnnnnnnnnnnnnnnnnnnnnnnnnnnnnnnnnnnnnnnnnnnnnnnnnnnnnnnnnnnnnnnnnnnnnnnnnnnnnnnnnnnnnnnnnnnnnnnnnnnnnnnnnnnnnnnnnnnnnnnnnnnnnnnnnnnnnnnnnnnnnnnnnnnnnnnnnnnnnnnnnnnnnnnnnnnnnnnnnnnnnnnnnnnnnnnnnnnnnnnnnnnnnnnnnnnnnnnnnnnnnnnnnnnnnnnnnnnnnnnnnnnnnnnnnnnnnnnnnnnnnnnnnnnnnnnnnnnnnnnnnnnnnnnnnnnnnnnnnnnnnnnnnnnnnnnnnnnnnnnnnnnnnnnnnnnnnnnnnnnnnnnnnnnnnnnnnnnnnnnnnnnnnnnnnnnnnnnnnnnnnnnnnnnnnnnnnnnnnnnnnnnnnnnnnnnnnnnnnnnnnnnnnnnnnnatctcccccccgaaaccgtcaagagtgattacatcaccgacagcaggcttctcggcagaggcggccgcagcgccattggtgaaagtggccgcttcggcgaccttggtgacggtttccttcaccgcgtccttcacctttgccgcggccgtcttgttgggcgcagcggccttcttggtagcggtggcccttttggcgggaggctcagggggaggagggggagctttgcgcttgcggagttcgacgggcatttttgatggttgtgtgatgagatatcaatattgattgggggttggaggctggaggtagagagaaagagttgggggtcgcggaggttacgcgactgggatggattgcaggttacaatagtaagtggtttggggaaannnnnnnnnnnnnnnnnnnnnnnnnnnnnnnnnnnnnnnnnnnnnnnnnnnnnnnnnnnnnnnnnnnnnnnnnnnnnnnnnnnnnnnnnnnnnnnnnnnnnnnnnnnnnnnnnnnnnnnnnnnnnnnnnnnnnnnnnnnnnnnnnnnnnnnnnnnnnnnnnnnnnnnnnnnnnnnnnnnnnnnnnnnnnnnnnnnnnnnnnnnnnnnnnnnnnnnnnnnnnnnnnnnnnnnnnnnnnnnnnnnnnnnnnnnnnnnnnnnnnnnnnnnnnnnnnnnnnnnnnnnnnnnnnnnnnnnnnnnnnnnnnnnnnnnnnnnnnnnnnnnnnnnnnnnnnnnnnnnnnnnnnnnnnnnnnnnnnnnnnnnnnnnnnnnnnnnnnnnnnnnnnnnnnnnnnnnnnnnnnnnnnnnnnnnnnnnnnnnnnnnnnnnnnnnnnnnnnnnnnnnnnnnnnnnnnnnnnnnnnnnnnnnnnnnnnnnnnnnnnnnnnnnnnnnnnnnnnnnnnnnnnnnnnnnnnnnnnnnnnnnnnnnnnnnnnnnnnnnnnnnnnnnnnnnnnnnnnnnnnnnnnnnnnnnnnnnnnnnnnnnnnnnnnnnnnnnnnnnnnnnnnnnnnnnnnnnnnnnnnnnnnnnnnnnnnnnnnnnnnnnnnnnnnnnnnnnnnnnnnnnnnnnnnnnnnnnnnnnnnnnnnnnnnnnnnnnnnnnnnnnnnnnnnnnnnnnnnnnnnnnnnnnnnnnnnnnnnnnnnnnnnnnnnnnnnnnnnnnnnnnnnnnnnnnnnnnnnnnnnnnnnnnnnnnnnnnnnnnnnnnnnnnnnnnnnnnnnnnnnnnnnnnnnnnnnnnnnnnnnnnnnnnnnnnnnnnnnnnnnnnnnnnnnnnnnnnnnnnnnnnnnnnnnnnnnnnnnnnnnnnnnnnnnnnnnnnnnnnnnnnnnnnnnnnnnnnnnnnnnnnnnnnnnnnnnnnnnnnnnnnnnnnnnnnnnnnnnnnnnnnnnnnnnnnnnnnnnnnnnnnnnnnnnnnnnnnnnnnnnnnnnnnnnnnnnnnnnnnnnnnnnnnnnnnnnnnnnnnnnnnnnnnnnnnnnnnnnnnnnnnnnnnnnnnnnnnnnnnnnnnnnnnnnnnnnnnnnnnnnnnnnnnnnnnnnnnnnnnnnnnnnnnnnnnnnnnnnnnnnnnnnnnnnnnnnnnnnnnnnnnnnnnnnnnnnnnnnnnnnnnnnnnnnnnnnnnnnnnnnnnnnnnnnnnnnnnnnnnnnnnnnnnnnnnnnnnnnnnnnnnnnnnnnnnnnnnnnnnnnnatacagacagaaagggaaaagatctcgatcggaccggccctacatacaaaatccagcgcactccttgtgcaacgagagggggctggctggctgttacgtcgaggggagcttttgaaatcaggcgcaatattcggcacccacctttctcttctttctctctcttcaagttaatgccgttagccatagaaattcaatagggtaacagcattgactttgaaaaaacccaagcagtcaggtgatggaatggtgccatctcgctccccgtcacaaagggtgatcgcggagtcggtcgaggttttgtgaggagccaggccagaggagttcggtggtaggaggtggtccgtgagacggatggatcgctcctcagtccgtttccccaagaacgtggttctcgaagtgccaagtgctggcccaggccaaccctgtccgtttgcgacccagcgccagtggagctgcccggtccagattctccaactgaaggctcggcattcttcaccttcttgaacccggctaaactgcgggctctttgacatgctaagagctaagcaagccaacgccaagaccgcagcaactgggagcatcatcgtgtgtgtgtgagaggcaggctggttgttggcagcagcgaagtccccatctttgaatctctgaatatcttcaagtggtaaaaccctaccacagaaccccccaaccgccaaaatggcctccaaagcggtagcaaaggctgcggccggcactgtccaaaagatcagcaccgtatgttttcaattgcttacctagtctcgtagaattgcctcttgtactgatatttccccatccagaaatacaccgtccagtccaccggcctctgggagaagctccgcgcctccctctccctcgacgccaaccgctccaacggcgtccccctcaacccctacaaccgcttccccgcccccggccagaacgatcccctcaagtacgacgaccccgtcaccctcccggccggcgacctcgccgacaacccgtactggaagcgcgacgcccgccgcaactacccccgtctttctgtcgtctcccaggccgagcaggttgctctcctgaccgtcggctccgctgccgccccccgtgtcgagctcattggcgaggagggatccaaggctctggttgccgcccaggagcagggcaagcaggctggcctggccaactatatcgagtctgccggtgtcgaggctgcgaagagggtgctggaggccactggtggcctgccacctctgccgagcgggacgacgatgagcaatgccgaggggaagtgggatgtgcacaagtacaagctggaggaggagcagagctatggggaggagtaggtcttttctctttttatttctctctcctatgaaagagatgtgctaacgaatcacagctacccctgcagaacctttgcctaaggttggtcgtttagagaaaggagaaagaaagaggtcaccgagaagctgtacataagacctgcaaaatagaggcggtatagacagacggggcatgctggctttgagacgcgtttttcatttgttgctttcattcatgagattatgtgcgtgaatgagtgtatacgtgggtgtctatctacagcttccctttccatcaccacattcaaacggtgacccccttacttgctgtccctgcctcctcccctccgcttgctttctccccgaccatcctctcgataatcttcgccttcccctgccccctctttatcctatcatcgaaatcattcaccgcctcgtgctgggatgttcttccatggaacaagcttttccgtctcaaccagggcatacagtgtggtgatgtgcttctctagcctggggtttcttgggtagtggtgggaaggtctttcttttctgttctcggtctctgttggcacaactggttctgatgacgccggtggtgattttgacggtggcgaagaagaacggttgggcagtcgattggcccagactaacgcccttccgtacaaccttcccgcctcgagaaatttctggtagcccttttccagacccagctgtcttccctcggtgcgaccagcgaggactccatcggcggcgccttggttgtaaccttcggtgtagaacagggtttcgaggtggaggagggagtcgaaggggtcttctgcggagtttatggtttggtgatttgacgccatggtttttatgtgtgagtgggagggtataaaattatgggataactcgtgtaagatgcggtcaagaatgactgtgagtgagtgagtgagtgagtgagtgagtgagtgagtgagtgagtgagtgacgtgagtgagtgagtgagtgagcggcttgtataggcaagtaactatggcggggtgagccgagttcaaaagagccggccggagcgagcgaacgagcgcggggcaaattttggccccgcagtgagacgttttggttgtgtaagccgagcttccaggttgagagctcatcctggacggtgtcagcttcatttttgtttttatgctttcttcctccaaaccagtttctcatattgaagtaagagtttgggctggaagcatttagcatgagccacctcgttttgctgggaacctcagctcaccatagacaataaattcagctcaactcgatagcatccggccttgtctctaatgatacctatatcatctctcaaatatacaaaccatgaactctatgtatgagtgtccccctaatgaagcataaccatccctccattagcacaaacaacctgtcccgtaatccaccccgcctccatcccacacagcatcccaaccacacccgcaatctcccccgtcctcgccgccctcgtcccgtccggcagactctcatccttcacatccccctcctgcgccttcattaacggagtgtgcttgatccaaccctcaatcccctctaggaaaacctctgcattactcgcgtacatcggcccctccactggaccagggttcaccgcgttcaccgtggcattctgcgccaactcccgcgaccacgtccgtgtcattgcttccaacgcagccttggtcccgccgtagacagactgggtgacgaacccggtagaggaggagacggaagagatgttgactatcctgcctgatctatccttagggaggtaaggctgggcggcttggacgagaaggagaggacccaaaacgttgacgcggtaggtggcttcgaattgggggattgtgacgtcggggaggagggcgttttgggctatgccggcgttgttgatgatgatgtctatttggaaggtgttgtctgaagaggagaaagcagatttgacatcttgaacaagtttggcgggaccttccgggctgccaatgtctgcttggatgggaacgactttaatgttgtgggaggaggtgagctgggcggcgaggtcgttggcgatggaggtagaggagggggaggtgtagttgagggctatgttgcagcctttggaggcgaggttttcggctatggctgcgccaatgcctggtgattgttagcatagtggtgagaagggacggttagggacacatacctcgcgatgagccggttatgatggcgagtttgccttcgagagggcgagacatgttcctggtgatatcaatgctatacaaaactaacacagatgagagagagctctttggacgcggacagggaagaaaataaaatcaatttgaggagatagcttcatatatacaaaacaaagcggcgtaaccccccacggaatgacaatgcccttgatgtataagttggacatgccccgcatctggcgatgtcggtcgaggtccatccggggaagctctttaccctgggaagctgccccgctatttgcgcggctacagcgcccaccccacatggctttcagcgggaagtcccacccattggcggcgttgaatttcaccttggccgtcttgtcagaagagccccaccaaacggccgtcccgtccagcgttcaattcacgccgcccgcatcacgccgaagcttgccgactacgaagctttcgattatttagctataccgtacatacaaggcccgaacaagttcagctcaagacacaatggacatccgcctcctccgcccctccgacatccccctcatccagcacgccaacctcgagaacctccccgagaactacttcctcaagtactacctctaccacgccctctcctggccccagctctccttcgtggcagtcgacgtctcccgccccgcaaagaccccctatgactaccccaagatcgtcggctatgtcctcgccaaaatggaagaagagcccacggacggcgtccagcacggccacatcacctccctcagcgtgatgcgcacccaccggaggctgggtatcgcggaaaaactcatgagacagagccgtatgttccccccttttacccccccacccaaatcacagtgtattgatgggtgaacagaacaagcaatggtggaagccttcaacgcccgttacgtctccctccacgtccgcgtctccaaccaagccgccatccacctctaccgcaacacgctcaagttcgagacggaaaagacggagccaaagtactacgccgacggggaggacgcgttctgcatgaagctcgatctggattttatcaagcagcagattttggaggcggagaaggccgaggatgagcaagacaagaagaagaacaatggctcggaagagaagacgaaagaagaccaggacgagggcgaaccggtgggggatgtgggtagggatccggaacaggacaagaagatcaaggtcaaggttgggagggggttgggggtgggggagttggtggagagggacgagagtaaacattagttttgcaggtgtttgtggtgttttaaaaagggatgtctagatatgtgggttctgttttgtccttggttgagcgtttagaaacgtgggcaagggtgggcgggaatacaaaaagtctaccggtcaggtgtgttttgatgtgatatgggtgggtgatgttggtttgtgattagacatgagtggaaaaggggctcgaacaggtaaacattgtttgtcgatatcaaggctcacacaaagcggacggtataaacagggggttatggagcttactaatgtcccattatttaacgctacctatcgcaaactccaacacaaaacggccgctaagatctgatgaaaacatgttttcgtgactgtcatgaactcacacaaaccctcacctctcacctttcagccctcataaacaacccatgtctactctcttcctccctcgccagctccctcgcaaactcctcatccgcctccgtcctcaatctctccatttccaccgccaactcctcaatctccttttccagcccgatcgccgccttttcgtcctccgccttggggaatcccggaccagagatcttttcttgaaggctcaatagatccgagtacttggcggtgatctcatcctcaatctcatcggctcgtttgtattttgctgctgagggctctgaggggtgtggcgttgtcactttcttggggccaggctccgggcggtagggggccgggacggccaagggggaatccggtgggtgttggggggctattggcagcggcatcgaaggagagaccgcggtaggaggggggtgcttcggattgggggacgaggggaagagctggtgcgccaaaggggtttgtttgaggcattgggggcatcgggggcatcgggggcatcgggggcatcgggggcatgtaaggcggaaagccctgaggaaaaagatgagacggtccatggggaggcggagggccaggcggtggtggaccatgatggggaacaggaagaggaccagatctatgaccgtgacggtgaaagtccttctctgcccggcgcatctcctttttggtttgacgcttctcccgcttctcttgccttcggcgttgacgcttctccttgcggagctggcggcgctgacgcttttgctccttcttcagctgcttccattcacgcatcaactccttaacctcacggcgcagggccttgcggtcctgtgtcatgttgactggctcgttgatctctgtggcaggggcacggcgagcctcacggatctgttgctttgcttgacgcactctttcccgtgtgatctgttgttcggggtgatggagggactccgagaggtacgtcttcatgacgggcagctgggtgtctttcaggtcgtcatagtcgggtagagagccgatggtggactcagaactgctggacgaccttgatgatgtgctcgatacagagcttgaccgggagcgacggcgctctttggaaggagactggtgtgtccttccacggtcttggccctgagcaggttggttggccggttgaacgttgccaacaccctcctcgccttcccgtccacgttgtgctggctgttctggttctgtcggaccttgcccccaacggctgttccaccatcctcctcgtcctccccgaccaaagtagtgatgttgtccacgttcgggcctctgtccgccgcaagcacctctcccaccaggaccaccccaagtccatcgaggcgggcatgacatccccggcatgattggtggaggttgaaacccacggacatcacccggaagacgacaccaacccccaggtcctcctccacgaccgtggggcccccctctgccaccaaacatattcccaggattccacccattgatgctaatcccattagtatcagccactatgcccccgatcttgagatggccagtccgaccatctaccacaaaattattcccgatgctaatcctctccccatcaactttgattccgccaaagttgaacccattgccgttattgttattgttactgttgctaggcccagcagcaccactccctccaccaaaaggactaaaccgtcccatccaccccccttgcccccgcgcctgctgctgtccctgccccgaaggagtatcaaacctctcctcccatcccccaggcatcctctcctccctctctccctcgccctcatacctaacaacaaccctcacccccctactctcccaaaacccctcattccactccctcaccatcctctccaccctctccctcctcgccccgaccccctccccatcaccatccctattaccaaccccccttatcctctccagcaagaaaacctcggcctggctcctagtatcactctcccccttctcactaccagtctcaaccccctccgccctcagtttcctatccaccacccgttcattcgtcctatccgcaaacccaggcagcagataattcagaaacgtcatccagtcctcccgcgtgatatccccattctcaccagcaccaccaccgacagtcaacctgtcgatcccagcgatggcctctacatccgtcagagctgggtcagcagcgagggtgatctcaactgttgtcgggccaccgacgaaaacacccgaatgcggccggctgtcgaagtatgcctgcgcctctgggatccgccgaggacgagaagtagcaagcggcgatgagggggcagcgacaaggtcagcagcagtgttggattgtgccgactggggagttagaggaggggtgtaaataatctcgccgtcgtaggtggtggtgtcgtccgagttggatgagttccttcgcagggttgatgtggtggtgggcggtgtcgggttggtcggagatgggccagaggacgtgttggagtatatgtctgtttctgagtatggagggggagggatgtcttcgaggggagcacgccgggatgtcatgttgctgatgattggaaggtgaggtaagatcaacaaaaaatagacaacaacctaaggtaatggaatcagaggttcaacgtccaaaagagccccaaagtggggtggacactgagataactacggatagacgcactggcttcgggcaaagagaaaaacagtcaaggcacagcaaaaaggcggggcgattaagcatttgttggtattcttgcggtgaatggacagctcgccaaaaggatgatgagagtcagattcatcaaaccagccatcatgggttgaggtgaaggatgtgtaagccagctccccgagtctccgcgcgcttcgctgccatttgccagggggccgttgcccacaagggcaccgcaagaggcttggctgacatagccccatagttcggtcccctattcgctccccgcagtcctttgttctgtgggtcccacgctcaccacaccaccactcggcctcgaagcttacgcggccctaccaggcgtcaacagtccacctagtctaggcctgtcaaagctccattgggtataataaaacgacatgtgaatggctcgattaagagccgcagccagaggccacgaagagctgtcgcgttctctgcccctctcaagatcaagaatgtgacgcacagcacacagttttctttaaacctcaccgtcgtggagagaatatcctatatcttccaccttgtaatggtcggccaaaatactagccaaatgatggcgtgtctgtggtcccctattggaaagttaacgaatcgccaaatcttaaccgaccatgcattacagcagggcaacttacaagttggtgatgtacacttccacgagtgatggtgggatgtaatcggtcacggtattttcgatatccagagcctcgacctcgggaccgtctgcatagctcacaaagctggatgggttgccgagttcactaatgacagcctcgtccgatggatcctcagggcagaacttgtagatggcaccaagaacaatgacaggcttcaaaaactctctggcagcttgagcagcaatgcaggcaccgctgtctacaagcaagccaccgttttggtaaatcaccttggcaccaaaaatgaccttgttcaccctgggaatataggccatcaacccattgctggccaagttgatggtggtaactccgtgcgagttgagcttcttcctcaatgccgcatagggcttctcaccacttcctggctcgatagggtcgatactggcaatgaagacagtaaaccgccgcctcgtggcagccttgatgagaaacctctcaaccgtcttggtgggctgataggcaagcacatactcgccagggtgaatctggatatccgcaaaactcgcaatctggtcatcggcctgctggatctcgtccatgatttcctcaatcccattgataacctcggttcgcagggcatgtacactggcaggctgggcctgagaaagtggtgttgaagctccagtcatgggtgtgtcggcagcagtggcggctgagagaatgttgaacatggacttggacacctgaaggccgcctggggcagcagtgttggagcgcataaggactggggtcggggcaggccgttgtggtggagggttggtaggggcaaggctctggatatcggatgccgaatcgctgcccaagtcgtcggcattatttctgtcctcggttgcctcgtcgcggatgaggcccagcactcggcgcacaatatttccaattactggctcgtgaggggcagctcgtgcaagtctggacccaacactctggactctgcccaagagctggtcaacatcgtgccatttcgatcgcgcaacaacctggaggagaatgtgggctgtcgcaacggcgcagtcatcgccctttacctggcggcgcttgaggagactaacaagagaggaacaaaagtcagaagagctcaaaacaccgcagcacaaggcagtcacctacaatattaaagcttcgattgaagcctcatagggctgactcttgagggacttgatcagcttgtccaagctgggggcatagtttgcctgtgatggtggcatggctttgtgtgtgtgtgaatatagacagtatcaaccgtataagccactgaggatcaaggatatgtttttgaacaagatgggtgaccccgcggttcgtgctgggaaatcgcggaagctcgaaaacggcaggtatggtgtttctcgttgtctgtctctttgcggtgtagaatatgggctgatcaattgttttgctgaagtctctttgtcaaatcacttgtcttaactgactgggaatttggcttttgcttccagaagaacagaatgagtcaatgtgtcactgcaagctttcagccttggggaacgaaccgtggaaaattatggtggggtactttcagtgtcccgcattgaacaccccaccccgcccacctttcgctcaatccggctcatcttcggccctttgagcccccctcaacaccgacctttttctcatgatggtccgagcgcctacaccgcttggcatcggggcacgggcctcgacactgccgctagcgccagaaattcttggagctggcggaacgggcatacaattggcctacaaaatttctggctcgcctttgcatctgaaaatctgcaagtctcgactcgtctggcgcaaaggtggcagcactatatttgttgattccccctcttaatcgactcaattgcttgtattatcccgactattcggtaatcatatctcttatttcaccccgcccgtcttcgattttcacgcgccgagctcagaaagtcgccaaaatgaccaccaaggaagtcgtcgacattgttgacaagaaggagaagaaggagaaaaagagcaaggacaagtctgagaagaaaaaggaaaagcgctctgattctgccggtgtcactaaggagaagaaagacaagaaaaaggacaaggccaagcaggagaagcttgcccgcgccgccgaggcccatcttaatgctgaggccgctgctgcgaaggtggacagcgacgtcgaggtcgatccggaggatcttatcaagcctgccgaggagcttgtcccattcgccttccccctggccgatgacaagactcacaagaagatttacaagctcattaagaagggtgcgtgcacagcaattgcctccaatcgactcgcttttgcgcagaccgatgctaatctgtttttttcctctaggcgcgaaagtaaagtccatccatcgcggtgttaaggagtgcgagaaagctatcaagaagacacctgcgaagacccccgcgactgcccctagcgacgcccccggccttgtcatcattgccggcgacatctctcctatggatgtcatcatgcacttccccctcctctgcgaggagcacaatgttccctacttgttcatcaagtcccgcgccgacctcggtgttgccgcttgcaccaagcgcgccaccagtgttgtcatgttgaagccttcaggcaagaaggctggcaaagacaccgagatgaccgacgctgataagaagtcgtcggctgaggagtacctcgagtcctacaaggaggtcctgaggattgctcaaaaggagtgggatgcccaggttcagccgtgggtcaagggcacccactctaagcaaatcgcctaccgccaggccaacaagcagcagtaaatcggcgctgcctgagctccctgttgctgtttgacttcaaggcagcacgttttcttgctacattctcagcaaccagcatgatatacccatacggatacccagctccccttacttgtcacgcgactctacctcggcatcgtttgttgggcatgtcagaagcagggttatcctcctctcgatctctccgtctcttcagtcttccctttgcatcaagtttcttcgacaacatgagcaaactgcgtattcacactattaatattgcaagagcttatcgttcagtctttggaacagcatcaatggggaataccatgaggggcttcaatgagagaatatcagaaccagaggatattttctttctttctctgaacatcaatttgaagcatcttgtcattttctcgatggcatggtagtcgttgatttggcttccattgggtgtcaaacaaaaaaggccggcgttcaggggacatactggggggttttgttcattgttttcttttttcggcatttgttgaagtacaaaacaaaagggaatgggggttagcggttagctttcagcctttttgtagggtgtataaaatatcacaaacaccggatggtgttttatattcaattttgttcattttgcttttgtgtgctccgacgagaatgatagacaccgtcgacagaagtacccatcaacatttgtccacctagaatccaacgcagactcccgtcgtcctattccgaagcaacctgcaacacggcagaccatcgccaatctatcagcacaagagatataccacccatcccaaacttacagaccacaacaccagcaagcctggcatcaggtactcactcccatcaacttcatgagcattcaactaacaactcatgaacagaaaaacaaaacaacgtcccacacatcccaatgtcacaccttcaccttaaccacctaaccacctaactctctatcaactcctcgttacagacaaacacagcaacccaacaccgctcgggaaaattgccctcactaaatcaaccccatgcagagatgaacccatgagccccctcatcaacaacacttgacacaacaacacttgacacagacagactcaagattcaacccgtctgtttcaatgacgatacccccttgacagcccagcttggcaggttgaaaaacacaccaacaactaccgagaacaccgtgacacgaggatttatcacagcagcccgtgctgggcctcctgtgccaatagaaccgcgaatatcccctgtcttgttcgcgtttgctcggataggtgataacgagtactgtcgattccactttctagaaacgagggtgctctctcatgtgtgtttggtggtttactgagattccagccatgtttcaagttcgtcggctgagaaaagccttacgtgtttagcatggggatgttgttgggagccagagaattagtaattttcatgatcaccacggcaccgaatagttcacatcctcttcgcatattcagcaacgcgcacaacagcagtgagtctacctcaaatcccattccatggatgctaatatcataaaagtacacaaaaacaaaagaaaaaagcatcacacactaaagcgccttaatcttttgaatttcctcctctccctcctccaagatcactctatcccgagtcgaggttcattaatcatctatctttcctcctcccattgcccatcatctccatttactccgcccggaaagagttacggctcaatggggtgccaccggagccgaaggggatagtgcgggtgccccaccaagaaaggaagacggaaagaccgacagtctcgaagagcttagcgagcacattgaggccaacctggtcaaaggcgcggtgctcgacgacaagctgggagataaagccgggggcgctggtggcggcgaagatgagagcaccgaggtaggcggcgcccttgtaggagagagtgcctgtggcgttgatcagggcaccgacaccgtaggactggagggcagagccgacgagggcggaaccccaggcagcggcggcagaagaggcttcccgagacttgaggaactcctccttggtgttggcagacttggccttttgccaggtcttgccgaagaggggggagaggacgccgagctcgaaggtgtggttgaagacggtgccgagggcgatggcggaaggcttaacagcggggaggtctgtgatggcattgttagttttggggtttcattattgactatttgtgtcctgatccctcggtgcaaccattgaaaatcctcttcgccagactgacagatactcaatggttttttccattcccagcgtctggtcgagaaccggccgagtcgacgaggaagaagtcgcattgatgacaccgggtcggatacatggacgactaacaatgcggggaaatggcgtcacttacactgaagagacatgtttgcggttgtgaagtgtgagagagttgtgttaactgtttggatagtgttgaggaagtggttagtgtatcgtgagaggactattcgtcaaagctggatggattgtttgtttggtttgatgaggaaagaaagcaaaaagtcaggtcagcagacggcgggaaagacggtttattataacacaaaactctgaagagtgggcaggaacctggatcgcctttgtgcgtcacgatttcccagcctgcaagtgacccagtcccccagtccagtcccgtacccgggccaggttaattggaaacggacggggccctccacctccccagtgactggccggggtaccaagctgtaaggcgtacgtacccccttttgctacctcatacatcatcgcagcgtagctccccgccttgagaagcgcttcccaaagtcagcagtgggagagcaggcctttgatgctgctgtgctatgacgtcaccaccttttgcgcctgtcaaattccgatgcgacccttggcttgggccccactttccgcaacctcccagaccacattctccgcttttggactcttgattcggatagccccatggccttgaaaggccatcttccatcagctcattcttcctctcaaacagcaattggtgtttgcctcggtgtccacttgtgatgctaatatcaagattcagctgctggagacttctacgctttacgaaacgtgttgtctgaaccaaggcggaagagccgttagagacatgggctatgttaataagtgagcacgccagttcctgtgtgacgtatgcagctccccctctgggatcttcgattctttgattcaatgccgaagaaaacaacgcatgttcgatctgcttccgttcctgaaacccgagacatcctggctgctcgccatatagccaaagctgggtgggcttgacggcctcggcgaggtgtgatacccctgagttcgataacatctggtccagacactttggaatgacaggaccctgtggtcgatccaagcttactatcatggctatagcctcttctctgtctacactgggtctcaagtaaacaaaacatatcttcaagaggactcatcatgaagttgaaagtatgttaataaaccatgtataaacaagagttaaatgtagtatgtgtaatgcaatacaatgcagctgatgccttcattttgtcctcttatcctcttcccccttcacccaagccagattcgttgagcactgcttttttttctcccctcccatcatgcaaaacattacctttcgctcccctctttaattttataagaagcccccttcaaccctctcaaaaagaaaaaatgggtacaagatgaaacgaaccaaaaaaaaacaacagaaaaaaacttcaaataattatcaaaacaatatttcccagcccctaagaccgccccccccccccccccttttcccgcaaaccgnnnnnnnnnnnnnnnnnnnnnnnnnnnnnnnnnnnnnnnnnnnnnnnnnnnnnnnnnnnnnnnnnnnnnnnnnnnnnnnnnnnnnnnnnnnnnnnnnnnnnnnnnnnnnnnnnnnnnnnnnnnnnnnnnnnnnnnnnnnnnnnnnnnnnngaatctagattttttgtcccctctatttcctacctcatcttcccgtggatcgtactttctccgttggtacatgtagtctatttgcccccttccccgccaacccgacctgacacctcccttcatttcattcacgtcctaaaaaaacacacgtccaatgcatactacacataaaagttccacagacagaagcatcaagccatatgctgcccatcctctccccctctcagcgccagcaacgccctcacgtcgctcacgtattgcatcccctccagaaatggtatcaaatacatcaggtcggaatccgtcgggtcgctgatccagccttgtatcgggattgcgttgtctagttttgtcatgtcagcacatctcctgatatcaagtatttaaaagggatatactcaccctgatgaaacatataactcaaggggctgttgtccaaaatcatcacccggctcaaatccggctcaacactgctcagatccttgataaacgccccatgcctaaacgtgcagtgctgccggtagtacctcgcgctgaaatacttcctgtccgcctccagccagtcaatcactgggtcggcatattcttgaaccgaagcggtaaacacaaccaggttataccacttgctcactctcctcaagaactcgtcacagtgagggcgcttgtggacataatacagaatcgggtgctggggaccaatcgagttttggccgccgactccgacatacgtagtgttgagccggacttcgaccatgtgaccagacgacatgcgcccgcctttggacatggaatgaatcagagtttcgtcgaggtcgagaatgagggtcttttggtgttcggtgccgccggggatgacgtcgccggtgttgatataggatggttgccggcgggggatcaggggacggggagggccgggggtcttcgggtacttggtgagggcagccacaggcgaggtgggggacttgaggtgcgccgagatatctccagatccgtcaccgcctccgggcgctgaacctgcgcgtgcgacgctgctggcggattgtcctttgcggtgcttgcgctgtcggagggactcctcggcgtggagcttgattcggatagaccgtcgggccggggcgatctcttcggtgtcctgcagtgatttcgagcgcaggtggtgttttccactcacactgtcccgccgactgccgccctgccttttacgctctgggtccgactcggactcggaagataaacctgaagatgacgaactactcgaccgcggtatacgccctgccctgcttccacctcgacttgacctactgccgctgctcttttcaatattctcgtgataatccatcgctagcgcctttgcatctccaccgtaaatcccaaagagtttctttagttgttgtaaaggcgcaaagtcaccgctttcgctataaagacaggcgatcaggtacacgccaggtgcggtgagggtgtgaagtatccatcgtagcgagttcacaaaggcgtttgcaatgcgctttggatagaggacccagggcgagcctctcgggcttatcaccttgggggtttcgtgtttgggtggtataaggggcgtcttttcgtcgatcgcatagaggtcttcgcgcttttcgagagatcctgggttttctactgggaattcttcgggctcggccgtcaagttctgcttctcgccgagatcggccagcgcgttctcggtctggctgtcccttaatttcgaggcttcgtccgagctcaacgccagacctatcgtgctcagggagttggatctcgtcggaccaggactcggtggtggagagactcgtgacgagatgatgttgagagagttcatcttgccgccgacatggagaaggccatgaagaaaggaagggatgcggaaccgcgccaagctggtgaggctttgcgattaaggtttttggggataggggtgtggtgtaggtaatacgtagtgttcgctccagaggtccagccgaagggaggacaaattctagatgcgcacgcgtgaaagcgaggccggtgaccgaataggtaactccagtcaatgcgctcagcacaagcctttgcgattgtggtcggccgttgctggagtcttcgagaccgatgtctggtgagggaggaaacgagtcggggaagatgatgatatgccgagaaaaggcttgaacgacgggacctagggcgcgggttgtcggggttgacggacggcaaagaccggggctgctatgaatcgaaggtcaaaaagaacggatggtgcagtcacctaagttggccgctgtcgacagcctcggcaccgtgtcaggacttgttggagcccgatcgagatgctctggcagccttcttctccccaaagcaacgctggaaccgggaattcagaaagaaaaaagagtaccgagttgacaagaggtgccgtgtcttttcgcatcactttgatagccaacgggacaagagatctcagaggtcggcaatgtcattcggcgctgcagtgcactgctgccactagcacatggcgctagcgcgaccttcaactgcctttcagcaaacgggcccaggcgcgggctcaacaaaagcctccctgtcataaacgcagacgccttcacgtgccactgccactgccaggtcaagtcaaaccatgcatcatcgtatatgtacataatattggcagggaagctgtagtagtttccccaaagtagtgtcagatggccaagatgcatcgaggtccaagtttctggctcaagcaagctcttgatagacagcaaactgttttggggaatgtgtaaggacaagcttgtcatctccactggttcgcagccgaagtgggaactcgagtgcaacgtttcttaccgagaacctatgagggcactgttgtttctcagcattttctggacattgctggcttatggtatttgttgagggcagcatattgaagtgtggttgaattccacgtggctggccactgtctacatgttgccaggcttgttcgtggagatgttgacggaaaggaagtaacagccacttgtcagccatgtagctgaaagaacccgggcctcgaagctctcaatgcagtgatgtaaaactgacagtgcactgaattccttggtacagaacgcaaaggactgtcatctcgaaaccaaaagtgagttctaccctcgactccaattcatgaccaccgggttagttgatatacaggttcctctattctatcacacgttctcccctggcccacttcttcatcccatctaatctgatttactcctcctcagaggcgaactcagcacggccagccttcgagttgaggtactcattcctgcacatccattagtcattgtcggctcgagttgaagctgtccatgaaagccataccgctcgatagcccagttcatgatgtagtatccggcaatcataggaggggcccagtagacgacctgggtgctgaaccgtctccaggtgttgaagatggcgtcgtggaaagcaccggcgaggggcttttggcggttaggggcgataccgtaagagacaatgcccttctgcttcatgccacctgttgaaaattccgagtcagaccaggtccaagctgttttccaaagtgttccgttcacagagtgccccccagtaatcgtttgtcgtttattgccggccattccatttccatatcattattttccggcatcccgaacatcccaatccagattcttccaagttcctccgggaatcgtatcgtcgcggtttcactcaccaaagttaccccagttaccgaggaagctataaacatgtcagcagccgctcccagaggtgtttggctggcgcatcgagggtgggctcggcgaggggtcgaggggggaaaaggcgcatcatggcctggattgcaccggtttgggcgcactcacttgttgtggcggccgatgggggcattgctgccaccgccgagacggacctgtgtaggctgcattttgaattgagggtgtatcgagacgggcgcgtgggcgagagtcaatcgaaatcgtagtcgacgcaagcgaagttcggaatagcacgcggcagctcgaagttgaaatcagtcgacagaagccgagaagcaaatccccaaagcggcttagcgcccagttgcggtacgtaacctgaaaaaagctcgcccgtgccgacccccccggatgcgcccgggccacctctcaacgacgaacatttggaaagtgggctgcccgcagagcttcatgtccccacttcagtagaagctccatccattcccatcgccatcaccatcgcaaaggaatcccaccgacacagtcgaggtcaacagcgcctctctacacacaatggccgccagaggtctcggtttcatttatgcggctgcgctccccgcagtggtcggcgcaagctttctccagtcggccctctacgatgtcaagggcggtaccagagctgttattttcgacaggatgtccggtgtaaaggagcaggtcgttagcgaaggcacacatttcctcattccctggctgcaaaaggccatcatcttcgatgtacggacaaagcctcgcatcatcggcaccaccaccggctccaaggatttgcaaatggtcagcttgacgctcagagtactccacaggcccgatgttcaggctctccccaagatctaccaggttcgtctttgcacatatatatcagagtacttgttgggctagacgctgacgttttttcatgtagcaactcggccaagattatgatgagcgtgtgctcccctccatcggtaacgaagtcctcaagtctatcgttgcccagttcgatgccgccgagctcatcacccagcgtgaggctgtctccaaccggatccggaccgaccttatgaagcgtgcccgcgagttcaacattgctctcgaggatgtgtccatcactcacatgacgttcggcaaggagttcaccaaggccgtcgagcagaagcagattgcgcagcaggatgccgagagggcgcgcttcatcgttgagcgggccgagcaggagcgccaggccaatgttattcgtgccgagggtgaagccgagagtgctgaggctatcagcaaggcgattgccaaggccggcgatggtcttatccaagtgcgcaaaatcgaggccagcagagagattgcgcagacactggcttccaaccccaatgtggcctatcttccaggcggtggcaagggcacgaacctgttgatgaacgttgggcgggcgtagggaaagatttaaaagggggtgatcatgaaaaggccgaggataatacaacaaaggctgtgtatactatgtggactgtgtggattgtatggatatatccccctctcggaatgtcatgagaatgagcacttgattcaaccaaacttggttaccttgtgcattctcaacatgtctagacttcagtgcccactatcgcgctgcttgatgggttataagagagtcagtcctgtttaaaaatcaacctctcaaatctaggtaggtaaacattggatgtcttggttacacagcatgaacgatgatagtggtggactggcagtgggtctgcagggggtttttacactagcacgccagcgcgtgcttcagttggatccagccttaccatgtcttggcgcgccccattccaggttcacgactgccgaaacttgggacctgcgacctggacttgcctgggctgttccgtgaacaaagacatgatcaaaatttgaccttctaataatttctagtttgatttttcactttcattttggtaatcagtctgtactcttgctctgcgatttgcaggattgcgcattcagttgagaatcctacttttttggacacgggtcacaacatcataccagtggaagccatatcttacctgccattgagtctcatcttggagattcctcatcacttcgatcgcatcaatagtcaaaggcaatctcgcattcccatgacagcaaggcctttcgtgagcccgtcattccgctcctgcctgggcgcaatcggttgctcctctggtgttgctcgtccgccgtttcggaaaccggtctcacttgcgcccgtctattcgatacgccatcggcgaggagcagccacaggaccacaacattgactcgaagctccgattgtgggtacacccactcttattatgaccacttttgctgacggtgaatagatctctagaggtcgtcacccatctacttacgtgcgcgagacagagccacctggagctatggaggccatggaggcagtccttcgcaacttcaagcagattccctgccccgacggcgaccagtgtaccacgccttcgtgtcagtggcagcacagttgggataggaatcctccagcggcctcttcatcgacatcacctgcgcccgtcacgaagcaagacgagactttagctcaggacccggatggcccgcggaaacgacgtaggacctcgtccgaagctgggtccgcgactgctattaccactgctacaggagctgtctctcctcccccgctcaagcgcaaagcacctgagcactcgactttgcccgctccggccagcaaggtacaaaggccggttgccactgctcccgcatccttgacaactccctccagagcaactgcttcgatcagcgctagccccagcactgtatcgaagcaaagcgccgccaaacagatcacagccccaaagcaacaagccacaccacgcaaaccagagacgctcaacccgcgccatctcacctcggctgccccagcctcccatgagttccggttcaaggccctcaagatgcttcatgagcagttcaagcgactcaacgatgaagtaaaaaaggacgtcaaagaagacgaacagaaacttgtcctcacagaacaagaactcatctggttggccctggatgtcgagcagaagatggccacagagaagcccgtcatctataccaacgtcatcaagaacgagatcatggcgtacaggaagaagacccccggtcggtggagagacgagcgacttgccgagtggcagaagaggaacgagcccaagaccccggtcaagaagttgagacttggcccgcccaaggaggtcaagacaggtctgactccccaggaagaggtcagtttcctcgtccaccttctcacccccatcaccgagcttgccgaacatggttatgtcgtcagaccacctacctacgaggaaatcagaagagcccgtgagggcgaaaaggcgtccttgggatgggaggtatgtgaccgctgtaccacaagattccaagtgtttcctggaagacgagaggaagatggtgccctcacctcaggtgggacctgcacccatcacagcggtcgagcgtacttccccgagcgagtcccgggcaccgtcgaccgaccgccgaagcgataccgctgttgccaggaaacagtgggtgaatccactggctgcaccgtcggaagtacccatgtcttcaaagcctctgctccgtctcgactggctgcgttgatgcccttcatggagacaccgcccaatccgtcggtacccaaggatcgcgctgtttgctttgactgcgagatgggctacactgcccgcggactggagctgatccggctgacagccaccagttggccagatggcaaggagctgctcgacgtgattgtccgccccattggtgaggttctcgacctcaactcgcgctactctggtgtttggccccaggacattgccaacgccgaggagtggtcgccaggcaagcctcttactactgttgtcgagtcttcggataccggtcgtaccaagaagaagcacatgacaattgttccttcccccatggtggcacgtgacttgctcttttcgttgatctgccccgagactccgcttattgggcacgctctggagaacgacttgaacgcggttcgcattgttcaccctaccatcatcgacacggcgctcctttttcctcacaggcgcggcttacccatgcgatatagtttgaagatgcttatggagacagagctcaacaaggccatccaggtggacaccaaggagaaccggggtcacgacagcggcgaggatgccagggccgctggagagctcgtcaggctgaaagtcatggagaagtgggaccagatgaagggagagggttggatggtggttgatggggcttttgtgccacctgggtggggcaagacaaatatcaagggaggagctttgagtgaaagattcctggagaagaaggaggaaggggagttgggggaggaagacgaggtagagccggtggtgttggatggcagtggcacaggaggcaagctttactctctttaggattggggaaggccgttggtcttgatcacagtggtcttgatcactatcacaggtcgcacgggagtgacatttgttcggagaggtcgcagcttggttcagagcattgctggctttatcaggaggcactggtgataacaaggacatgcttttttcagagcgctagatgagcaagcgattaattcacattgctgtttctcggcctagcattggtgtattgactgtttgtaggattcatcattcattgccgtgttcatcacccgttctccaaaagcatgcttgttatttttagggtccaggggtccattttctccacggtttgattctcgagatcggacttgggtgacgtcaggatccattctctcggcacctcaatgacggaacaaaggcgtgaagtaacgagtcgggtggtctcgcgggacgaaggacggccccggattcatcgtgagctttgatatcgaggaggggagattgcgatagggattaggtaaaatgtcgtcggcttggggttcggggaaagatggagttgggacaaggttgggttatcttggcgatcggggaaaggaagtggattcagctggagggcgtcatgatataagtagatgcggcgattctaaggtggtgggatgtccgctcatatcgatttgaatcgagggtttgtctgttatttacgctcttggtttgcaaagaagctattcagtgtttgtatcctcggccccgaagcggtaaaaggaggcgaatataaactttgaaggccggcatacctactacccagagaagagtcaaacagggaagatccagatatttggggtaacggtcagtgagatttgagatgaggatctgggctcatgaactgtatgcttaccctgtctttgtagacttgcttcaaggtgaagcaccttctcagtcaccgcagtccgaagtcgtcaaacaaacatcaacacaaatcaccctcacaatgtcagacggaacaaaagtcgtcgactcagacagaggtattttccttcccaggtatccctgagtatcactcactcagtcgctaacgatgccctcagtctacacaaccctcataacctccctctcctacctccccggcctcctcaccctccaccactccctcgtccaccgctccaaatcaaaataccccctcatagccctctacacctcttccttcccccagtcgggcctcgccatcctccgccgccgcaacatcccctgtcagctcataacccccttattcccctcttcttcttcttcctcaaacaccccctcctactcccacgacccccgatttaaggaatgcttcaccaagctcatccccttctccctcgtgcagtacaaaaagatcatccagctcgactcggacatgctggtcctgcgaaacatcgactcgctattcgacattgaactcgacagcgacaagagggtgtttgccgcgagccacgcgtgcttgtgcaacccttgtcagtttgagcactacccggattatttccgccccgaaaactgctattacaccgacccgaccagcatggggaaggactaccttaatggagggctgcaggttgtgaggcctgatttgggggtgtatgaggagattgtggggtatatgaacacgccggggattgatctcagttttgctgaccagagcgttcttgctggatgttttagagacagatgggtgggtttggggtgggagtttaacgcgctcaagacgatgaggtggaggggggtgcacgatgatgtttggggggatggggaggtgaggaatgtgcattacatcttgacgccgaagccgtgggaggaggagagggatgagaagggtagggtggtcatgggggaggggaaaaggggggcgggggacaaggttacgagtcaatggtgggttgatgttgatgatgagaggagggagcgggaggaggagagagggataagggatgggtggtgaggggatagatatctgcttttgggaggcttgtattgttttgtgtttggggggttgataggtgctggtaacgggctcggttgccgtttcgtaaggcgcatggagcctcatcaatgctttcttcaacacttaataactatcaagcatggcaactaggagtcaaactgatggtgatagttctcttactgcagccttcatcatttaccaccagggaatctgctgtccagactgtcgtatcacgacgtagcggtaaagataccaatagacccctgactaacacgacagctcaggtcccacagtggcttgactagaggcttttgcccctgcaacattacaatgaagatcgaaatagtctcgtgccaccgcttctcggcctcgagctagacatgtcatataagccacacgatcctctttgttgttcttctagtttgtagcaactttgaaaaataactcggcacataattttttctatacttttgaaaccccgctatgacacagactgagcttcatattcttgatatatggatatctgtgagggaacactccatttgaagagcatcgtgtcaaagtgggtttttccatccgagtgtcaactcccagagctgcagcgtggaaagagcaactcaaagctttctacccacctgccttgaaatattcagaagctcgtcaagtctcacaaggaaggcgccacgaaacccacttgtctcgtgaggcaagaatcacgtccaaactggaaagagccactccaggaggaaagagccactccaggacaggaggaaggagcgaccccaaacacatcaccatctttatcaccccaagcccctatcccgttcagcagtcccaaacatgcagtccatctctacgctcctcctcatcttgctaccagcaaccgcacttgcctcctcaatgggttatccacccgaaattggcatcaacaattgtcaatacgactgcttctgtcacgctgatcagtcgccgttatgttgtgctggtgttgtcgggggtgtgactgatgtgagtggtgtaagctctttcctttcccccgtttattctcaggcgtacccaaaacaactactgacgaacaggatggtgggtacaaaagcactgcactgaaatgtcactcggcgatgctcagagctttgttcagtgctgtgacaccacttattcgtgtcggcagaggatgggatgtcctgagtttggcgaggttgatggtggctgggggaaaggggggatgaatggcgaggttgacttgaggtgaggagggagatggagagggggtggtaaaggtgtaaagtggtaatgtgttaatatggcaatgtgttaaaggggtacagtggtaatgtgttgaagaggtaaagtgggaatgtgttaaaggacacgagcctcaacatcaagcaaacgtatccacatatacctaccttcccatttgtgattaccatgcttaaagtgattaccaagcttaaagtgattaccatgcttaaagtgatatatgcgttttttccaaccatggtcacattgtcaaaagaaagagatagcttggaacaccgcacattacgtaccttggtggacggaggagaggcaaactacaaagctattcggacacagagggcagaccttctaaagatcatctacctaagtaaggattcatccctctgccccctttcaacatctcccctttgccccccatgacgtctatgctggcatggaagataggctacccgagactcacatgacatcccatacgggtctcaacaagtctcacaattgcgagagtatggtgtcatttcccctgatacccctctcttcctcgaggcagtctcgggttcattgttcaggttgccacattccatctaccggagcatgtccgcaaactcattcttgtgatgggcccagcctcactcgaagagggggtttcatgatgagacttttacatgttgattttgccctcagactattgttcctgttggcaacttatgctgtgggtgaggtatgtagacgtgtagtagcgtcaaacagattggaaaagggggtaaagtcaacaaagcggttgtctacgctgtaaactcttcttctatatttctgttcctgtagcagattgaaacaaccttgcccattttttggaggctgtgcctttggttcaacgtaaaagttttcttttggttggtgcgagcaatgcacttctcttactcccttgcttcaactgtagctcccagctcggcgtaacgcccagcagggtccaaacatgtgcatgaagacctttttctctgggtttgcctgctcccttactttgaggtccatgttagtgtacctacctagtggatgtgcttcactgctcatgtcacaatcataacaatttcggcatataatcggcctttatgcatgtgatgtgacaacttgagtgcatgcgggtgtagtgcctctgtgggcaatagctatgccgtgagacaatacctgcatatgtcacctttccatcatgtatgagaaggggggtggtgtgtattcacttagtgatcgcattgagttgtgcctctgatgtgccgttaggcataagagcatgagttcattcaatcttacgtgatcatcaacacgggtttgttgttgttgtggtggtgtcgttgaaggaggctgagcgatgttgcagcgagttgaagaaagattgataaaggatacctggcaggagaacccaatgatcgtccctaccacagcactagcgtgagatgccaggaccgggttggatccaatggacaatggggagatgcaaccgtgaccctgaatgcacttacaacggaacggagtttggggggggggatcggaccattcaaaccactcggacgaattgacagatttcggtcgggtcgaccggaattgagagacaattgtcagagctcctttccggccggggaatacaaagagctttttaccaaagcagagctgcagcgagcttgccgcgggataggcaagacagacagacagacagcgacatggctgctttttccacatgtggatttgtgggggaaggagagccaatgatcgacgggatattaaaccattctttctttttgttttcgttattcatcacgaagagtttttattttctttttttatttctttacattactctgtacaagatccctatcgtattggtaaggagccaagaataaaaagaaaacaaagcccgaccgtgaagaaaaagcgttgcggttttggtgggcaggggttcaagggttcgttattgagccttttgacaagaactagtcggattttttcagttgatcaaaagaaggagaaaatggctcgtgctggcgccgatggagtgctgcggtgagaacttgaaaaaggcttgaccggtggactggcaaggggcagaagcgacggtgacgcgtgttgaggaggggaaccctgaagatctcccaataaaagttggcttgtgcgcttcagaccaaccccgaggaaaagaaagacacacgggaacggggcataaactggtaatttttttttctttttcggattacacggtcatgtgccggtaattctgcttctttgtcctcaacaagagatgagatgggagtgcggacacggagattggcggcggtttgttttgttttgggtttatttgagccacaagagagaggtaaacaaaacaaagaacattctgtgcaatcaacaatatacccaaccctgggccatggcatagtgtcatgttcctgaattatgtcaatcatgacagtttcggcttttggcaaaggtggcgagagtggtggcagtggcggaggccgatctgtcagttggtgtattgcaaaagtcaatattgacatcaggggtgtgtgttgaggcatgtaatggccctcccaaggtggccagaagagtgagaaccctatctttttttgggctctttggaggcacaacagaggcttttgtcctacccagtggctatctttggcatgtgatggcggcagacacagaagctgcattctctttcagccaactcttttcttgctgagagggtgaaaggcaaactccccttgctctccccttgcaggttgcatggtggtatcaaaacggtcggctgtccaaagcggtgtgagtctatctggcatagctatctccacaccatctgtcatggcccctgtctgctcaagggtagatttacagaccatcggactccttccgtttccaggcacctctttaaacaggccgtgtgtttttctgtccctgcttgcaggttataagctatgtatgaccttagtcaggcgcgactcgggggtagcgctggcgtgaggcggttcggggtggtgcaagtttgaagtgacgtcttttgacgaacgggaagaaccacgccaccgtctgggccgcccgagtgggccacaaaggacgctaaggccaggcacgaccagggcccctgcccaacgcggctggctttccagacgcgagaaaacacgttcccagagtcactccaagtaaacaaagtcctatcttttatcgccccgtgatcagcctgcagagaagcagaaggggcagagaggaagaagatctcctgtctatagttgacgcaaaagattggcctccgtgcctccccagattcaagcatattgcgtcaaaccccaccaagccaacacccaacgcgtcccgtcgcaaaccaccaccacccaccaccacccaccaccacccaccatcgcatcctggcttgccgcaacttcttccccgcccaccgcgctcccgcttactttgcgcaaagctgatcaacctttcccgtccatgtgcctggagtgattttgaagcttgaacccagaaagaaagagccattcccaagaatcaagaggaagaagagaaagaagaaggaggaattggagccaaagatgcctaaggctggcgcctgacctatctgacgtgtctggtgtccacgcgcgcttcgttttcccatttactcacaggtcccaccactcgccttttgctcctagagagcgaataccctcaacacaacacacacgcacataacacgcacacacgcacaatagtagccaatccgaatttattattctatcgtcgaccggttccgctttcaactctcgatcccctcacctctgtccgtctcgccgacgtcgtcgccgattgcccacacctcacacctggcacctctcatcgtacatttcgcctagttaaatttgagtttgcgcttgctgcgccatcgcccggaaagctgcgctgttctgaatcagcaaccctctgctcatcggtggttcgcatctcagctgtatcccgaccatctcgacgtctttgatttttgccaaagcctcccgtcttcaccacccactccgtccctgtcccgtcgccgcagcgtctggtctcttgcccaacttctacagtacgttggaggaaaataaaatagtatcaaatttgtttgtgggggtttttaaaaacaaagctgtgttggaattgcggacctagctcttgggggtagctacaaaaaaggcagcgaggcacacaccaagggccggtgatgtcgttcaccaacgattgcgggggggcactcactctgccctctcccacacatgtccaccacgacgtcagctccgcagttcgatcactccgcaggtcgctttccagatcaccatcaaaattccgactctctggcgctgtctctccttctcccactcccacaccagcagctccatccaggtcggcgcatctcgagcatccagcttccaccccaatccctgcgacaccagccgctctggcggggccttcctcacccacttctttttccgcaccccagcacggtattgcgggtaacccttttgtcaacaaaccaaacatcaagctctcggtgcgctccacgaggtcgaagccggtgactcggcccctctccagatctcgaggctcaccaaagagccctctcaagcgcgtttttgccccctctggcgactccctcaacctgcttcccacctctttctcggcgccagacacccgcggccaagaaaacaagagcttcagggagtttgcgcttgcgctgagccccacgtcgcgtcgcaatctcgagaaacccacgcgtcactcggtgcacctcgacatctcgggatccgacaaagtctcttttcctgccatctcagtaagcccgctcaaacggagcgacgcgaccatgagtctgggccagacggcatttgggagtccagtcgcaaagcgccgcagtctacacggcatctcgagcatgaacaacgagcccaccatcttcgaccaaaccccgaccgcgcgcgagtcgcaacaacagccgggcttcgacattcacgaggacgccaatctcgagtacgaattgaccggctcgaacgtgtcgcctgccccagatccattggcctcgcccaccccgtcatcgctgcagaatcggtcgaattcgctccgaagaagtaccctgcaacagcgccacggagatactcgatcatcctggggccggcgcgccggagaaaaggcacagatgacgctcgacgccgggtcgtcgatggcggctcgtagcagacctaggctatctctggaccagtatgtgcctattgtgaccgagagccccttcactcaccaaggtcctctcccacctgcctcggcgcatttcttggcgcacaaggctcgggagcagttccaacctcatcctctctcgcgctcgttgacccagtcttcttcgaactcgagtctgccagacgaatctccgacccatgctcctgtccagtttggcgagaaggctcgcgttcctctcaacttctcaaaatcgcttccacctggtgcgcgaccacccacaaaggattcaggagatgttgcgacccccaactacaagcatgccaagccgttccaagccgccttcatgtcgacaggtttggtgtccaagatgaatcgcaaccccgaacttggcccaccaaagcacctcggagcgaaggtcaacataatgccagatactccctgcaagaagcagtacagctccgctacgtatccacccaacctcagcgctggtcgacggcaatcgcgaaagtcggttggcagccctacgacgccgtttggcgcttccaccaacgctccccctaccagtggcaatttgttcttccagcaggtccgtgcggggcatatgaggaagtcgagcttgttgagcctggatggggatgacctcgctggatcccaagacgatttccccccgcccaccccgacgaagaatatcttcaagaatgtcacatcctccggggcgagcgtccggacgcctttggggacccccggctttgcgagcttcgcgacgcctgcagttcccttcagtttgagctcagcaagaacaccagcgcagtccaccaccccatccttcaccccacccggagcgcctgagagcaccactccctccttcactccccctggtgcgccatcgttcatcccttcgggtgcttctgagagcaccactcccctgtgtgctcgtcaggatcaggacaatggtcaccaggtcactgagcccatctttcgaccttccaccccttactcgagtgcctcgccgtttgtatccgtcagcaacagtgctccggttatcaacgaaagccatacccctgccagtttattcgcgacgcccgctccgagaaacaagacgacgcccgtattcttcgcaacaggcagcaagtcatcgtccaacgagtatctcgtccccaaccaggatgcctcagggagccctctcgggtcgaaaaaagcttcacctcgcacccccggcgactcgttgaaaaattccatgccgcctcccggagggaaatcaaccgggcctcctgccaccccctctactcacgagcggtcttcactcttcggcggggctcctgaccgtcgcatgagcatcacccctcgcaacgggcgtggtccgggtgacgttgacgagtctctggtcagccggtttgtcaaatccgaggtcatcggtagtggcgagttctcgacggtgtatcgggttaccaagcttgcctctcccgcgtcgtcgttcatgacaatgggcatctctacaaccccacagacaccttcgagccccgagtctggcaaagtctttgccgtcaagaagctccgtgttcccatcagtggtggcagggagagggagaggaagtatcaagaggtgcatatcttgagatctctgaaccactcgaccaaggttgttcagtacattgacagttgggagtggaacaactatttgtatattcaaaccgagtactgtaccgagggcagtttggatatcttcctcaaggacattggtcagactggccgattggatgatttccgcatctggaagatcttgctggagatagctcaggtaagagaactgcatcctttttatgctagtcgtctgtaggtcactaactttggtgtagggtttggccgctattcatgaggccgggttcattcacctcgacatcaagcctgccaacatcctggtcacgtttgacggctatctcaagattgccgactttggcatggccacaacgagccctgccccgccgggaatcgaaggcgagggcgatcgcgagtacatcggcccagaaattcttcgtggtcgatatgagcagcctgccgacatctttgcgctcggtctcatcattctggagatcgcatgcaatgtattccttcccgacaacggcccaacatggcaggctcttcgcattgccgacctgtctgctgttcccagtcttacatcccctgaagctggctctgtcattcgggacgcaaacggcgtgccgattgagcatctgtcacctgttcaggaggatcaacgagaccccaacttcgcctttgaaggcatgacccacgaccccaagaaccttttcagtccaacaaagcggactgagttgtcggagcctccctcgttcatgatggacagcgaagaccctcattctcttgacaagattgtcgcttggatgatccagccagaacccaacagtcgccctactgcccagcagatccttgcttcggagcccgtctcctgggtagagagccgccgcagcgggggcgccactgtttatgaaggcaactggggcccccaagtcggaccctccatcgaggagctgatcgatgacgacgacacagagatgaccgacgtgtgaaagtacttgaaattctcaccgatcttggagccatcaatttaagctctctgtctctatatcgctcaccagctggatacggcgccaccttgacgtggcatggccaggagcatatgtgtgtgtaaacaataacagaattggtcagctaggcagagctggatatccgatcgatgatggatgggatatcggaaccatttggactccgctactacggagcatgtacgcgtattgttggggatatcagttgcttcgctcaagcgttcggcaatcgggcgacattcttatcgccactttttttatttaacaactacgccttgcgcggccactcgtttaacgacaaacgtcaattttccttgtacactcaaacaacaagaaatcacaaaatcatccaaaacaaaaaaagatcgacaagactcattcatcggagttttctggctttaccgggaaaaaagcatcacggtagctgcggatagttcagcaccgattaggggagcggcgtagcaccatcatttgggttcctttcgcatggaagggtgtcatctatacctacttgactttgggggcgtaccggagcgaggaataggcgtttgatttgctcacatgtgcattatctggcggaacctcattgctgggaacacattacatttctggagttcttggttttgaaagacaagtttcttacgggaagacggtcgaagtcgtggatgcgctaggagtcacttcttttttttttggctgcaaaagcatcggctctgagggacctggcttcatgaccgcttctttttcttttccgagggacatgacgatttatgtacgatgggcggactcggcacaacgggttcaacacaccacaacacattacatgtttagagattatgtactgcaagggttcttggtgcattgctggccgggttggttttttcaccaaaatatggtctggttttttttctctttctctttcttgggtggtcggcgcggtattttatacgcattcatcgggctcttcatggagaagaggggcgctaagagtgggaaatcacgatgctacgatatggaagaagaagaagaagagaaggggaacggaaacgatgaaacaggcaaccagctctgggaatttaagaagaggaggaggagggggaggagggagaagaggggggcgacaccatacctttgtagttctcttgtttggacgacctacttaataacatgtgttttttcctttgttgataacatgtttttacatagtctaggagaaagggaggaagaggcgggatgtaaaacttggtggtcttgtagcatataggcatcttggcatctcgagattaagagaggggagggtgtatactagacatcgggtgaatgggatatttctgtacaacctttttgagtcttgtgtgtgtgtcgaagttgatgttttgtgatattatccactattctcctatgaattcacctaagtatatcagaccaatgggtagactatgaaactgattgtgagtgagcaggggcggccgtcggcgacacagtaggttttggatatatgaagccagtggcacagaagacctacatttctcgccctgcccccaaatcagagcagtgcaacccacgaagatattccaagaaagtaccaacatgtagtcaatgtcttcagaactataggggttctacctcaccgaaaattaccaatcataatggtgtggctgactgaacgcagcccgttgatgtgaggcaatatcaaaacacaagaatagttgttgcttgctgactaggtacgtagattggcccgcctttcccctggcaaccatagacgcaaccgttccagggctgattatgacgatgccaaacatggacggcggggcgtaagcctatgtggaaacaggtggtcgaaacagagaagaatatggcatgcaaacagaaagcatgcctcgagtttgtcattgtcaactaactctgtagtccaacacaattgacaaaagcaacgtacctttcagactcccgaacaattgacaacggcatttgtcaaaacctgccttgtgaggatagtataagagatggcgcatcacaaaggagccaggagaatactgggacaatttctatgccacctttatggcgctctattggcaggaagtgaagggaatgctgtcgtacattatcaacgataccaacgggggcgtggaatgggaaaccactggcataactcacgaagagtgtgctggggagctgaatgaatgttttgaagcaatccgccaggagctgtccaggggtgtcatcgacataaaagaagcagtggataccaatcaaaaaaattgacgtgcccaaggaggaagatgtcaaaaagttggagaaggaaggatgatgccgaagattcagaggaggaggatatcaaagatttggaagaaggcgatgtcgataacacagaggacgagctatggaaacgcgttattccaaagtacccagacgcctttactaagggcgccttaggcttggcggaggcggcaactgtgcacgaagaaagtgcccaaaatctgacgaggaacaacatttgatcgtccaatgtgagaagcccgagggaacagtgggaaatatctctcgctgggcagttcgaggaagcccccctccagacaacctatgaaaaggctagaacgaccacagtttccgaaactcccaagtcttcatcatcccctagatgctctgggcatctcgacagttctcaacctcgcagcaaattcagagccaccgaagctttctcaattcccaaaggcgctcaaatctttcgaacactgtagaacgactttttcagctcctaaaggggcaaatcactcaagaggtgactgcaagacttcttagttttcgaaaactagccaatattggaagactttgacttctcaccccctccttttttccccgtcgttacattctctttctttttatgggttgtttgattgctgaatagaaggtgacggcgttttggtgctgccgtttgaacagttgctgttgatttttatttgctgcgatgtagacactagataatcaattggaaacacagctactatttcgatacgaccttgcttttatcacaattctgaattctgaaagccgattctcacatatatataccccttgcagcaaaacacaaacgccatggaccttctccctttttgacccaagtatgtcccacccatcatgaccctattaacccccctacacaaaaccatatccagtacaaatatcccagacatatccgtatctcaaccctatccctatcaaacgcctgataaccccttcaaaatgtcaaaaaacactgcagtctgcaaaaagaattactcaaacctcccgcccccaaacatccctcccaaagccttcttcctctcccccaccatggcccccttgaacttcttgtcctccctcctcttctccttctccgccagtgccgacaacctctcgttgcctctggcgaggtaaccaacacccgacttcttggaggcagtctgcttgatcttgataccgccgtcttcagccctgacttgctgcaggttggatgtggtgacaccggtagaagacatgcccgctgacgaggcagatagagtagacgaattggtagtggcacggcggagaaggggtgggatcttgaacgaggacgaccgatcagatgaaccagcgaacgcgagccgggtggaggaagaggtattggatgatgtgcgcttgagggagatgcggtccacgatttgaggcttgctgttctctttgttggaggaggccgatgagggatgggggccttcaccctccgagtcagagtcgagaatcgtggcggggatgacggaggaagatttgtagccaggcccgtcctcgagaaggttggagagagactccctaatctcgccgatgttggagggcttcttcttgttggtgaggcctggctttgtgcgtcttgggttggtagattgctgctgctgctgctgctcttggggttgactgtcggggatggtgactgcttcattagaggagtcgccagttgcagagttctgagagtcaagacctggagcaggaggaggaggcgcccagatgaagtccatttcgtcgtctgaaccacggtcctcgatggttttgaggaaggcttggttacgtgggttctcggcgaccttgctgatacgttcatcggcaaagagtgcacgctgcatcttggcgaattggcggcgcttcatacgacggagggcctccccgccgtcatcttcatcatcgagctcatcccagttgccagcgcgcttgcggcgcaggagaccagtagtgatgtcgtggaaaagcttattgacttgcttctcgtccgcagcacgttcacggtcactgaatacaagttagtaccaaattgacccaaagccatgagaagaaacatacgcatagaaagaagccaacttgcgctcatcctccgccttgtcagccgtctcatcatcaatcatctcttgcacagactttgcgtcctcgtcgtcagtgtcttcgccatccgcaccacccaaaccagcatactcatcctcggactcctcggcttgctcctccaccatctcacgggccttgctcttcttcttgtcaaatgcttccttcctcttgcgctccttttctttacgggcagcctccttcatggcaaaaaatgcattgttggcagaagaagcagcgtcggtctcgatgtcgtccttcataatctcatcttgatcctcgttttcagaagcagcaacttcagctctccggcgaagcttaccagtgcgccgtaccaagggagagtcggcttgactgttttggttcgcgggaagggtctccaccgtagaggcaggctcctcaataaagctccgctgaagaggagtaaaattcttgaagccagagtcttgagttggttcgatcagctctgatacctgggtagcttcaaacgtctcatcccgcaagaacgagtcaaagccgtggacctgagactgcgagaactggatttggatgccctgtgtctctgcgtcttgctcaccaggggctggctggctgttcaagacgacaccgtccgctggttcctgaacagattgtgagaactgcgaatcggggaaggcgcccatatcaaacgtaggcctgggttgggagggagaatcaggaggagccgagcctatctgactgtcgtccatggtgccctggaagatctgggtcaaacccagaccggcagggccagcaacgggaagaccaggaatgaacgtcttggtggctgagcgcaaaactgaggtcgggacgctgggggaggtatgttggcggacagagggtgacttggctagaatcttcttaggattaggcgtagccttgacaacaccctcatcggcctcgtcctcgtcatcagacagaacagcagtctgtttccacgccctgcgacgggcctgcttggagctggctgtaggaagaccatcctcgtcatctgagttgggcgcgtcaacctcctccgtctcctcatcggtagattcctcagcagcatcgtcgattaaaacaccaccatcctccatctcctcctcctcgtcctcattttcctcctcactaccagagagctcaatctccgcctcctcctcaccctcaccaatccagctctctccatcataatcactgtcatcccaatcaagtggatcctccccattctccaaccgcttctttctcctctcctccttggcatccgccctttccttggccatgatctcctcagcctctctcctcgccttggcgacaatgtcctcaacttcttgctcttccttttctctctcctcagcagtcatgacaacgatacccttggcccggagagactcaaggtgcctttcccgctcaagcttggcctgcgctttggcccgctgcatcagagtcatctgcagctcgcccaccgtcatggcaggtttctgatgctgctgaaacttttgcttggttggtaccggtcccgccttcttgtccgggtcatccagttgagccagacggcggaggttgagaagagctttgggctccttgttttggttggggttgacgcgagagagaatctgatcaatcttggagggcatttggacttggaggtcgtcgtcctcatcgtcgagagaagcagttactgtgttggctcggacagagaactgcggaaacttgacgcggagattacgctttacgcggggcatctggtgctgctctttggccttgtcttcggcctcaaactcggcggcagtgactttgcctttgcccttgtcgagtttcttgggggcagcagctgctgaggcggccatctctccgaccgtggggagctcaacgtcactgttgtcctggagtatcgtctgtggtgctggagtcgccttctccttctcgccctcgggaggtgagctaggaggtgtgttgtcctccttgcgttcagcatcactctgctgaactgaagctggggtacccgcccggctagagctgactggcgcagccttctcctttggtggttctgttgaagcagcagcgccggcaggcttgaagttgaacctctcgaacagggtggatttggtaatcctcttcttaatcttggcctcgtgcgcaagttgcaaggctctggtcatccgctgcgtttctctgttcatctcctccaatgccttcttgctagccttgcgagcggagggccgtgatttggcaccctcttgtgtgagcttgtggccaccctcgtcgtccgtaaagtcctcgggatcctcatcatccataatggcattcctttcggccttcttgcgagcctcctctgcttcccgagcaagtctttccgccctcttcttggcaaccagtgcctcgaatttcgcattcttggccagacgagaggggctagggaggtcctcatcataactgccagcttctccagagggtttcgaaggcgatacaaaaagttcttgtggcgctggactatggttctgttctggtgacggggatcgtggcgctgttgctgttggctcttgttctggtgttgcgctccgttggcgacgtgccttcaactttctaggccgcggggcgatgatctcgtattcatcttcgtcgtcatcctcggcttcttttgtcgcagcagtcttcttgggtgaagagggttttgggctgtccttctcagattctgaatcggctgtgggttctgtgtttccgcccagcattctcgcggccagtttgccccttggtcgtaaaatttccgcgtcgtcttctccttcactggtactgctgtcgcctccatagttgaggaatctgttatgggtgcgaatacgcgtggtggtagggctggcgaggggtgtcgcgctgccacttcgccttgagagggcgggagaggaagacatggcgaagtatattgccaaataaaggacgaattcggcctaagaattataagtgaaatgctgaactccaaagcataacccgataactgctcgacaagaagttcaaaatgggtcaatgggtggagaggtggtgtggtgttgtcgaggaagagcacagggtatggcggcataatacctacctatgtttaagtgccccaccacggcgcgtcgcgattgctgggaagcgcgtcagaacgcgaccactgtgagctgcaaacgggagttccgtttccactttttgatgtgtggcaccagccaccaccacccccatcaggggcttaaaacccacgttaatttttctagaattttataatttaactctttttccactagaaaaggtatccaaatatagctttttacttttgattcaactgtaaaactcctttctttatagttattatagctaaagcttagtacctgttattatttttatacgtacttttttaaaccatatttttataattgctgtaatactttctaaatttatttatattatttaaaaatatttaacttattaatcaataaattaggcttttaaacgaaatataaaatttattttataaatttttattaaatatatatttttataataattagatgtcacaaccctagggtatggacgagagtaacgattggttgtggaaccacgggagcaggggccaatcgggaaaacatctaggagagccaattacagggagggacagtaattagtacgattagagcactaatctaactgagtaggctaagccggtgtaattagtgtaattaggacactgattaggctaagcgtaagtaattagtatactcgggacactaatcaaaggaattacggctaggaaaagaagtctatatatacggaggaactagctagtatagataaacagttccgcagtatacaatttacagttatatttacggtatcttatatttatatcgagacattttattatgcactatttagctgcactgaactaattattagaaattacctttaaccagtatcccttttaaaggttttgtatagaggttcgttataaaaagggtaataccgaaagtaaactttaagttagattaagaatcttcctagcttttcttttatacttttatagcgattaggtacctcgagtttagtacgctttttttccctacgtaaggtactaatttcttagtaaagtatagtgttttcttacgtaagagtttcgtaggaaaaacgtgacttatctttaagcttttaaatataagcgagaagctagtcgatagtaaattaagtagatatctttacttaagtattaacgtttccggctatagtattaatttaatacctttaacttatttataatagagttaaagtaagtatataacgtgtaacgaacccctatatagaacctctaaaagggatactaattaaaggtaacttttaataattaatttagtgcggctaaatagtaaaatagtaagaaaacatataaattaaccacaacaccacaaatatactctcaacaggtccctaaatagacacgcctgcataacagtgactcgctcgcaggccgcacttcactcaggacagataaaagacactataggctcgcaggccacataataagcaccgggttggcttgattagagggccaggattgcctgcacgcgtgcagagcacaaaatataaagaaataaaagtcgatgtcttgtctaaaatagaatgtccgaagcagaccgcttatatatataacccctgaacccctgagtcctctgagagccccgcttccttactcatactcttaggcctgtggccgcatgtcacagttaagccaaacaggcaggacggaccgtgtgcggggcacaagacgcacagccaatcgctaacaggaccaatcaggataaggatacgcgattatagacagcagactgggaagacacagtgatcgcggcaacacaaccaatagggagccacggaggatcatagcgatcattgtgatcattgggaacgagcggaatgatcactatgatcagggcttggcacgaggtctatatatacggaggaactggctggtgtagatagacagttccgcagtatgcaattcacagcttgtattcacggtatcttgtgtttacattgagacatcttgttgtgcgctgtttagccgcaccgaaccaattgtcagaagttaccttcaactcnnnnnnnnnnnnnnnnnnnnnnnnnnnnnnnnnnnnnnnnnnnnnnnnnnnnnnnnnnnnnnnnnnnnnnnnnnnnnnnnnnnnnnnnnnnnnnnnnnnnnnnnnnnnnnnnnnnnnnnnnnnnnnnnnnnnnnnnnnnnnnnnnnnnnncttttatttatttatccggttaaaataattcttttaaattaatatacgggtaaaagtaataacgaaggaaaccgtttttaataatattttaaaagaatttaatatagtattatataaataataataaaagtttttattataaatatagtattaaaataatttgttaaaataaggtcgttaagagctctgtactatagaggtcttaggaaggggaagtaattacttaaggtcttagcgagtttcggactatactgctaaatataacgatatggttatcgaaggaagaaagtataataggaatttcctataaatatagagaaaagtatattaaaatattatagttttatataaagtattgtaaataattaatttatttaattaatttaacttattatttttctttttaaaaagaaaaaagtaagaaaattattacgattaaaaaaaggctctttataaatacctaaatttctttattatccttatcgttccctatcgctcggtaaccctagtggcttagatctctagttcggtaaggttataaagtaataagcttgctaataagacgctcgtattacttataaagcttttcgtggcttaacctcgtagccgataagatactcgtattgcttatgaggcttcttataccacggtcttattactcggaggtccggtgaggaatcctaggagtttaaaagcgctcgagcctctataagcgagccgttaagagcttaagggcgagccgctgtgggcgagccgttgggaacgcgagtgggggagctgttgggagcaatatgggcgcagaattccataaacaagtgctgtaaaatccatgaataaatgctgcattttaacatatagtattaactaggctattaaaagataagaaggaagatttataaagaaaagaggggaaacgaaaaaaatatatataatcgataaaactaagctaacgggacgttaacctaaaggaggggtattatattacggacctaatataagtagggagcgcggggcgcaactatttaactattggaacggaaaaataaagaagtcggattattattaatattaaaagtaataattaaaattattattagccttcgataaacgataagtaataattaatattattattaataataatagtaataaaccggtctatatatacggaggaattaattaatataaataaatagttccgtaatatataatttataattatatttacggtattttatatttatattaaaatattttattatatattatttagctatactaaactaattattagaagttacctttaacccgtatcccttttagaggttctatataggggttcgttacaatagtgtataataaaatattttaatataaatataaaataccgtaaatataaactataaattatatattgcggaactatttatttatattagttagttcttctgtatatatagaccggtttattactattattactagtaataatatcgattatcacttatagtttaccgaaagctagtaataatcgtgattattacccttagcactagtaataatccgacttccccacgtttccgttccagtagttggacggtcgcgccccgcgctccctacttatgtcagatccgtgacacagaagctgtattttaatatcttttttactattataattaatagtaatttaacgatattaatctattatagttatataaatacacagattttttatattaattaaaatttaataatttttaataatcaaatacttttccggagctaattattacaatcgtggatgaagagctaacgtacggggcgcgggacgctcctagctaatcattactgacttatcgaaagtggagcgacgggatcacgatgagcgtagtaaaccacaggaaggaaaggtaatccagatcacctttagggggaacgtgatccaagtgatctacgggtctatatatacggaggaactagatagctggtagatagttccgcagtatgcaatacaagtcacattcgttggtatcagactattgtgattgagacaagccattgttgtgcactgtttagctgcaccgaaccatttgtctagaagcaccttgaactgagtatccctctcagaggttctggatcggggttcgtcacatgaagtccatatcctctcgggctgtttttaattgggtatcggtcataaaatacaggcagccctagaaggtgaggaccacagccagtaacagaatattctttcgctctctctctcactctctcacacacacactcttttagtctcccatgaatgcttgccttcctctcaacccacaactacgcttttcaaccttgttcaaacaacttaccatccatcaatcctcaagcccccatgttctacaatatcaaacaggatatacaagaaaatgcagtgaagggaaaaaaaggctttaaatgcaaccccctgactccaggtataagcgcaaagcaaagataaccgctcgcatcttaccccatgtacgccaattcgccaaatgacatcgcctatgtcgctctcgccagaaagcaaacgccagccaggagtgccatccacaacatagatataatacccaccatcctaccccaaataaaccaaaaataaatgaccacaggggaatctgaaagcacaggaaacaaatgagaaaatacaagagcaatgacaagcaagtcttgcaaagtcttaccccacagccaacgtcgaatccaataccgaattcaagaaatcgccatctgccgggtcggctccctcccaccaaagatcgttgtcgatatccatggcatctggcccgtgaccatgccctcctattccatttgtaagtggtgggtctgtggttgccgtggccagggctttgctgccaccagctgctgttggtaatggtattaacgacggcattccgttcaccattgtcgtcgtgccgcccatctcgacatcctcatcgtcgatttcgcctaatatccttccaccttccttcttgatatacgtgtaagattcccaatcttccaactctccttctcggtagtcgttgacaatcgttttcactattgtcgggaagtttgccattccacagtcgcccacatccaacgccaacctcaaatctgtcattccaagaggtcctctttcgctcgcagctttggcttcgatcggcaacagcccgctcttgtccctggtcagctctcccctttggaaggcttcttcttcctttgccagttgcttcttgtatttgtgcgtctgaacccatgcaccccctggcccaaagccagcatttccagagtcgccgggtccgttgctgcgagtacgactgaatacctgcgtaagaacttcttttataaacgtgtcggtggcgatagacatgaactgggcggcttctggcgcgtggccggagacgagaccagattcatagcaaaagggcaacatgcgggcttcgatactagatacgtcagggaattcgccagactcgacggcaagaggttgggcaaagcgttttcggatctcgaggtcaaagtctacacgctgttagtgaagagtcaaataaggggtaaggaaggggtacatactcatgcgactgagaccccctgctgcgcttgctggtacctcggtggtcttggcaggtttgatgcggctctggtctgtaaatacatctgccaaggagttgaatgggtcgaactagataaatggtcagtaactccagcgtggatagccgtggtcgtaagaaggcttacatcgttttgtacaatgtccttgatcctccgcctgtctcgtgccggcaactgcatgacctccccctttaacctcctttcggcagcatcaccagacacgggcttgttgcctgccgtggtggacggcttgtcattggcactgacccagggcgcaaggccctggtcgggcatctccctcgtgacatttccatagatggcagcaatgagctggttatgtagatgttctctttgtccgtcaggggaagctaatattgggtctatgcgctcgctgaactcggcttgattgaggcggcctgtatgtaaacatggtcagcaagtttggcccggcatgtatgatgcagagccgctggcgcataccgatcaggaagtttgtgattgtttctttgtaaataacccattgttcggggccaatggtggactttaactgcgtgtatatcggctcgaggtctatgcgggcgggtataagctggctcgttttgggagtcttgtgcagcgatggggccgagacattgatggatttgttggcgagaatgggggtagagacgctgatggaaggccggctcagggcggcggggtcgatgtcgaccatggtggtgtggccagccttggagttgtagatgtacagatatggctggagcaatcctgatccggaggcgcgaaagagagaaaggagcagggttcagtttcgtcgcgcgcgaaatgcacagtggtcgcgacgtgaagcggcagtcatttgcgcatcaaaatgaaggccagactcatgcgatcgcggatccgcagtcagagtgatggacttggcatggtgtcgccttggaatggatggtgttgtcgtcggtcagccaaacttgatggtggtcaggtcctcggttgctcagtgtctgtagttgaattttgcggggcctctcagtaacagagttgcggcgggtgtagttgtaggccctggccccagtcccagggcagctttgtaccgttcttggcagcccttttacactggacgacgacccctcgtcatgtcctgtcttgtatactaggtcgcgtccaatccaccaatactcaagtcaataatgcagcactaaacatcaccaccgcctacaaaagagcttgattgcgaacggcactgggttgacattgacacaatgcaaccatgtctcacgccccgcgcaatcgaatctcgaatgcaatcgacagtctgatcacccacctggtgcctagcaacccccacgacgacgagcagacagctcaagagaggcatgatgcttgctttgagcttgtccgggccatttttgagcggtgagcatttttcatctgatactcttttggcctagacaaagctaattagaaagcaacaggcctaattctccctcgatatcggccgacgtaaaccatgcttcggacctcatcaagcggaagctcatacacagcaaccctagccaggccctacgcttctccaacctctatacccgacttttgtcactgccagtcctgaaccaaaaatgggccattttatatctcctatatcagctctctgactcgcctgatcccaatgagcctccaccaccaccaaggcagccagcagcaccacatgggttgacatcgcgggagccaagcttccgggaccgagaacttcaagcgcagatccttcgggagcaggaagagaaccaggtagaggcagagaactaccaagggccagtaccggcagagccaagtttccgagagccagcttctcgtgagccaaacttccgtgaatcagtagcacagcgggcggcgggacgagcaacaggccggtcgacggcaacagcagagtcaaaaacgtcgacacccgcaccaccactggtatcagaagaagaggctgtaaacaatgtgtttgccccaggtggtttgaaaaagctcccaaccgaaaggccacggcgaaacaccaatgccgaagaagctcgctcgcagcctggtgcggtagacggatctaccaagaagagcacaagggacgtttcaatcaagtcaaacttgctcgcagacaactcattggagtttgagccttctgagatgggtctgttgagagaccttcctttcactcttcagggattatcatcaacaactcttcccttcaccagggatactgttttgaaactgccgccaactttgccgctaccaatagtgtcactgttgcacactttggccgagccttcattattatatcgagggcttgcaaattttgtcaagtcaccagcaaaggggttactcggccagagcttgcgggcagccatcaacaatgagcttcggtcatatctcactcttgtggcaacgctggaggcgcagattcgacgggcattgtcatcccttgatgaggcagcaccacgaggcggcatcgggaaagccggtgtcacgttgaagagatgcgttgtttggacgagagaggcgaccatgggcttgcggctgatgtctttgatatcagaggagagttatagtaaacaaggcggacaactgatcagtctgattcacggcttttctacctctcatggtgaccccgtggtggctgcttttgctgaacgcttgctggccgacgtcacccggccgttttacgacattcttcggcgttggatatacgacggtgagctatcggatccccatctggagttcttcgtccgcgaacaaaaccccaacaatgagaaacaaaacgagtccaaggccaaaggccaagctagtgtgtggaactccaagtacgaagtcgtcgacgccatggtacccagtatcatgacccccgactttgcccaaaaggtctttttgattggaaagtccctcaacttcatccgccacagctgcggcgacagccagtgggtcgacgcctatagcaaaacctcgtcaaaggagctcaagtacggcgacacggccacgctcgagaagtggatcgacgacgcctacaagaccaccatgcagcgcctcatgacgctcatgaacacccgcttccgtctgtttgaccacctccaagccctgaagaactatatccttctcggccagggcgactttatcgccttgctgatggaatccctcgccgcgaacctcgaccgcccagctggcgcacaataccgccacaccctcactgcccagctcgaacacgccatccgcggctccaacgcccagtatgattccgacgaggtcctccgccgcctagacgcccgtatgcttcaactgagccacggcgatattggctgggattgtttcacgctcgaatacaaaatcgatgcccctgtcgatgtggtagtcaccgaatggggaaaccgtcagtacctcaaagtcttcaactttctctggcggatcaaacgcgtcgagtttgctctggcatccacctggagaaaatgcatgacgggcgcgaggggagtgctgcaatccaacgacgagacagtcctccagacgtggaaatccaccaggggaactctcgcggagatgatccattttgttggtcaactgcaatactacattttatttgaagtcatcgagtccagctggggggagctgcaggagaacatccgaaaagaagactgcacactggatgacttgatcacggctcacaccaagtacctcacctccatcacccacaaaggacttctcggtgcccgccggagacagcaccacgacgcgcaaaaggaagccgcctcgttgggccgtgacgcatcagaagttgaagaccgcaactcgtacatggtgcagctgtcgctcctgctgcgaaacatgctcgactacagagacagcgtggacgggttatactcgtggtcggtgtctgactttacccgcagacaagaagtcgacacggtctcgctgctgcgaaaacaccggcccaattcgggagacatggagagttctgtcgggccggacgatcccttttttggttctgccgggggagtgggagggaacaacaatattaagagcgagttccccgcgctgcaggaacggctgaagcagttaggggtgagtttcaggcagaggctgcagatcttgctgggggatctggcgtatcagcctgatgtggacatgcgcttcctgggggtgtcgatgaactttaatgatgtgtatcagccggttaggaggaagagtgggaaggctggggctggggggagtggtgtttcggctggtggtggggagaaacaacaacagcagcagcagcagcagggagggaatgtggggagtgtgaatgtttcgttttctgcttcaagggcttaggaggctggaaaggaggagagtgaaggtttgagaccaccggggcaggataggaggaaaggagaggaagaggaggagaaagtagtagacgtgaaagcggatcggcgggctgatgagaaaggggaggggggaagcttgaggaagacgccttcttcgggtggtgtcaaacagggcaaaacacctgtgacgactgtgagatgggtcgagagacaaccatgtggcaagactgtaagtccgagcaagaaaactcccagcccggggaaaggcggaggagggtcatggctccagactaggccggcgtggaagaggccttgaaaagggttgtattgtatactgcgggcggcgcgactagagtatcttgtcatgatttggcgaggggggagggaaaggggtgttcatctttgggagttttgacggttagagttatcggtgttttggtgtgtgttgaaatgatatatgtttatgaccataatctgttctaatcgtgatacaaaagtttgagcaaagtggattgccttcgactatagattaacgtgtacattgaccggctctaaccatgtctaacttgaaagtagataatacccatgtgtgttgaaagcttcttgaggtaactcatcgactaacaaaaatgacatctgcaagagaatccacgttcatagatatattccatgtcagtcgccactcctccgataatcgccccccatcccacgccgtgtatgcaatatctgactcctcccctcccaagacgaatataatcaactctcagaaccaaaatgctatgctttctcaaatataaaaataaccctttaatcctcaatcgcctcctcatcaataacaccctgctccttgatcttcctctcctccggctcaggcaaccccacattcttccttgccatgacctgactctccacaaaactgtcccaatgctggggatcggcctccctcagtctcttgagtatatcttgcctcctctcctggaacacctggaccacgcctctctcttctgcttccttcttcaagtcggcgtcacccatctcatccagcaactcgtgtagtaacctagcatggttgggatccgccccgacttcttcgactcccgaactcaaaagcgcggcattgtagtgctcaggacggagagccacgattccagcacggaatttgtgacccgcccggagaacgcgcgcctcttcatctgcgagcgccttggaagacaaagaaatgatagagttggagcgagagagggccttgcgggactcgcgtgattgagcaacggcgtcgtcttcggcgtcggaaataatggcagctgtataactggctgagaggtccgagtcagttgggagagggggagtaggaccagacgccaggctggatgatttgccattagcgttgtcaagggaagacaaggaagcggcatcgcccttgtcgtttccggcagtggtgctggcggtgtccacgcccgagtcgtcggctgctgacaggcgggtgtcggggaactcgtcttcaaagcgcttgatgataccatgtagggtattatccaagaacatgagacggtctgcgactactgttagcatcagagtattcctataggactgtaaagagaggcacgtacgatgagtgtggctatcattcgccgccatcttggctttgacgatagcaggctggagcctcaaccggatcttgcgagcgctgagcagcaggtgcttgctcgtatccttggccttggccaccgcagtggtaggttccttctcaccgtctcccaaggaaacctgatccacctcaccagccaacagttcagggacagaatgcgaagaaatatcatcgcccctgttcttgaggcagcaagcaagagccttgacgactccagtgccgccgatgacatagtcgttatccggagcggcatcaacatctgcatcagcatccaaagagagcatgacatcgtgtccaaccagtcgttgcaggacatcgggatattcgggctcggccttgaagctacccgacagcaagccctcctcagctgttggtgcaggtgttgttgctgatgtagctgtctgcacagcagtagcaagctccatgtttctcaacccatacgcgacgacttgcttggccatggccttgaccaaatcactcgattgctcgctgggtacctcgatatcaaccgccaccaggctggttgaaaccctggcggcagcgaggagcgatgcaaacagggcacatgcctcttcttgtttctcttcagaattcgcacttgtcgtgagctcgacaaggtccttgttttgcaggaagctgatatgtgccaagccagtaacctccggcaggatttctgccagagcaatggcttgctcagcactaagtgtgcagtccgccagatggatgcgcttgaggcaagcaaacttgggaagatatcttctcagaacagccaccgcgctcgggtctgagctgaagagctcatggttatggctcaagtcgataaaccttaagtgatccagcttcaccagtgtagggaacagcttgcacaaactcgacggctccagattgcagtcagccaggctgagcgcccaaagagggcatgtttccacctcgagtgaatcggccagtattcccagcttgtcccgaaggtcattcccacccaaatcaaggccctcacactggttgctcttcaggaatctcgccacgtgggccaggccctccgagtcaatatcattgtgcgccagattcaacctcttaattccacatttgatagcaccgtcgatgacggctgccagctgaggtgtagacagtcctgtttgcgccatacttagcagagtaagtgttgacccccccagtctttcccctaatgacttcgcaaagagcgagcacagagcttgaggaggtggttgttgcccatccggcaggggagcgcagacatgtcgtgggaactgaatcccgctcaagtccaggaccttgagggtcctgcacagatagataaacaagcatatgtgcctccagccctccgggccgattctgttgttgctaagcaccagccgctcaacgacaccgccttgctctatgagcccatcgacggtgccagttgatgatttctgctgctgtagttgcaactgtctccttcgttttagtggtgacagaaccttggtttttctcgctgctagcaagccagccaggataactctgagcccttcatctgccaaggagcagtccaccagaatcagctctctgacggggacaacagcgaggtaatcacccaacgtcaccagatcgggcagcgccatgtagtagcccgtcaaatccagcttctcaaccatacccgtctcagcagaaaagttggccgggtccatcagctgttcggttatcttcttaagaatatgtgtctcccgcagctgacagcaccggcggtatatcctaactgggttggtagtgggcatcgtttgaggtggatttgcaagtccggcaggtgtttcaggtcgataactcccgccgttggcggacgtggaggagtcagaatcagagttgtaatagagctccataggaacagttccgttggcctccgcctgccgccgtttccgttccttgcgagccttgcggtcttcctcgctcttcttcttcttttctttcttccttgcgtcggatgctgaagcagcagaagatattggtattggcgaagctgcagctggcgatgtgcctaggcgtggagttgaggatgtgccctctgtggcgggttccttcggtacttcttcccccgtggctttgatggaaccatcaacttccttttggcatgccaacgctttggggttattgagagcttccgcctcgaccttctccttgagtttctttttcatttccttggccgctttgtcctttgcttttcgctcgtccatttcgtcaatgtatttgggcattggagcaatctccacgtcgacgcaaaacgccaccctcctcagcttggcctggttcaaccctgagatggcgcagcgctcccgattccggtccacattcagcacctgcctttccaccagtccatgattgtgagctttgaacgtcggattcaaacttccgctagaagttgacgatgataatcttcgaaatacgtgtaggagcccatttgtctgagagcctcgcggcggagcaggggtatagggaccctcgccctctggtttcgccgcatgttgtagaacggcctgcttggctgggttggcttttggaacagagaactcggcgggcttgggagaagcagtattcgccacaggggggctttgtgtcgcaccgttgctcgagctgaatttctgcgagatattggagaaccaggagccccttcgctgagggggatggggaacggcaggttgtggtattcgcttttcgtctgaactcgttcttgtcccaagcgctggtcggtttggacttggtgccacgtttggcgtgctttgtgccgcctgagtgctgtcgttcctaccatggccgttggtagtcgctgcgggggtgggcgagtccaagggcgctgggttcgagagtgatctttgacggccgagtagtggtctcacgggtctgtctggagagaggtcaaaggaacttgctgttagctggacaattcccattcacgatatgcatggcgcatgttcaggccgccaggggtccaattgtgcacaaacctttaggattcccgtgggtcatccagctcacgtcgaggctgtgtatgtgctccatgttgtctcgagggggcgggttgttgtttcttttattgctattgcattcccctatcctcgtcgcttgttccgggttgtatcaggtgtaagtggtgattttcttctcggtgtaaaaggtgtgatagccgggaggaaggcgagtaggacgataagtagggtagaggtgggatgtgatcgtttcaacgttgggcccggtgctatcgcggtctaaagcctctctgttggaacgacgtcgtgctttttttcctttgtcgcggggttccgtccgtcacgaggtccagttgccagtcatgacatgaatggctgccatagtccggttggtatgtgtcccagtatatgttcaaacgtaaagctggccgtcgccgtcgatagcttgaggcgcgcaaccacggtagggcagactgaggtcggtgtggtccggtgggattgtgaggtgaggatgaggtaaagtggtggtgttggtgtcggtggtggcggcccggccgtctttcactgctgacccaaaaaagggcgccgccgagctgaacggattggaaatgcccgatttgtagtggttcgcgcgcgtgccggatcaaatcactcccgctacagttgtctcccgtatgtgtgaccgtttctctgctggagaagtggctgagctcaccgttgcggtgaagcggaaggtatcactggtggaagggggttgacgcagtactgggatgcagtgctgcaccgatccagatgacgggagaggtgggagatgcttggatgcaacggggggttatggcgggagacgggaggggggcgactcgctcagtaagggccctgtatgtatgtctcacgatgccaatgtatgccacaccctggttacagctcggtgattgccccgtaaagtagagtacacgatcgagtgacgataaaagaaagaggcgattgccaaaaagatgggaggagctattcaggtcaagtcaagagcaagagagacaagaccggaccggccgaacgacatagcgggcacctgggcacggaggcatggtgggactctcccactaattatcatcttgggtccatccaggaaaacgtgagagaattcgcagatcggacgccggaaattgggccctttctggacgtgcacatacgtcggccgaagcccacgagcgagcgaacggaaacgaaacgaactggtggcggtttctgcacctcaacccccgcaactctagagagagaagcagcatcataaccatggcaaactttgggccagtctggtaacggcaggtgatcggtattcagcggttccccagatttgcggtagccacccatcccgtgcccttgcccctcatgttgactcgtatgtggtaccactgacgagtgtatgtgtgtgcgtctgttcaccacacaacgagaagcttctcttctcatcatcattttcctataatccatccatccacatcccaattcaacaaacagcgcgatttcaggggtcccgaaactctatccggggcacccacgccaaggccggacggtgctaaccccatgttccctggaacggcaattccactctggcgtctgcaagttgaccacatcgtgcaccgctcacccagacaacccactgcatccagtttcccatcacgcatgcttgaggggaacacaattcctcatctgagctttctaccaccaaccagtgaaaggaacacaccaccagctcggtatcacttgcagctcatagtcccttgctcagacgatcatgctgtgagagtaccccgcatgacctcataaccctcacccacgcctccaggtgctcggtctggaactgcttttgggttggcgacaccacatcttgtccctcaacttgtcaattagaaacattccattgaggccgaggtgcccctcgaaactaagaaagccgaatggctgagtactactctgtagtacctgattacatacacattccatatcaacggcttgaggcggcttgcaaaggctctaccaacagcttcaacaaggaagtacatcacatgatcacataatggcgccaacgttcggttggtccgccagtcagtcaaagatgcatgagaaaagtgattggcttttggtgaaccctggtcattgccccatgtgcccgtccatcttttgtggatgcacttaaactcctaaagaatatgctgccatcttgagcccagacgatacaaccagtccctagcaaaaaccaccaatttactcctgaagaagggcggcaatgcgctcctggacaccagccttgcgctgctcgtgggtgagcttggactggcggtacttcttggactcggccttccactcctccttggtcttcttgggcgcgtcggactcgtacttcttgaaggggtcctcgcggatggccttgtgggcctcggcatagaggtcctcgagggagtcggcctcaaggtcgtcctcgatgtacttgacgaactggcccttgtagcgctcctcatcgtcgtcggcgagggtctccatgtactcagcgacgtgaccgccgaagatgtacttcttgagggtctcggcatcgagctcctcggactccatgtcgaaaccggggaagcggttctcggagtgggggacgaggataccaccgtcggaggcacccttcatgacaccgaagacacgggcaccggtggaggtgcgggagagaccgacatcaaggaaggccttgaaggggcggcgctcaccatcgtcggtctcggtggcctcggtgagagtgtactcaccatcggcctcctcaacaccggcgaactgctcatcgaggccgagcttcttcaagacgcggcgggcgaggaggagaccagtggcgtaggcagcggcccagttggtaagaccgtgctcgatgccataggcgcggagctcgtgggagtaggcggcagcgaagatcttgtcaccggtgatctcggaggtgacgatctgggtgatgatgtcgcggttggagaagcggacaacgagtctgtacttgggggcgttgtacttgttcttggcctgggtgatcaggcgcttgcgagcatagtagtcggtctttccctctcttctgcgcttgtacttggtctggaagcggctgtgtttcgagacaaggtcagcaaaaatcaccagaaagtcgcgagaatggccaggacgtgagaaagttacctgtagtacgcgctgttcttcacaagcttgtggaaggcctgaattcagaaatccccgagtcagcaattatcgcttcagatattttttttatcctcctccgaagcatcttgcgttgactctatccaattccccagatctctcgactcgttcgggtgcaggtgaaaacgacagcgatgccaatggcaacggcagtgacaaatggctgtatcaacttaccattttgactgttgtttcgctgggcgatgcgatactcacagggctcggggtttgtcgacaagtgggaggggaggttggattattccacgacggcaagcatttgtgggcgcaaaatttggccccacagctttccagagtagggcgtgtgcgaaactgcgttgggtgacgaaggtggggcaggccataaggggcttgggaccctaaccctgggcgcagttcagcccttccatccaagtccgcttatgtcatctgttctccaacccaaccccagaccgaagccgaggttcacttcgtcggctccggctttcagcttccatgccggtgttgtcaaagggtaggtgtggtcggtgatgcttgtccatacataatcagtcggcggtttgtctcgtaaactcctgatagttgcaaatggaaccagaagagtttcccgtcgaatacatccttgacgaaatcgacgccatggcacccgtatcttcgactcccaagccaaaggttctcttatttgatattgggggtgtttgtgtatgcttgtctctccactctccatgtgccgtctagatgtagatgatcctaacaatcacaggtcatctcacccttccaatccatcctcgattacgagctgtcacttggcatccccccaggatgggtcaactactccctctccaagactgctcctaccggattctggcaccgcctagaaagaggtgacatcccaatggacgcctccttcttcgacgggttcaaccaagatcttcacgacccggcccggtggaaggcattctaccaagcccagcaagccaagaaccctgctttgccaaaagagattcctccccttcccaagcttgatgggcaatggttgttcaacgacatgatgaaatctgctagggcaccggacccgtggatgttcccagccctgaaggctcttaaagccagcggcaagttcatcattgctgctctcagcaacactgtcatcttcccaccaggccacgacttgtatcaggagaacttcatggacgaccccctccgcagtcagttcgatgtttttgtgtcgtcagctcatgttggacttcgcaagcccgacccgaagatttatcagtatgcgttggaaaaggtgaatgagtttgcgaaggcgaacgcgggcacggcaagaggtcaggcgggagggtggtcgtcaggagtaaagacaaatgaaatcacgtttctggatgacattggagagaacttgaaagctgcaaagcaggctggatttcagaccatcaaggtgccattaggcagagcatatgaggcagttgaggagttggagaaggtgactgggctgtcgttggatggtggccaccccaaaattcccatcaagccaaacttcaagggcagcaaggcgaggctctagaacattcaaatcatgatcaacaatgtttcccttaatcatcacgtctcttaatcaatatgataaagaaagtaggctgtataaaggcaaggaaaaaggtcgaaaagtcgcaaaaagctcacgacctaaccccaaccacgctggagtagagcgctacgaaaaccacgttttactcaggatcgaacccgtgaccaccaggagataatgaccacgccatgaccttcccttgtttgtccaggttacttccacaagctaaccacttgaccacgccaaggtagttgcttgcttcggtgataattatttgctggaccttctatatcaagggtggtacggtcgtatctcgtgtgtgcctgataagtggccatcctgatgcccggcatacgactcccagtccattccctcgacgtagctgcctgccattgttgctctcattcccatgacccagcttcatgaccattctgccactgaggtcgttgttgttgaccatcatcaccactgctgctcttgcctgcaaccctgctgtcaccaaccacgtcgtcgtcggccaacgactttctacctgtagttctgtccaaacttgctaccatcaccactgcgttcgactttctcggcgccaaagctgcaactttccagtatttcaagccaatcatcaccacctgctgctcaacgactactagtcgacacaacgacagcattactactattataacaacatcacaaccataagagtatcacaacaataacaacatcaggcctcaccactgcagcaacacagcacaatattcaccccatacctcattccactaccatcatccaacaaagtcacaaagcacaacaacccatcgacaaaaggcggaaaacaaaacaaggatatataatgtaaataataaactaaaccctcttcccaacccggcctatcccatatcccacaatatccgctatacataaaactcatcatgaaccaatcaaacctcatcctcccatactatttcaagccctcacagccgccctccccctcctcccctgcgactgcgtcccgttcgtagcccccggccgagcaagcgtatactttgcaaaagccctcgccagcgccttcttgcagctgaccttctgactccccacaaaactctccaccgtgacggcaatcgcccggtcaatatcctgcgcagagcagtactcgctcaacctcatcttgcagaaagcttccgcgatacggatgatagcctccagatgacggacctatatcacctaatgttagcaaactgcatgaccaaggttgataaaagggggagaaaggggacatacagtaataggataagcccccgtcgccaaactctccctcctcatgtcagcaaacaacctcgccaccttgtcctcatcaatgtgatacagcttgggcgagcacttctccctcgcgtacaagatgtacttcctcagcagctcctgcgggatctggtcctccttcttgatcccattctgctgcgtctcttgctgggcagaatcatgctccacctccatcgactgcccgccattctgggtgttagccgcctgcgactgggacagcggatgacttctcgagtgtgacccaacaataaacttggccagcctttcgtcctcctccggctcgaccgtgtccctcaccacgcacaaaatgtcaaaacgggacagaatcggctcggtgagttcgacgttggcgctgaaggggatggaagagttgtatcgcccgccaatggggttggcggcggcaatgatgccgcacctagcctgcagggtagtcacgataccagccttggagatggaaatggtctgttgctccatggcttcgtggatggatgttctgtcctggtcgttcatcttgtcgaactcgtcgatcaggcaggttcccttgtctgccaggacaagggcgccgccttccaacgtccactcgctggtgagagggtcgcggcggaccgaggctgtcagaccgactgcggaggcaccctgaccggtggcaaagacggcacggtgggcggtcttttcgacatacttgagaacttgggacttggcggtacctgggtcgccgagcagcaacacattgatgtctcctctgacgcggtgcccgcccgtggtaaccttggctacacctccaaagagagacagtgcgacagcggttttgatgtcggtgtgcccgtaaatgcttggggcaatagagttgataatcttgtccacaatgtggggatccttggacaggcgacggatctcatgttcgtcttcatctgtcatgcggaaaccagcgagctgatcatgagatttgatgatgttgttggcctcgaggatagtggcaaagaccgggaagccgttgcggttgttgagctgggcatcgtagctattgcggtagataccggtcacctcgatctcctcaccaggcttggccttgtcgatgagatcccaaaggagaatcacctcacggtgacggggaagacgaccggcagggactgtgccgggcgattcttggagggtgagcttttggtagtttctgtagacggtcttctccgagttgagggtgaaggggccgcgagactggcagctctggcagtatgacaccttgacttcgacattggactcttgctggaagggaccgagtgtgacaccgcacttggtgcagtcaaacttgacgtacttgagctgagggaagacgccggatcttctcgtcaccacaccgctcacacgcacaaggcagttgaggtgagactggcgaagctggcgaagggtgtagtgaacgggaaggtcaaagatgcggacgtgaatctcggcgtggatacgctcgtaatcggggtaatgcagcagaacgacatccatagcaacctcgtcgaacagcttgagcatctcggcaggagcgttggccaagaagtaggccaagatggccttagaagtggagaggtgctcataagagacctcgagagtctcagcgttcacctcaccaagagttctgatgcggttgccgtaaactgacgagccgctatcatcgatgtactctgtgaggaaggccttgaactctctcttgattgtgcgctggacggcttgttgggacacccagtctgtcagactggaagctttgacatcatggagggcctcgagtgagagctcctcatccatgatatcaccatccatatcctcatcagggtcctcatcgtagcgatgtctgcgacggcgaggctgggctgagagatcgatatcgccgtcttcttcaccaggaaggaaagcggcagggagacgttgccgcctggcaacctctcgatctctgcggttaagttgggcctcgagacgtcgcctgtcaccaagattcatggcgtcgtagtcgccctcgtcgtcaagatcaatgccctcatatcgatcgtcctccctgctgcggtaatcttgctcaaagccatccctgaacaggtccacatcatcctcggcggcttcatccaaatcgtcgagatcatccgggatctcaacatcttcctcaacctcatcgtcgtcgtcggcgccatgggcgatggtgtggaaggccgggggggaggagggcagggcggggctggaggcgcccgcaatggaagaaggcgcatcttcaccattagtgcgtgagcgctttctatttccccgggctggtgcgccacggttggcggaggacgggttatcacgaagtggggagctatggaggtgtcgaagttagcttcaagtcacttttgtcaagatattttcaggggcgtatttttgctgtatttttcttcccctgatctctcgattgggcaccaagcggtaaaacaaaacatacctcatgtttgcggttgttatgtgactgtaatagcagtaaggaagggtaccgttatcgttccgacaaaaacgagcgaagtggtggatgagcctgtcctgaaagagagacgatgtgggcaacaatggtcgattcggcaacacacagtggaggggattggaaaatgggaacatgggcctcgcgtcacagattgctttcccccccctggaatctcgcgttgatttcgtgtcgaagtgcccagggcgcgttaagtggtcttggcacctaccctgcactttagcgataagataagctccgacagtgatgcggcgactcggaagagaaccatcatcggaatcgatctatcatctccccttccaccttttttgtttttggttctggttgactttgtcgttgatacctgacaattcatcatggatcctgcctcggcgcccaagccgccctccgttgccgacgttcctgaggatggaggggatgcttcaatcgcgcgcaacaagcctcgcagcgacagcatagggtcgcacaagtcgagcgattcgcagactgccgccgagtatgttcatgatgatgctggtggaagatgtggtgattactactaacaccactttctagtttcttgcgcgaccagatgcagctagaggccgatgcgcgcgaggctcttccttatgtacgactcttgacccattgaacacaatgcgctgatctaaccatggtgtcttaatagagcatcgagaactgtaccaatgccctcggccctctccgacaggcagtatttgcttgcctcacttgcaatcccccgcccgcgaactcgtccgatccctacaatgccgccggcgtctgctatgcctgttcggtgcaatgccatggcgagcacaccctcgtcgagatcttcaacaagcgcaactttacctgcgactgtggtaccacgagactaccttcgacaagcccttgcaaccttcgtctaaatcccgaaaccaactccaagggaggtgttcactcccaggagcccgatgtgaacaacaaatacaaccaaaactttcgcaatcggttttgtggttgcgaatgtgactacgatccttttgagcaaaagggaaccatgtttcagtgtttgggtctaggtacacatgacacaggaggctgtggcgaggactggtggcacccgggttgtgttgttggaatgggtccaaagtggttcgagaagatggccaaagagaagaagccgaagacagagcagaacaaggaggatggcaccagtgccccattgccgaccatctcggaagattctgaagcgctcccgacccagaacggtgccgaggaagaagaggaggaggaggatgatcccccacttccccctggattccctgaagaagacaactttgaagccttcttgtgctacaagtgtgtgggggctcacccttgggtcaagcgatatgccggcaccgaaggatttctacctgcggtccacttcaagcctgatggagcggccgaagagacccttccagatgctcctgccactacggacttcaagacagaggagcccacgctcaaagttgaggaggctgcctctaccaaaaccgaggtgcctgctgccaccaccacaccagccgctgccaacctcgatgttcccaagaagcgcaaagccttggacgatgatgaggatgaggcaggttctcagacatccaagcgtgtgaagaatgaagatgaatccaaagagagtcctagagagcgctctgctacaccttctgctcccccgccttgcaagcttctatccttacccccagtgccccccgcaggcaaattctctcttttctgcaagcccgacttccgagagaagctgtgtcgctgctcttcctgcttccctctgctcgtccctcatccccagcttcttgaggaagaagagacctatgagccacctgtgtcaccagaggcgtcggagaacgggtccacattgggcagcaactccctctatgagcggggagaatctgcactgaagaatgttgatagggtgagagctatcgaaggtgtgatggcgtacaaccatctcaaggacaagttgaagccgttctttcagcagtttgccgagagcggacaggcaatcagtgccgaggatatcaagggctactttgcgaaactgagaggcgatgaggaggtcgccactgcggatacgtctgcccaggggaaggaaggcggtgacaatcggagggaggagagtggatactgattgatttctttgtcgggaacgggcatgttgtgtttggttagggtgtttggttgcttggtaattcaactgggactgcaaggaaataggcacatggtttatggtatggaatggattgggacagtgatctttttgttcggaatcactgaaggctttctgtgtaggttaatttgtatctggagttattttgtcttgcggcagaggatggattcacgcaatatgaagagacattcaacgtgctcctagagacacccactccacactgctcctaaacaacctgttaggagatccttacatgacggaattggtcacatcgggctctcggagacgcaagtttcctctcgtatatgtttctagccgaactcgccctcgccatcttccgagtaaacgcaagtctgaaaaaccaaagccagctctaacaactctcaaaagcccaacttgcctgcttacttctcgtgttaaaagcagcatccgtcccttcgttgtcataattccctttcatcacccaaacgcatcctcattccctccaatatctctttcctcccaacttttatattcttaccagtttctctatttctttactatatatattgaaactttacagccatgaacgccctacgttccaccaccacctgttgagatgtccctcgacaaaaactccaaccaataacctatccgccaaccgccttggcctcacctaccacctcttgtctacctgtgcctgtcacgaccggcagcctcctccaaagtcgtttcccagctcgacaaccctgctgatgacctgcttgcccaccacaacctgggtaatagcccatcgatcccgcagccccgacagccgaagcccatatattccccaagacactggcttccatgtcaagggcgaggggctactggtgaagcagggctcacgggatccatcccggtacacggttttccttttctttttcctccagtagtatataatgtatcttgccagtccatccgtagttgggttccaaccatcagtggggaccaaatattgctttcagtgcgcggtgaagaccgggcggtggctgcactgccaaactttacctgtcaggctgccaatgtcaagcagaatagggattgagagttgatgtatctcaagatgtcgatgataatagctgaaatggggatgggctgtggatgtttggctttctcactgtcttatgatacccaagcggagttagaaaacagagaacaatttctatgttgttggatacctacttgacctgtaatcacaatcacaccaacacaatgcccgctgagcttccactccagttcacagaacgctcagcaagtgtccatcatcaatcatatatctcattttgtacaccccgtcactcatctatcattttggtatattgcccttttttacccccttttcccatcccaacacccctttttgacattccttttctgtttcccaaaatcaaagccactccacactccaaatcttctcgccagcacgatatggcacaatctcagcctgctcgctcttcaagctctcctcaacagtggcaccatccttcttcagcaagatcttcttgtcagaaggaggcaagccgtagaacttgcggccataggaggagaagaaaccggccaaagcttcgtcagtgacgtccgagtcggaaatgtcaccgcgggcgatgccctcctcaagagccttgaggacgtagccgagggcgtaaggctgggtgaagacaccggcggcggtgttgcccttgcccttcttggaggagatatcgtgggctggttgtatgttagtgcctgctaacagtgcaaaggaacggaatgaaacatacgagcactgtcagtaccaaggaagaacttccccttggaggacacaacagcctgaagaagagcccgacggtcctcgggggacttggcagagggcttgcagtagtggtgcacattggcggaccagtcatccaccagcaagctcaagtgatgagcagtctatcattctcagtcagcacttcacccttccccaacccgtcacagtttcactcacaatagtccccacaacatcctccccaaactccctcacagcctccaccgcctccccagtagtgcaatgctccaacacaatcttcaacttggggtacttgcccaccaagctcctcagcgtaggcaagaacctgctctccgcattcatcaccgtaaccccctccttgctatcactcggcacctccccgtgcaagttcagcacaatcccttccttctccatagccttgagcacctcgtcaaaaggctcaaagctcacgacaccccattggctgttggtagtcgctcccttgggataagccttcacaccggaaatgccagccttcttggcgttggcaatctcctcgggggtgatggaggagtgaaggtacaaagacatgaggtaattgacgcttgggtcgatggcttccaaggcggacttgtactcgagagcagcgtcgacagaggtgacggggacaggggcgaggttgggcatgacgaagacggtgtcgatgccggctgggcggatggtgggcgtgacgagggaggcgatggggcctggggcgttgcggaggtggacgtgcatgtccgctgctgaggggagggtgtaggtgtctttcattttggcggtgatgtcggggttatgagttggggtgtgtggcttgaagaaaagtgctattccagtgaaaaatagtgagttgtgtaagtggaaaagtgaaacggaaaagtgaggttgaagatggggagggtgtggagtgagaggtgagtagtgagatagcttggcggaaggcataaaattgtgcacgggttagggtttaaggtgctggcttagcacccctttcatctgaaccataattttccaacatcattgcaaagaatgctactgaacagccatgtactcattatgtcgagagcattcttcaggcccaaagtaaactgaaagatggacacggataaccattctcgtggcccttgggccattacccagacaagggtgcgacttacaaatcaatataacatcaatgacgtcccgccttttcacttcatcttgaaccctttctaatctcaacaaatcaattggaatatgaaaatttatctgctcataaatcaatagtaacccctcatcatctcttcttcaattccaaaatgacagtcggtctcaccgaggaccgtcttgggcccggtgctgacgacgggtccggcagctccaccacctcagcaaccatcgccgctaccgagcaaacaccccttctcgcgtccgacacatcctcagtcaccatcgcccgtcacatctcccttgaacgagagtcaacagtccataatgagccctcagaggaagatgaacaccctcccctgggctggaaaagaggcacagccatcatcttatccatgtgggctcttatcttcctccaagcagccaacatgtctggcatcagcaccactcaatcttccattgctgaggacctggatgcctaccaaaacgccatgtggtttacgtcttcgtacatgattagcgtgtcctccaccgctcctcttgttggtcgtctgtccatgatattctcgcctggggtgatggtgctcatatgctcgacgtggtttgccattggggcggttattgtttcggttgcgcctacattcggggtgtttatcctaggcagagtgttgtgtggtgttgggagcggtgggatcatgacactgtgtatgatactggttatccagctcacctccaagaagaaaagggggctgtggatcggactagtaaacgcgggcttcaccataggagtctcaacaggcgcagtggtattcggtgcactcctcccagtcataggatgggtaagctccccctcccctattcaaccatcccttccagaactaacctttcccctcccccagcgcctcctcttcggatctcaagcccccctctccttcctcgccggcctgggcgtattcctcagcatcccccaccgcccctccactcaccactcccgcgacaaatccctcctcaccaaactctccagcatcgactacctcggcgccctcaccctcaccgccaccatcacctccctgttatacgccctctcaacctacacccgtgcccccctagctctatccctcctctccctctccctcttcctactaatcgaatcccgccaccccgaccccatcatccctctccccatcctctcctcccgcggcgtcttactatcttgcctgtcccaactaggcttcatggcctcgcggtggacagtcctcttctacgcccccatcttcatcctggccgtccgcggcctctcccccgccctcgccggctccgtcctcatccccaccaacctcggcttcggcatcgggggtctgctcgtaggctggctgcacatcaagcgctccggctccttctggctgccctgcctcttatccctcttcatctttggctgctccctctttgaactctcgttcgtgagcaaccacgagacgagatacggggtttatatcgccgtggtcttcatcaacgggttgtgtaccggcgcagcggtgaactacacgctcgctcacctgttgcatctcgcaccggcaaaagaccattttatcgttacaagtttgctggctacgtttaggggtttcgcggggagttttgggacggggattgggggcggggttttcaaccgggttctgagaggtagtttaacacggggctttctggagctggggcatggggagttcacggaccggagggagaagttgattaccgttttggtgggcagtccggccgctgtctggcaagaaggggtactcagcaagatggaacggggggttgctgtgggcgggtatgagatggcgctgagaaagttgtacatgggtgccgctggggtgacggtggtggtgttgattttgcagtgggccacaggctggaagggggtggaagacgagacaaagacagatgaggaggggattagagaggccatggtggaggctgatcccgccatggaggcttaaatctagagttggtatatttccgtcaatttaagaaaaacgatgcaaggagttcacgatacagtctagtcggttataagaatgaccatgtagacctgaacaatggccgaagtcctgtaaacgtacgtgcttttaattcttcaccaatatcactatcacccctctctcatctacatctactaccccccccccccctcccatcattttacacccaaagatacccaccgctcaacatccgataccatcccacctttccttattcggttttccctctcatatgcatcacatacattccgtcccctcgttcctaccaccccaggaaattatctagagaactaggaagagtcatccattcgtatcattcgtccattttcccctccccaagtcccaaacaaaaccccattatcctttttttgttttgtactccacccaccctcccgttctaaaattttgcgtttatgccgaatatcagggcatggttgtttctggtccagctatatctagagacatagtagaggtcgagaagtactgcgtgaaaatccacaactgtaagtatgtcattttgggtatgtatagttggatatgttgtgtgaatgccgtggcgagatcaaatggaagaagaaaagtgtgtttgatgtcggattgtggtgaaataggaggcggggggattagtcggaaatcgaggtgatcgtatcttgagtataaaaagtattcgggagaggcagtgatggaaaaaggaggacgtgaagtattacgcttcacacaggtatgggtggtggcgagacaaagattggcgccctggtcccttgctcctcccttcagcaagacaacatgggtcgcctgtgaagcgccttcactccaagggcaggaaggtcaatcctgccgtcatcacgagttcatcgaaacagagagtagctggctgccatctccgctagtcgataacctaactacaccggccggccgcctgccagccctttgttgatcatttcgcacccgcggtcttgatatcttacatccttctaacccatcctcgcttttgaacgccgagaaagcctgtgccatgtcgcaccaggactggctggtcagtggaccagttctttggagatcacgttcgaggtaaaggactctcaaacgcgctggtagaacaacaagtaagcaaccttgttgtccttgatgctgtccttgtgctgcttagggggcagcttctgtccgttggtagccggtgtgttgacaacgctgctccacttcttgccaccggccgcttgcttccagccatcgtcgtcgccggtatcctcatcattcatggcaccgaatctgttgctaccagtgctgtccttttggttaccagagccagacttggcctgttcttcctcggcaccaccctcagccacatcttcgctgcgcacacggcggataacggtgtcatcgatacgaatccattctcggccatcctgtcggcgaacatctactgtgtaatgaccgccactggcattcttaccatgatggtacacaacagccgtcagcttgtatcgaggaacaccttcgtgaaccgtgctgttgcgttgagagcgagacagaacctcttgtgggaattcgaactcgagaggatagccaatcttcttccagatcttgacagtaccaccttgaccctcggcgtcgaattggaaacgcttgaggtgcaagataagaacaggaggaaccgattcaatgaagatctgcttagtggccttgacgttcttgccgtggggcgagttgaaatcgccgtggagtgtttccggtcgagttagacccttcagggcgtcaatgatgttgcgaatctcgggcgcaccaatgtcaagttgcagcggctcgtaaggctccagcgtgaccgaggtcttgttgccaggaacacgcagttcagagcgcaacttcccaccgaagatcttgttgatgggtgaagcgagtgaatggccagaagaccgagtaacagcagcgcgttgacgggggccaacctcaagccaatcatcagcgccctcgagcgatccgtttggcttggaagtggtgggagaagacggagttgagttcggtgcggtagaaactgctgaaacaggggcagtacgcatcacctgggcacactcgtcgtgtagaccttcaagaaggaacccaaggaactcttgggcgtcttgttggtgaccacgcctcatgctggcaaagcggggaagtttgcgaatggcttcgtaaacaaactcaggggtgaaagactcgccatattgctcaagctcttccggcttcaaccgtctctggaggaggtcagttgacgtagcagagtcgataatcttaaattcacgcatgaacatgatcctgcacttttgcgttagtcaacgctaactcagacggtcgtgttgcaacttacagtgcatcgatcaaaggcgtttcgctcttgaaactgtgagtggccttcttggacacttgatccagaaagtcgtagaacggaatgcagaaaatcaaaacttgaagaacctgcattgcatcagtatcaactattgtaacttgagaccagagtcaactcacagaattcatgtaacacatatttccagtgttgaccaagcctctgggctcaataaagggcagcttgtcaataccagtaggacggtaggcctgtaaagcctcggcaagagaatccgccttggaactggggaaacttccaacggctccagatgcagcggtagagacatcggcagcgttgccattggtgtggacgcgaggagctgcggcagtagaggccacagcagagggagctgcactgggctttgcgaacaaagcggcccaggccttgggttttgcaggagctggagttggagctggtgcggcttgggcaggagcagactcagtctcggacttctcgcccatgccattcacctggcgagcaccctcgccggcctcggtcgacttttcgtctttggtgggagcaacggaagtttgctgaacagctgtcttctccaccgcttgcagctcctttggagcaatccttggaattactgggagaacgggaaccgcaggaactgtgggaagtgccgggatagctgagcgagtagcaggcttcacggtcgtgctggggctgactgccactgcgatggatgcctgggtcgtttgggcagaacttggcgtggttgggggtgtatcctctacctgctgctcatgggtggacggtgtctccgaacgagcggtggcagcctcagttacttcagccttaacggtggtttccgcattaacaactggctcctccttaggttctgtctgctccggctgctctggctgctgagcctccgccggtttctcgagaatcaaattaggagtgctagagaccgggcgtcttctcctcgactttggggcacgagcggggaatccagcttcgggattggagaaccatggcagctttgacaataccttctcagatggcgaagtgatggggtggacttcagatgttgccggggtggttgccatgttgaacggaccctccaccacagaagctgctggcgtctctaccgcgacctctacttgagtctctaccggggcctctgcttcaatcgccgcttcttgttgctcaggctgaacctcagcaggggatttgacttccgaggcacgataagcctcctggttatactcctgcgggaacggctgctgctgctgctggggcacaaagggttggaactctggctgaataggtggttgtgcttcgtggacgtgcagtggctgaaccggaggctgcacctcgtgattatgcaacggctgatgtgaagctggaataaactcgcggaaagggggtatggtcgaggggggaatcgtcgtaggaggcggaacggcaaatgaatgggttgttgacggggtaagcggggcaacgaccgggggcatagcagaagggggcggttggtatggcgaagacacaatcggcgagtgctgggcgggtctgccatagggctggtgcagagggacatactgctgcacagcaggcggcgaacgagtgtaaggggcgtgattgtactggggcggaaggtaaggttgcggcatggcgccagtatgatactgctggtaaggcatgtagtagggctggttcggcgggtaggggttcatgtactgagccccatggctgtacatggaggggttgacatgatgctggtgttgctggtactggtaaccatgagcaggcccatactggtgacgatttccacggcgaggaggaggcggacctcctcccatgtcggcgcctccttgcatctgctgcccagccggcagatgcgcgcgattgttcatcatgccggcctgggttgggagctgtggcggcagctgctcactgaagtgagggccaccgcggcggactgggcgtataccaggtgggagccccggtgagggcgggatctggcgatggaattcgaagggttcggcgcgggcgtcaatgatgggcaacgttgggggtgggttggcggctgttgccgggagagagcaagaggcgaacttggagcggcgggaacgaaatgcccgacctgtctgacttggcagtgtcggagctggcggcagtgggtgggtggtggtggtggtggtggtgccggtgccggtgccggtgcgcgtcgtttgctggcgtgcggtgcgccggttctaggcaatcaagacaagtcgttgtcagttcggcctcgacggtttcgatgagtcgttgctccggcgggtgcagggggccagagacacggtgcggcacattggacagcgtgctgccaggacgcggggggacggtacagcacacgggaaagtgatgctggatggatagagccaacctctgggtgaaaaccaggtgtgaggccttgcgtggtggttgacaaaatttaaaccgcctcctttcgagaaaccaaagaaagggcccaaagctaagaggcctagccgacgctcggactgaccctaaccctaaggcaacgtccgttcgttcaggccgcctcaagacccgctgcgattctgcagccccccaagatcagatcaacatggcaattctcttcagactgcaaacagagtctcggagaattaatgctatctaataataatacaaaacatgtcccagtgttgcaaccccagcatcggagtaaaagacaacacagatggatcacctcactgaaacccgcgccagaaaggatagtagcgggcagttggtagccaaagaagggtgttggagaactgagtaaaagggtatcgatcttcaatataattctagaattcaaaaaaaccccacgcttctttttgttgctgttgttttacaaacccagcaagcactttcactcatctttaaacatccatttcccaccaccaactttcatggcatctcgccaccgctcctcgatttgcttcctccccctcctcgctgcctcttctctgttctcttccatttcctgcgtcgtaggcatatcagggttccaataaccaggcggggacggttgcctctgaaatctctcgcgatgccgtccaaacttgtttgctatttgctggctctttgctttcatccaagtttcccgccgttcctcacgtgtcatctcgattagtttatgggcatggggtcccaggtactcctccatcatttggatatctgccatgcgggacaacacgccggagcctgtcgcgttgaattcagactctgcaacggcccggtaatgtcgaccgcagcagttgtagtcattgcaccctgtcaactcggcccggtcagccttgccacgcacgacttcgttgaaggcatgtttgtgaccgttgttgaacttggggtttactttgaaatcctcaagtctcagctgtcccaatggcttatctcgaagccgacgtgctttgggtctggacgttctgtcgttggcctgcctcggccgtgaaacagttgatggtgattctatgcccccgcgaactggatggagaggtctgagaggagtgacctcggattctggtgaggccttgtcgggaaatgattggagtcttccagcagccttcttgggcggcttggttggccgccatggctcaaattcttcgtcagacccatcctcggcgacttcggcaacttcataatccaggtttcgatgagtgttttgagctgtcctctgcttgcgtgagatgtccgaaacctccgacatgctttgttgggctagttcaacactctctgcaataaacagggtcggtctcggtgcggttgatgggttcccggctgtcgttctcggatacagcagtctggaggtttgatcgggttgcggagtgccatcatcgtcctcacgaagagtttggcgccagatttcacgttgctttctgggtgtcggcatgcccctagaaccctcgtccaggtcaatgctttcatggggggcaaagacagctgcttcacccatcactaccgggtcggaactgacttcggttttgatcttgcgaggtggaggaggcatgttgttgttgttgttgttgttatcggacgcgtgtttccgcttacgcagactgcgctcagaaacaacaatcgggccatcagacgaaggttcttctttgaccctgataggactggcctcccgtttgcaaggtggtaacggtgggagctcaggcgcctccgtgggttggtctggatcatcagatgcaccatcctcagcagatggaccttgctcgatactgactattctccctcgtctgtggagctcgtcaaaagccggagtagagtgtctcatggtataatctgcttcgttcggtctgggcccaggggaaagatgcgacaacgagtccgtattgagccctaaatcgcttggtgattcacgggactcatatataatcgcccgctccgtaccagtcccctctgcatggtgtcgagtattcgcatcttgctgcttcagtcttgtttccagcttgttaatcttcctctccaaggcatcggcatacgtgatccacgtgtctctctcctctcgtgcagcttttgacacctcccttgcagtgtcgtaactctcctgcaccttcttgagtcgttcctccacctgctccttcttcttccaaagtttgccataattcttttcccagtccgggttctcgatgtcgcccgatgatgaaaccgtactcggcgcgcggatcgttctgttaggggaaaattccccgaggactcgtcggaccggagtgttgacatcgtacttggctggtaatatcggtggcttggtgtgcttctgtcgcagctgctccagctcttggcggagagatcgattctcttgttcaaggacctcggccctagaggcagcatctttgagctgctgcagttctatttcaaaagttgcattccgtctatcttctctttgtcgaacctctggcaaaaccatattgttagttgtctggacgagaaaccgggcatggaaactcttaccggcctcaatgtcatggccaattgtgtcgcacacagactctagcgcagcaatcaaagctggccgccccttccgttcccaagattccgtcatgatagggccaagcaaaaatatgaggaggatgcatttcggacagttgcaggaaatcttatactctggcaagacgcctaggcagaagcgctggtgggttgcatgggttgcatggattgttcctccgtaaacgccaacgaaccacgcgtcacgtcatagctcagcttccatgttgtacaaaataacggggtgctacctggaaacacggccttagcaaagtttagaaactttgaaaaatacctaaggtggccgttaggcagttatgaatgctttaggtaggccaggattgaaggatcctgtataacccagataaatctttccaaaagggtaaggtagagaaatacgctcaagtcttttcaatacctgactcttgtgtcagtccctattttctgtcgacaacgtgacaacgcgagaatgcgacgcgactcatccaagtacgtgctcacgtgagaggggctatttggaccacctcgccacccaacaccccgccttggtgcgacatcgtccctgcatgcctggtcgccatcgttgcaccagcagttgacggcggtgctggtcttgtatcccaacgtttctttgtgcgagttggccagatatcaaaccgtgactaattagatagcccaggatgcttttgccgccttccacgatgtctttggacattgcttgatagccacgttgcctcgcatctgcttcctcggccagtcaaccccacaaagccttggtcccggaccccttgaatcagatatgcaggtcaagacaccatccacaaaaaaggcaatggcgagatattccagatctttggtagcatatacgaaggcttccccgcaacatcaccttgtcccctaccacgactaggtctactgacataaaattgcccctgtcgacataggcggccagatatcatgccacgtcttctcacagccactcagctatccctaccctcggcccggattgactgatatcggatcacagtggtagtaggcttatcagatccaacccatggcccatcgttctgttaacgagcctcccttcccgcgcggatacttggcttccgtgtcaccagccatcgcaattgacgcaggcgcacttctggtccgttaaatctgttctatgaccagaccggtctccgaaccaaggctgagatgccggccagaagggacagctatgacgaacaggctgaaaaggaggctcttccacaacaccagatcatccaatccccaattgcctggtaagtggcaatgcggcacatccggcaatcaaacatacgaacacccttcccagagaattccagagagacacccgggagaaggggcgcgtagggccgcgttgagtgccatgccaggacaatagcctcggaacagttccagaaatcgccccgggttcgtctctttctcgcagttacttccctgatatctgcttccgaatagtctgtgcgagtagacatgtccgggatagcaatatggagagttgcgagaagggtatttcagcttctgtcatgttgaggcgcatgcggaggcagataaccatttgctgcaggaaagatgaagccaacaagggaccacgtatcagtgctgcattggctccatggcgagctgttgaaattattggaagagatgggggaagggagtagcagttcagacaaaaaggaggtccaccatctagcccaagtgctatgcaggggctctgctgtagccgtgcctggacgccatatgtatacaaccctcggcccaggatgccctttgtggcggacgagtgagattcccatatccaacagggcaagtgtgaaccgcaaactgcagggctagtcacagcacagtgtagatataccgtacggtcaggtaccgtgacagcaactttgaaagctcactggtgggcgcgcccagccgtctactaccagtgccacctaatgagatcacgagttgcaacagaccaatctagatgtaccgtctgatgagattcaagcttgataaaccggttggtagcaaggaagaaagtgcgacaaacggacggcagcaacaagtggctggcccctcacacgccagcctaagcaagatacctagtacatagagagatatagccacttgtagcagcaattgaagctcagaaatttgcatccaggtgccctcaggatctcagactccaagatcgacatcctctgcgccacagccgacctctgacggaggttgacggaggctgaaagattgctccggtcagaggagaattgctgggaactggaagctccagagactgccaattcaggcgaggtcgcttgtgagcaggggtgccccacacagactgtccgtccagaaaatttcaatcactcacaaaccacacagcagcacccgctccttcgctcgactttttttctgccccgactctcctaacctcgctattcaccggagcagtactttagttccccgttcccctccaaccgttggcagctttcctccctctccatccaacaacaacaacttttcccccatcaattgtgttgtgcgtctgccattcacacaaacttaccaaaggtcagtaaataccccacaccgtcacacctacccaccaatcgccccccccacctttcccaagtttgagtttgcgccctcacattccccaacctgccgacgccaaaacaatttttattttcgacccaaacttccctgacatcgtcgtctcgcccatcaattttcgattagctgactcttgtcgacgaccgcacagtttcgatatcctcttcacaaacctcacaacaatccaccaaccccactacactatcacaatggattcctacggttcccaaggacgtgcctgcttcacctgtgagtttgcccccgtccgtccagtctcgacgactttcctactcttcccttgcccgatactgtgacttcgatgccctcgctacacacaccgcatggctgctttcatcgggtggtctgcacatgatatacgcctcgagtatacgcttggctttctacgtccgcatgacccttcatgtcatgttctgtttgcagtcggatcgttggatgtcggtctgcgcatcagagtcgaacccttccctctgcttggatgccatcgcactggatcactgtcttcattggaaccgactttccatgttgggacatcctggttggacagcttatagcagtgggaaaccctcctgcctttcttggcaaagagcaccccgcactacatcaccatgacaccgcctgacttttgttgtgtgagggagagaagatctaacatgagagaaatataggcgggcagaccactcatcaggtatgacaccggcgacgagagactccttaccggagagaggtattgtcctgtttggtttcgagtcactgacatgttgcaaataggcccgcgactgccccaacaagggtgccgccaagtgctataactgtggcagtaggttaccctgaagacatacttcgctcgagatggacagaagactgatcagagatgtttgcgctttacagttgagggccacatgagccgtgactgccccgagggtcccaaggacaccaagacctgctaccgctgcggccaggccggccatatctctcgcgactgccccaccggtggtgaccagggtccacgccagggtggtggtggtggcagctctgctgagtgctacaaggtcagctcctgctattcggtgtaccacagtcagacgcctgtactaaatctgttgtcagtgcggcgaggtcggccatattgcccgcaactgccagaagggcggcaactcctatggtggtggctacaactccggctatggtggcaacttcaaccagaagacctgctactcttgcggcggcatgggtcatctgtcccgtaagttcttccacaacttgtcttgttcatacagacagctaacacgcactcttcaggtgactgcgtcaacggcaacaagtgctataactgtggcgtttccggccatctctcccgcgagtgccccaaggagtctactggtggcgagaagatctgctacaagtgccagcagtctggccacgtccagtcccagtgccccaacagcgcttaagttgcgggtgtagcagagacggagcgatagcatttttcttctcaccctgttctttcagccactttcagcctttgcattttgctattttcgtcaggatgagggtagaatggaaacaagtggagttgtagggaggggggaggtagctcggaggtagtttgacggcagggaccggtgtgcggccggtccaggtgaagtgcttggtgttcgcacatcggcgcttcgacggtgcattgctggtatctcagaggcaatctggatatcgctccgcttggcatttccacgacctgattgcacgcaatctaggtcgggacaaagattccccaaattttcctttttttcctttacttgtttttactatcgcaaaaagttacccattcgcaacttgtcatgacacgacgatcatacggacttttaccagggcaaacacggaaaagttttgcacaaccatattggcgtttgggacaggcagggctatctccaaatgggattccgagtcttgctcacgaaggcagcagcagagaagagatcaaccaagtcgcggatctgggttctgggttttatggcaaaaacggttttatgactactagatcatggatcgggactggaaaaggattcacgagaagggtccatagaaatgacaactggtctggttcacaacagtcgtggttctcgtgccatgtgtgtgtagtgttgaatttttgtttagagttgtgatatgttcacctggcctgaggaaagacatcacaagcaagtcaagaatcagaaaagtcaatggagatcttgaaattcaagcctcttgagggcccttctgtatgttgttcttacacctctaatctgtgctattccaaaaacagataacaaaaatatgtttacctcttcctatccctcattacatcggccccatgtccttgactaggtattcaatccctttccaaccattttttttctattttagttttcttttcttgttttctgtctcgccacaatttacaagacagccttgggcataaacttcatagcctgcctgacacccaaatcaccaagaacctcctcggcaccgcccaggatggagtcaaacttgtacgtcctgttgaagttctcaatcacgcggcccatgccggtctgggtcaaaccgcgaccaccccagatctggacggcctcgtcggcgatctcgtgggcggcgcgggtgcaagacatcttgaggagggcgatggggccgcccatgtgcttggcttgttgggagtaggacatgttgcacatttggtaactaatgatgacacaaaagttagtgggatgttgtggacagataggtggggaaaggggggaaagggtcgcttacgtgatggtctccagccaggactggtgagactcgcaaagggcaatcatcttagcgagcttctggcgaatgacgggctggtcgatgagcctcttcttgaagacgattctctggtgagcccacttgaggcactcctccgttacgagacgcatgtagcggatggtggcgcaggccatggtccaccgctcgtggttgaagttggagaggatgacatagatgcccttgttctcctcacccaacaggttctcgacagggaccttgacgttgtcaaaggtgatgtaggcggtgccggcagcgggggagtacgaggtcttgatgggcttggtctcaacgccctcgccgcgggggatgaggagcaccgacaagcccttgccggtgttgacaccggtgacgaagtagtcagagaagacaccgttggtgatccacttcttggtgccgttgacaatgtagtgcttgccgtcgggggtcttcttggcggtggtgcggaggccggcaacgtcggagccggcaaaggcttcggtgatggcgaggcagatcttcttcttgccagagaagcactcctcctcgaccttggccttgagggcggggttcttgtggccgtagttgagaacgcaggtgagaccaatgaccataccggccatgttgccgtcctggaagccgcggcaggcagcgcggacagcctcctgggagcagatcatgtcgtggaagtagtcaaactccttgccgtcgacggcaccatcgaggaggttgacaccgtggaggtgcttgccgggacccattctcatgtggaggacaccagccttggacatgcggtcgataagctcctgggagacgatctcgccggagcgctccttctcgagagcctcgggggtgatgtacttgtcggtgaagatgcgcatggccttctggagcttgcggtggctgtccttgaagtaaggggacttgaactggggggtgagccagaggggctcggcatatgggacggtggaaagatcgccagcttggggggtgatgatggactgcttctcgccctcgatggtgccgatggcaaggtcagagtacttctggagaacctcgtgtctgtgaaggttgtagaaagcggcagtggcatcggtaccggcaacctgacggaggacagcctcaccaccggggtgggcatctaggaactcggaaacatcgtagacgacggtgtcaatgacgaaccagacactatcttcggtgttgtgcttggcgacctcggcgcgggtgaaggtcttggaggggacctcgaggacggacgaggacatgttgatggttgttggttgatctttgagggtttcgaaatatagaaaagggagggtatcacagagatggatggtggaacaagaagcggtgccgctgtcgcaaagatcaagacacacgggagaaacctaaacaaagaaactggtatcaacgaggaagagaggttcacacaagaagaacagggaacaatgggtcgaggaaggctaccatgtggtttttattcagatctcgggcccagcaacctccaggccatcatcacctggaccagggggcattcctccccaattgaccgcgggtcactggacttgattcggcaggttgtgttgcccgtgttgttggacgacctcggctttggaagctgggctgggtcggggccctggaatgtggggaatgctccaaaatccgcattgcattgcctgtgattggctgcgtctccaagcccgtgccaagactcttccaggtcatcttgagcttgcgctgtgcggagcatgtgatgctgcgtcgatgctgtggcactcggcctgcggattggaacttccgagacggcgccatgactcggtttcttcaaagaccattgccagctcagaatcggcgaagattctctgccattttcaggggaattctgccgaaatacttcacggaaccttgtcagacacgctgtttggtgtcttttttccccgcggggaaccctcgcaggggggctcaagccagccgtcggcaagtgtcgtcatcgacgaccggcagcgtggggttgcgacagggattaaccacaaatcagtcagtggttacacgcctatttgggttcgcgggcgacctctttcgagctgttgaagagcctcaattgtttctcaacccatatcccgttggtcttcctcaaatgtcaaggtttcagcctgggagcggtgtttcctcgagtccgtttccgttgttgcatttgctccacgcaaccccgcattgaccttgccttatgcccccacaatcgaacagcttgttgcgggtgcctcgggcgatattgaacgacaggtccaaatcgagtgtttcgataaagactacagctgtgttttatctcttgtaccttgtttctcttttctagggagatacacgccaacactcatcatcagaggtggatatctcatgtttctggcttacggcggcccttatctcttccaccttcataggcttacaaagttgctcgtattgtaagtgtttctccatggcttggtgtcatacgtggtgtctgtggcacacacggtgagtgggacctcgtggttaagctctccgaccgcatcagctgcatgctcaagtatcagtgaactattggctacttcagcttccaagagactgctctagacccagtggtctggatgttcctttcaccggtgctacagttgtgtgggacagcagttcaccggcagcttcttcttttggctttccgagagaagatactgcactttctagattacctgtccaccactgacgagggttcgctgctgaacccttcataacccgctggtgtgctccggcataattcgaggctcttatcggcctttccatctgacaagggaggaccgataccaccaccaaagccgtccttccaatactgcaaggcagcttaccttcctgaccgactatgcctatctcaccatttgcttgcacctttgcggctttggtcaagcaatttatgaggctcagcatggcaggtgcaactcttgttggcccagaaggcgattactcccagcctttccccgctgaagtaccccctcgtgatgttcatctcatgagtatatccacccgtctcctcgtagaccatgaggtgcgggcttttgctcgacattcttttttgttaccgccatcattgttgcattcattcctacagaccatcgagcttctagtagttttacaatacttcttgcagtgttatcacactttcgagggttccaaaaaagctcaccaagatggatgcttactcgatgtcaattagtagcgcttctcggagagtcacctcgaagctgtatcaagatctgaagacagccaggctttacacttttgacagatcacataaggaactgggcatcatggatagagtcttacaggtacctgtggttcatagtagaagctggtgttaatgccgctaactcacttggtagttcgaatctttggatccgaatagaaaaccacacattgggattgtcggtgctggttttgcaggtcttcgatgtgcagatatcctcattcgatatggcttccgagtgacgatccttgaagcccgtaatcgcctcggcggcaggatacatcaagaaaggctccccagcggcaatctgatagacatgggcgccaactggatccatggcactgatgataacccgatcctggatctggcaaaggagaccaagacacacactggggtctttgacagcgaatcgtatgtttttgacgaagacggcacacttctatctgcacaggagggagagaaattctcaacggtcatgtggaatatcattgaagaggcttttgagtactctgagaagcacgggactcaaatagacgcggacaagacgctgttagacttcttcaaggagcaaattctcaagcaaatacccgatacactagagggatatgaacgacagaggaaatttgtcctgcagatggccgatctttggggggcttttgttggcagtccagttgagacacagagtctcaagttcttctggttagaagagtgtattgacggtggtaagacatcttcaagagctaactcgtatcacgccgacactgacattacaacagaaaatttgttttgcgctgggacctaccacaaaatcctggagagggtagcgaagccagctgttgatggcgctgatattcgatatggaacgcgggtatcggagatatacggaaaatctacatcacccaatggaactcccagggcgatgactgccgatggccagatactcgagtttgacgagctggttgtcaccacaccgcttggatggctcaaacagaacactcacgccttccaccctcctcttccagatcgactatccaaagccatccagaatattggatacggatgcctagagaaggtccgtgtctatcacgactttgtctgcacacatatgactaacaccccatgtgtcacaggtgtacatcttcttcccaactgccttctggcttacacctgatgcaaatggacggaaagtccaaggattttgccaatggctttcgccaaactattccaaagacaccaatcccgccggttggaccaacgagatcgtcgagctcgcctccatggggccttcttctcatccgacgttgctattctacacatacggcgatgaatcacgacatatcacatccaccttgcgctctctgccctcgcagaaagagaaactcgactttttgttcaacttcttcaagccatactactcacggctaccgtcatacgacgagaacaaccccgactgccaccctgtagttgcggtagccactgactggcttggtgatgatttggcggggaatggcagctatgccaacttccagaaggggctcaaggagggcgacaaagacatcgagatcatgcggcagggaatatcgggtgaggggatctggctggcgggggagcacaccgcgccgtttgttgctctggggactgtgacaggggcttactggagcggggagggggttgcaaaggaggtggcggggagttatgggaagaggatggcggagaagcttggaaaggaggatgccatcaccaactgaagcgtagttcatcatgatatctgtgtcaaaacggtggtggggagagcgaggtccaggctaataaggtagcggttggttacattcctgagcgtccacagatttattgttttggataaaggtagagcagttacctattgtagcttagcaacggcaagtcacagcgttttgtttgctgtctggaactccctgctgctgttgcctgtgccttgtctgcagcgcgagggctgcgctgcttgcgaaatggtgaggcgggcagagtcaaatgactgctttggtgcagacggttgcatctcgaggagtcagcctgttgcaaaagattccccctagccgtggtagcacccgccacgtcgtatttgtgtgagtctcccacctggcctctcccgacggttcaaaaacatgccggttttcaatttcccagcacccagcataaggcatccagcctccgttctctcttggagctggttccagctgggccagctgggaaggccgacctaagtgtcatcggtctgaggtccagtgccggtgtcatggcggggcgctcctagcgaacccctaaggttgggaaagtggggcgcctaagctcactctgtgactctcttctagtggaggcggtttgctgtattcgtatccctgccacgcccagcacgctaccgataaggccgatcaactgattggtgtgtggttacacccagagcttgtcacgggtcgtctcttgcaagctgctcaccacgtcaactcccagttgcgcctcttgcctatgtctggaaaccttggaatcccgggggcttctttttggtttgtcccctaaaaaccctaaacaaagtacacaatactatccagagaaagcctcggaggctttttgaaaatcttgtttcgttgtgccctaaccttcacccttacaccatcgctgtcactgatgatgctcgccccaatatgaccttgccccgcacatccgcctcatcgtcccccagacagttggacgattgcatatcgaagtgcctgtcagctcatcgaaccatcatccgatccgatacccaaacactgagatatccaaaccagcatacttaccagacggtgacggtgacggcgacccggtgaaaccgccccgcgcgcgccgaacgaccggcatcgcagataagcgataacgatcatcgcccatcatggcgtctttctttccgtcgtttcgccagtcgcggatgcccaagcggctgcttcggttcgccctggcacggctagacgttctggacgagacagcgcttgacttggagaaccttgattttgccgttggaacaaacacggtcctggaattccgagatgtcgggcttgtactccaggtacgcacctgccgcctagtttttgatgctgaccttgagatgctttcgtaatttgttgcaagggctgtctatcctaacatgtcgtaatgtgaaatagaaactggagaagctcttggggctccctccaaccttttcgatccagaaagccaagatcctcgtcttgcgagttacgattcccatgaacatcttcacaagcccgatcatagccgaggtcgatggtgttgatgtccagctcaagattatgtcgcaacaggaggtggaacagcagcggtcaaagaagaggaggagatggcgggccactgatgatgtcgttccgactgctgccgaccttgcgcagtcgttcctggaaacacagccggtatcagagaagaaagagctggaacaggcacttgttgcggaatcgcaggacctcggagcttcagtaaccatgagtgaacctgagagcgatgacgagtcgtcgttcggtaccggccaagctctgtcactgccagctttcatgaccgacttcctccagggcattgtcgacagaatgcaagttcggatacatggtgtttcattccaggttgataccgaagtgccactggacgcgaactcccagccccctgagttggtcacttttcgactttcgctggataaggtggatgtggaaggtgtcactacatcagcagatgatgctgagggcggtccagagattgttcacaaggagggcaaacggcatattcttctggacaacatccgagcgttcctgatcaccgaggcaaatgtgttctcgtcattagtaccatccccgacgatgctatcttctcaaggatcagcccagtctccggaagcaactgaggccccgtcatttccaactcccggcgccaatctggcagacagcataagctctgcgtcggtaactttggatgattttgcgcaacttcaggctcagatgcacgatagcgaggcggcgctgaatatcccctacgagtttgaccaacctaatacgtttgttgaatatgcagagccgaattcgcctggttccacaccccgggcatctctttaccaagatatggcaggccttggtcttcaggagcacgccaagtctacgcttgtagagccgggggcttcaagctggtctgctccggagagagaagcacagtcagagccttttctccggcctccagaaggcttcccacttggttcgtcggtctctcccgctggctctgtgcattcagaggctgctagtagcgaatctagtggcggagccgaagaccttacgcaatcccatctctacagccacgaggaagctgagagcatgtacatgagtgccttctcatatacaggttcggtaaagctacgcggagcaatgcccggatcttgggatgagcaagagtccgtgtcatcggggggaaaatccgacgccgctggcccatcatctgcacaaccccagaattcacccccaccagaaacacagggtggacggttctacaacgagactggacaaccgccagaccagtcctctctatctccccaaggcacatcgccaatatcaacgcgaagtcccgttgccgaattctcagaagatcacaatctaggccaagaaccagagcgccaccaagatgacatcccgacgcctcgtggacctaccagattagtgaaagaagtcatttcactaagctccatatcggtctatctaccatcaaatcacaagcacctacacgtcacgactcctgacctcgcaagtactaccccaaatctcccaggagcattttcggtccactcacctgaacctctgagcccctcgtcacccgtttccgaaaccccggctgaacacccgcctcttgacccatctattgaggttatcctgaagccgatagaggtgcggtttgatgcctcgattgggtttcttttagccatggtggtgagccgcctgctggaagcagtgcaaacatccgaaaccagcaatacagctccgtccaggtcagactctaagcctgcgctggacctcaaactcgtagtggaaggtctatcactccaatttttggagaaacttgcaggtgttgccgacacggcacagaaacatttcgagaagcggtcaccggactttgcgtccgatgtcctcctgcaagcaaatttgaggggaatcaaagcttcgctctcaagctctggctccgacatggaagccgatattgctattgaaaagctcacatttgggtatgccaatgaccagattatatcgtttgatcgatccgttcaaatgtatgaatctatggctgccagcactctcttgtcttcgggacaggatatctcagtcaagctcaccaagagctctggaaggtcgagcctcaaagttaacacacttcctctacatgtcaaactcgatctcccaaagttggatgaaacattcatctggtttggaggcttgagcagcttcctcaacatgggctcttcgatcacctcgaatcctgcaaagagcacaactgttgcgccgcagaagcccaagggtgttcgattcgaaaccccgagttcggatgatcgacctgtcagttcaggtgacaaggctgagatgcgcatcaatgggatccggctggatgttatcgggagagactgtagcatggcccttgacaccagcgctctcaagttgatcaacaggggagaaggcgtcggtgtgcacttcagcaagatacagctggcagggccatatcttcgcaattcccaagctgcagctcccatcattgccaaaattgtggacacccggatcgagtttgtcatggcgccgcgggaacaagatcttgagaggcttgttgaactcatcactccgtcacagagcaagtttgacaaggacggggatgagatcatggttgacatgctcattcgccaacggcgaaaggggtcggttctgaacttgaccgtcggcaaagtcaatgtcaatgtgggcagacttcagcagctcagctgtctacccagcttggcagaggatcttgccaaactcgggactgttgccaagtatctgcccgaagatgaccggcccgggttgctctcttttattcatgtcaagagctttgaaggcgctgtcgacattggtggacgttttggagcggttcaagcagccattgcagacctggaggtggctcacatcacggttcctactctagttgctgttgctgtgacaggtatcactgtcacaagaaaccaggtcgaggaccttgtgacgacaccaccaaatcccgcaacggcctcgtcaccaaagccgcctgttctgaggatgagaatggtggatgatattgagccggtcctcaaagtcaggctgaacgggctgaatgtcgagtacagagtgcctactatcatggccatcttgcagctttcggaggatgccacaccgcaagactatgaggctagccttgcagcctcggtcgccaatcttggtgatcacgctcataccgccatcaagggctcaccagctggttcagcatcgtcggggcaagaatacagttcaaagcccatcaaagtcgacgttgctttcgaggactgtctgattggcctgaaccctctcggcccgccatccaagttgattcttgcgctgacgacagcatcgcttgaggtggtacccggaaaagacgagagtgtacatgccgtcctggagatggataaggcatccattctgctcattgatgatgtcacggtattggacacgcctggggcaccgtttgcttcgaagcgacggcccaaagtcattcctacaccgcagatcaccgagctatgttccaagggttttgtgcacatcagccaaatctccaaggctcaggctgtcgtgaacacaaccaaggataagaacggcgattcgcagctggaggtcgaactacgtgacaagcttctggtcatggagacgtgtgccgactcaactcacactctgattgctttggcaaacgctctaaccccgcctacaccgccgagcaaggaggtcaagtataagacatcgattgttccggtggaagatctgctggcttccatcactcacgacgcgtttggccgcgctgagggtgattatgactttgataatgatttccttcctgttgctggagagcacagcggcgagatggatagtgagcatgactattatggcggaccaaacgatagccccctcaacatggactctcagttttacgacgacgaggttatccacgaagagcttttcgatgccactgctcaatcgcttgacttgtcaaaaaccagagttgaggagacgaacgatggtgtcttgctcagcactgctagcctgagcaccgacaatagcacagacaatagcagcgggcgtctctcagtcgaagaagggttctttgagaaggagtcggctgtcaagggcacagcgcaccggtggaactctaagaagaacaagtatgatgatggtaacgacaccaagattcaacgaagcccgctcaaggttggtgtgcgtgatgtccatcttatttggcacctgtatgacggctatgattgggtgcggactcgagaagtcattgccaaggcggtcaaggaagttgagaacaaggcatacgagaagcgggccaaggctgaacgcaaggatgacttggatgaagaagagattgtgggtgacttccttttcaattcggtgtacattggaattccagtcactcgggatccaaaggagctggccgccgccatcaaccatgagttgggggatggaaacgataccgagtcggtcgccaccacggccttcacaacctccaccattcgccctgctggcaagcatcaccacgctaggtccaagagcctaaaattgggcaggagcaatgatcacaagatcacatttgagctcaacggcgtgaatgtggacttggtcaccttcccacctgattctggggagacagtcagctccatcgatgtccgtgtccgcgacctggtcgttttcgaccatgtggctacttccacgtggaagaagtttgtcacatacgacgaggatgcgggtgacagagaggagggcgcaaatatggcccacatcgaacttctcaacacaaagcctgtgccctctatgccggcttctgaaattgtcttgaaggtcagcattctgcctcttcgtcttcacgtcgatcaggatgcgctggactttatcacacggttctttgagttcaaggacgactcgacacctgttcacgcctctccgagtgatgtgcccttcatccagcgtgccgaggtcaacgacgtgcctgtcaggttggatttcaagccaaagcgggtcgactatgctggtctcagatcaggccatacgactgagttcatgaacttcttgatcctggaggattcccgtttggttcttcgccatgttattctttacggcatcgccggatttgacaagcttggaaagcagctcaacgacatttggacggacaatgtcaagcgcacacagcttcctggtgttttggctggtctggcaccagtccgctctcttgtgaacgccggcagcggcttccgtgagctgattgagattcccatcaaggaatatcagaaagacgggcgcattgtccgcagcattaggaagggtgcgacccgttttgcaaagacgactggtacagaggtggtgaagttgggcgccaaactcgccatcgggacacagtacgcacttcaaggagccgagggcatgttggttaacaagccagctggagagtcaagtagctccgcggctcccattgccatcgacgattgggacgagggagatgagtacgaagccgaagaggagacgaccaaccggcaggtcagcctgtacgcgaaccagccgcttggtatcctccagggcgtgcggggcgcctattcgagcctggccagggacctggcggtggcaagggacgcaatcattgcggtgccggccgaggtgatggagagcacgaacgctcagggggcagccaaagctgtgctgaagcgggcaccgacgataatcttccggcctgccattggtgctaccaaggccattggacagactctgctgggcgcgacgaacagtctcgacccggcgaacaggagacgggcggaggcggtgagttttcttggtctgatactacagtgaaacaggttgctgactttgtgacagaaatacaagaaataatcgagtaagaaaaccacagacgagggagtctttttctagaaccatacatcacaacaaaggcgtacacctagccttgcgagattgcatggcaagttctcaagaattaataatgatttgtttttacgaagggagaaagagaatatcacgaagaggagggcatgaatactcggagttttggggggttgagacattctaaggattgcgggatctgggaaggagtttttgattttcaggtcatatctcttaggggtctctctatctgcgctttagttttttttttcttttcctctgaagacgattatttagtgttttggtcaattgggaggagaagaacgatacagcatacccccatgaggtctcggtagtttttggttcagtctttattttgttttagctctctctgtgcttttgagggtgtggtgatgtgatgaggtgatggttgttgcggttttactcttgacccgttgtgatcagctttgttgagctctaagataactgcaaatcaggggaatatgggacctggaggctctcaagtttgcattctactctagctagacaggttattgacaggaaaataattaaaaatagagactgtaatgagatgccaaggtgtagaaaaatagttgatatatctgtgctggaaccgcttctggcaatcttgaaactgacgtccggttcttccaaggcctgccaatatgtacttgaggtgcaccgactacctatctttcagaactctcatcccaagcagcagtcgccattttcttgtccacaagggaaagaatgtgaagagagcacagtagtcaagactagaaatcagtactcgatccttttggttcagtgttgatttatgcgatttgcaaacttgggttttgccaaatgctactcccagcaccccagcatcatcatcgagttaagatgggtatggatgggtgtgtttaactcccgctagactcattcatctccctctccctcgcctttctctgctctcgaaggtgggtctctttgcttattctctacgggaaaaggtcagcattgttatccgttctctctctactggccgttgcaaataaagttgtcgtgacagggaaggggttaggtaatatactcactgcgtttgtctttgctgcttggattgacgatcgggtgtagctactcatataaaactcatcagcaacccagttgcgatgtaaatagcggaagcgtctgcgggcatgtgctactgtgcaaggcaggtgtgacttacacgaacaaaatcgaagccatcgtgaaagccgccatcggggccatgaccgtctgtttctgtcagcttcacatgcacgcgcccgatgacggagagaaaaagaaaaaaaaaccaactctagaattgaatttcaccattttgaattcttgcaattatcccatttcttgcccatgtgccgtttactcttgagatgctgggtgagcttaaaaggtcgacgacgttaaggtttagcgggtgttatcggagagatccatttccaaaaaccgcttctcaaaaggagcgagcaagcgacatcacaccacttttccagaacttggtacaaacaccacacattcaatgagcacagtacatgattcagattatcaatggacgagtaatagattttgaacctttttgatatttttttttctctcattctttataacaacatctatcgtctctctctctctgtcccctatgcaattgtgttccccttaaaaactccagaccccaaatccctttaaacccccctctccctacttcatctcctgatgaaaatcaaagccccaatgcaagatgcgacaaataaaatgagggaaacaataatgtgtccatatcatatcaaccaaaaatatgacagctcgcctgcctgccttcgtctgctcgctcttgactcgccttgctttgctttgcctcgcacatcaaacaaatgctgcttgcttgcttgtcaagtgtcttatacttacaaataatcttatatgcgcctctcttcctctcaagaaagggatttatgaatccaaaatctctctcctctccacgctgccaccaccctccagcttctgcctccctctctccctcagcccgttcatccgcctcatcgcatactcatacgtaagcatcgtaaccgtggccgccgggacagccctcatcatgttggtccccatgcccgcgtagaaagccatccaaccctcctccctcaaaatagtgcggaaagtggtcacgatgcccctatatctcggaccgctgctaaccgctggcttgttctgaccggaagcagatggctcagtcactccgagaccctgcatgtattcatgccccggcatgggtcttcgctgagtctgcaatcttgttcggatgacctcgtggggataggtagcgctgctggccatgatcttgctcagaatcgacgccgacaagatcccaaaccagtgcgatttgtcttcctggccggctactggggcagcacccatggacgtgccagtaaatttggtcttcaaatattcgtacacggggaattggaccgctacgtgggtgagaccgagaagggcgggagtgaggccggaataaaacgagagaataccctctgtggtgtacatcttgcgcgcagcgtcaagtgtcgatcggtagtgccatggctgatggagcgtagggcgcgaagttggcgtgttgctccccttaggatacagcgaaaatcgtgtccggtcatggccagtcgtctgtgacattagtcgtgtcttgatcacccagattgggttcgtagcaatcgtgctgctggctcctgctatgatggatgaccagaagttgacgacaaatggtctgtctgtgaccggggtgtcagtatccccccactttccaggcccaaagatcagttcccttaccatgatattgtgacagataaatcttgctcttgttgtaaaccgtaaaccataccgcccatgttggcagataccccataatgatcggtcccaagcccctgtacatccccctgattccctcctccctccagataatgttagccgtgccaaacaggcccttgtagactactctctggtgtccggtatgtgggctgttcttttgcatcgccaatattcctccctgagcctgcagcttcgtcttgataacatccagcgggcaagtcacgactccagacatgaaccctcccaccgcgcccgccagcgcattgaactgcgagtccgaggcgtcgagtgcccagcgctccgcaagcgtgagctgttcccccgccatgctggcgttgccccctccgcctgccccgcctcttcccgaatggtcgctcgtcggctgcgaagagggcggctcttcgacggcgggcgggtccggaagcgctactccatattccgctcgaggcgcagatacggcttgtccgtcgggtgtgaggtggtgatgttggttggacatgcccgcgtctctgcgcgcgcggaaaggccggagaggggcactgtaacccgtcgttttttcctcggttttgcagggtgatttctactttgtagaaagataattcaagggtctcggggccccaaatccctcagagaccctagggaggtctcagggtcgtcggtagggaaagatgttcccttctagatcgtatgatgagtagatgcgaacaataccgtttgcgattgcctgtgatcgtggtcgtgtgccggatgtgcggggaaggtcttatactgtgttggggtgtgccggaccagcagaggggtcctttgtatgttgcgcgatggagctgtgggttgtcaaattgttgcgaatctgtccaggacggtatggcaggtacgtgtcgtgcaagagagaggaggagagaccgagaaactgacttgcgcgaaaacagcaagagagtcgagcgatcaacggcgctggtggtggaggagaaccttgaaaggaactgtgtcttggcagccggccttacatggatatggttgagtgtggattgcacaatcgcacagcaagagaagaggcaaagttagccgtgtgtcggcgctgaccgggtcccctcttcctgctgctccgtgtgtgctccgtccagtcttttttcccaagtgtcgcaagaatcgcaatcgtcacaagttctccttaagaagaagccaattacgtaggctgtggctgttgggccgttcttggtgggctgctttttcaagccgagtcatgtaacgctgctttaccaccgtaacgcaacagttccgacatgcgattctaccgaggatgagatagatgtgtttgagtctcatgcaaatccccaaaattctcgaaagatgggttggagcttgtgaactgatgtctggtctcattcccgtctcatctctcatctctcatctctcatctctcacatctctcatcatgcattgcagcagttagttcaattcaagctcatattcagatggtcgctggattggtaggcggcgggcgggatcagcgggccaaaaaagcagcattacctcatcgctgccttgtgaagcataagcatggaaaatccatgcctaacttttcaggcagcaaatcccaggccgcaacgggttttcccggggcagagctctgcctgtccaattgagccaaccaacgtctgctgattcccgacgcggcaatttggcaaagctcccaccaccaagcccacccacccagactgctggtcgtcgcaaagttgcaagtgtgaataccttcaacctccacacatccatccaaaatgacggccccatccctcgccagctatgtcaccaagcgcccctggctctccaagctcctgaagcccgttgccggctggtacagcaatgctgccctctaccgtcaaatgggtctcaagtatgtgcattatatcgcccacctccagaaactgtttccctaaccctataccctcctccctctctccagggccgatgatttgatctccgaagaaaacgccgacgtcctcaaggccctcggccgcctcacccccaaggagtcctacgaccgcatctaccgcatccgccgcgccacccagctctccctccagcaaaagatcctacccaagaacgagtggaccaagcccgaggaggacgtccaatacctttcccccatcctcgaggccatcgaggctgaggccaaggagaagcaggctctcgacactcttgtcccctccaaggccggccactaagagaattgccctgaacttttgcttgcagccaaaaagaagaggaaccgggagtggcggagaggagaaaagggagggaaactgtattatgatcatggacccaggtctggaacagaccggggtcaaggagtatgggaggggaggttagatggggtgggcagacagaaggtgtgtggtgcaagaaaaggggaagggggggaaacgccgtcagacaaaaaaaaatagaggacgaacgtttaagaaacccggacctgttgtatatctgtatagagggctcctcaatttttctcggtagaagaaatcaggaaagactcgctcacccattcaatctgctggtcttcatgctgtcagttgattttgaagagtttgtcggattcacggaaatacgaaaggttgccgaagagctatggcgaggtattgatttcaacttaacgagaagctatgaacacatgccgctcctatctcatgtctccaaaacatacgagcactagaacaccgaatgactcgactgaaacaatcaccatcacaattccctatccaaacacaacaagttacaagaaccaccaaatcccctgctcttttttttataccaccgccccctataccacccgccagtccctcagaataaaaaaacaaaagccccagaaggttttaaaaaacagtaagagatagctaacaaacaagcctggctggcgggagtaggttcgtgaacaacaacaaataaagcagatggattactttaatcttttctctttccatccaacccgtccctcctcatgaaaagagcaatgttcaacatatctgatgatcccctagcccgtactctgcgccgccaatgaggaaaaaaaagaacgcaatcaacacgaaacccagccatgacaaagccttcaatatgtgaagcccacatcagctcttcgggtatgtcccgagcattccgtcatactagctaaccacccactcggaccacaacagcaacaacaacagttcaaagaacagagggcaaaaaaacggtgctccgggatttttaaaaggtagtaaacgatgtacaaggtgaaatatttcagacatggtgtattttcccgtgtctgtgagatgcctgttctgattcaggctgacaagaatatcgtggttttcgatgtggatcatgagcgttcgtataacggctgatgcgttccctggagcgctctgtcgtagtggtgttctagtattttgtggaacgggcgccccctggccgaagagaagatggtgtggtcgggggcgagagcggccgccgggtgccagcagtttatacgttaccgcccttctcttcggtgtcgatatgccagacgacgtagttgggaaggccgtaaacaccatagccagccgccttggccatcttggcgaacccttctgtctcggcttggttctcaaatgcgtaacatgggaaattgatgcccgatctgtgaacgtcggccttgaccaagatgttcacaccaccaataccgtcaagttcgatctcctcatccttgttgttgcgccagtcacccattctagccatgtaagtacggccggtatcgtattgcttgtaacctagagcagaaagttagtgttattcttatatcaagaccgaaacaggagaaaacacaccctcagccagaacaatatccttagacagcttcttggcaagcgcgcggcccttgtcggattcgacccatgagttatagtcaactagcattcagttagcaccgtgtcctcgcaactatggcataaaaccacaacgtacatcttccttcaatatccttgccattctcgtagcggtgaaaccaaatgtctgccacaagttagcgcctaattaccccgctgaagctattccagggaagcttactgggaacgagaatgtcccgatcgtgggcaataaagtcctcgagaatcttctcggggctgtccacgatatctacatccctccagtacacccacgaatgctcaggcttgagcgccgtggtcaagaggtagttgcgggccttgcccatggccttgcgccggggtccctgggcctcgaaggaatgacgctcctcgacactctggctcagcttgaatccaaagtccttctcgacaatcatggcgctccggaacttgtcggggcgcttctggagacggttgagctcggcagacaagacagcgagggtatcatcggtagagtcgccaacgaggaagccaagatcgatcaaattgtgggggtatgtaagctcggcaagaagctcgaaatacttggagaggtagggggcggcatccttgagaggagtgagaatgagaactcgttcttcgttctggacagccttggtggtggacttgatggggttcaggtcgacgtggtcgatggtggactcgttgacaaccaggggcgcgtggtgattaaagattactggcgtgtgatggtgggcgttccatgctgcttgttcgttctgtgacatctcggaaggtggtttgttcgggccccagcagtagaagctacacgcacacagggcatgattagcactctgggcataaatactttcaacaaaaatggggacgccgtacctcttcatctgaggagcggacgagctgatgccgcgccataataatattattgtgccagtgatagcaagaagtagaaggaagcgggttctggtcaacagcacccatatcgcccgcgtagggggaagactcgctctcgcagccttccagctgacgccgcctttgggaagaagcatgatgttcgaggtcgccgggtggccctcagcaccaccctacaaggtcgatggtgcaaccgttgcgatgtgcaaaatttccgctgttgtctcgccgtccaaagtcgtgcaagttggtgcttcaaaaatccaatcggtctgggttgacaaggacggtattccgggacacagttacgctcacagatacgcgagtattttcgtgtggcgtgagttacgcccgcgacagtcgagatgcctggagtaggagaagacggtattcagaggaggggttccaaatggaagaatcgtcttggttttcgtcaggaatcgcttcttcttcttcttcttcttcttcttcttcttcgtcgtcgtcgtcgctgaacgggctggctcgtgatggatgggaggaatgtgagaagctcgaagtcgagcggacagcgttcagcaccccatgcacgcaagtctcggctgcgttctagcgtctgcgactctgtaggggttgccggtgttagggggtaagggtccactttcgggaggttctggacacttggccgcccaaacatcccactcaatttccacaggcctatgattgcattttgagaacatttgacttgttcaaaatgaggccgtgatgtctgtgcgggcctgctatttttgtgtctttttgatagttgtatatcgatgttgctgatctctctggttgaatctgtgatcagcatcacgcctctgcccagtgtacactgtacatctcgctccgtccgtcctgcgggtcagcttccttcgaccctccaccactttttgtgaccaagcatgccttccttgatacgagagagattgcgtgtccatatagagagtgaatgcctctggttatcaatgtttcggtttacgaacacaggcggcagcaaagatgcaaccacagcatatcaatttaacgataggtgcagatgttcccgtcccccatcactagccaatgccacaggcacgcttgttctgccggcacgaaccaccatcccacacaaactcccaaactcatcttgagaatttcatctgatgagcttcgcgaaagattagatttgtcaaatgtcgattctagaaaccaatgcgggtcttggtccagttggcattagcctatcgatgattcaggcacaagtttcttggctcaacctctcctcttgagagcttggcgttgtttgacaaacaccgggacgggatcttttccacccgctggttggaattgcggcgtgccccccaagcttacctcagcttcgatgccacccacgtgagagggcgacaatgccgtgatgacttgggaaagagcgcgtctctctacgtgtctctgaattgtagctgaagtcatgatcttataacttggtcttatagcaacgttctctctcattctcactagaccagtctcatacccggctagccaatcaacgatcatcacttacaacaagctcgctctccagaccttgccgaccttgttccgtggctgacctcgacaaccgtggaaacctgcggcaattgtcagattggttccaggtaatgctcattcgctcccatcgacttcactattcgaaagttatctcggccaatactactgcagttggtttggtaaaaccttcatggtgttccttctttcacaagttcttgtcaggatctcagcctacgtcattgatcccacctttcttgtcgacaacaacagtcaatacagcttcagtcagcagcatggaaacaagaaggtcggctcgcctcggtgccatctccgagtctgccaaaatcaccgagccagcacctgctcctgctccaaccaaattccgcaagagaaaagccgtcgaagaggacgacaatgagcaagacaccaccccatcaaccccccgtcgacctcgtgctgcccccaagcccgaccgctaccaagcaccaccagcaacaccaacccccaacgcagtctccctcatagccgaaccggtcaacacaatctccaagcccaaacccgccgcggtaaaccgcctcgcagaccccaaccgcaccaacgccctcctcctatcccctcaaacatcccggctcatctcctccaccaccggcccctcagtccaaccccctacttctccctccgccatcccgctagaaggcatcaaaaccaccccctccaccacaaccaccaccaaccttctagaagaagcctgcgcccacctcatcaaagtcgatcccagaatgaagcccctgatcgagaaacaccactgccacatcttttcccctgagggcctatccgagaaaatcgacccgtttgagtctttggcgtcaggtatcatctcccagcaagtctctggggcggcggcaaaggccatcaagaacagatttatctctcttttctacccgggcaatgacaccaccaccaccacccatgagaaaaagaagttccccaccccggcggacgtcataggaaagagtatcgaaacccttcgcacggcggggctgtcacagaggaaagcggagtatcttcttgggctggctcagaagtttgtctctggggagctgacggcgcagatgctggctgatgcgccttatgaggaggttctggagaagttgattgcagtgagggggctggggaggtggtcggtggaaatgtttgcttgctttgggttgaagaggatggatgtgtttagtactggggatttgggggtgcagagggggatggccgcctttgtggggagggatgtgggcaagttgaaggcgaagggcggggggaataaatggaagtatatgagcgagagggagatggaggagattgcggaggggtttaggccttatcggagtttgtttatgtggtaagtttacgtcggcattggatgtgtgactgagtctgaagctgatgatggttttgatttaggtatatgtggagggttgaggagacggatatcagtacgatggagtgaatacctcgtgctgtttgctcatgtctcaatattcgacataccgctctcgatttttggagcattgaccagccggaatttttccaagtcaaatcctattaagtctcaactgccggagtcaacttttgggtgtctggctcggcacatgaaccgaacccaagaatctagttcatgccgtttcttgcccgtgtcaccataccccaaagttggaatcccggtcatgcagttcagttcaagaatccccatcagggccgcaatctaaatttccaccaagtttctgtttgtttcagatttacttggttggtggtaatatatatcgtattatatcccatgttttgtgtgttgtatgtggtatttcctgcttgaatgatgcttgtcattgggaggagtttaatcagacccaacaagagaaataaactgcggcggaatggatcctattcgcgagaggtggtgatggtaatcttgtttggtgattttagtttggcatttaggcttggataccgaaacagctacatatatccggctcttatagcagactctcatgatttagctatggatgtcggagagtgtagcctggactttgaggtaaacaataatgctatataccatcaatacgacgccaagtaggtgtgggtgataccgttgcaaactctatgcaaaacatatatgtatgcagtttgatatgccgttgcggatcaagagtacatcatactgcccactcaaggcaacgatttgacttcagctgccagtatcccatgatgctatggacatcggttggcctgtctcataatcatcacttccctcgcttcaaccagatgctgccatgctgtcaagtatcgtgcaacagctaggggggtgtaagtcaagacaccatcaacagacaacaaaaaacgtcaaagaattaaactctccctggcttgatctggagtaccaagtcctgtcccaaagcgccggcattgggacgaacctttgccaaaccacaaaatccagtctgctactcctccacatcccaccccttgggtcaagcccacacgtatgtctttccccgcatattgatgtcatgttcagtgtggattgtcgcaaaaatccccaaacctaattcgtacatgtcccagaccttaaagcaacgtcacaggagatctgacatttcgcccattatcaaaaccgttgccaagatattgtggcagcatgccaatgcgaggctcagtcggtgctacagacggcggcggcaatatggcccgaccctggcctcgacctgtcacaaacaattgtcatctcttcttgtaaaaatgaggtctcaaataatgcgagataggcaccggaaatgttcccctgtggcgctggacactcgcacaaaatgtgccatatgtacgccgtagcttggtttacacgatcttcaacgatacggattccaacatcaggatcaaagactcacgattgtcgtcagccttgttgttcaaacgcccagcttgcgtaagcttgtttatcccgttctttctgtgacttgtttcatgtcgcatctgcaaacccccaatcgagaaaagggaaacccccgtgtgttggacatcgagaacctctggatcgaatgattggtggttgtcgtgcacggtccatcaacagcaaaaagggggcgctctagaaacggatatcgaacggctgggtgtggccatatccgttcacatttcaccagcgcggatcaagataacaacgcagcagccagccacggcacagtgttcccgtccgcaggccaggacaacgggatgaaaaatgtgccgtcgccgtgacgcccatggtggttttccacgcggacgaattgaacgactcgagaccttttgggtgatgatatgttgaaatgcaaaaaatgcaggatttgaccattcttgtgtgttgtgttccatgccgatcacgctccctgattttgaattgcagggtggagttgtgtctctctcgcttgagtgcgacattggccaattgaaattcgcaattttcgtatcctgaaatggccgttttccttcctttccagaagcctgatcaaaacaccagacttttcctgtcatcggtcgcctccctgcctgttactatccgtccaggtggccacaaataccggtatccggaggttcgggcgccggctggtagaagattgtaaccgatgcgggcgggatccctcagacaaaagaaccacgtgccggaacagagaacagaccaaatggttgttttcggtcgttcttgtggttctttgtgctcgtgcccgtgcccgacgtcataccgccgcgggctggacaggtaccgatcagtgtaagcttcgttgacgtcgctgctcagaacctgaagaagctcctcctcctccgcattctctggcggccgagctagtgctgcaatcacggctacacaatgcaacgcagggacgttgtgttgtggagtgtccatcttttcctttgatctgtggtcttgtttgcttgctgcccgttgcccggtggccgtgttcatagggaaaagggttatgaaatcggacgggccgaagttgaccgcttcgtgatcagaagacccaggagacagcattgatggcagggagaatttggccaaatcttgagatcccggcgagtcccattttcctaattcctgcgagattggttccccggcccctgtcgagccaagccctccatcgacggcgccagacgctcaagaaaaaaagcaggcagctcggccgagcttggaagttggacgagcttccagggcgcccgactggtgattccttggaatcctggcccacctcaacccccggacgtgacacggttatgtccacgcctgaggcctcaactcaaccttcttggtcaccaacaacaacatagacagaatcagacaaacaatgacagcttgagattattatgaggagcccaaaatatgccaagtctcgcccattgccgtggtgaagcagatccagatccaagtggagacctgtgctgtcgcggtgaaccactcagggcctgtcgatgctggcggtgcatgcgcacaccccacctttcagcttcttgtggtggtgttcttgcaggggcgtgcccgtaacatggctagcgtacctgcaataatttagctccatttgccccttcctcgcatgtttctggtgccgacgtgcctgtcttttctgccccttggattctacttttctcaagccacgcctctctctctccttccctcatcacacctttcttcctcccgtcattttgaaggtccttcttcacttcatacattcgttactgtcaatatttctcccatcgtcgttgattagaaagagtcctctcgctcactctttctctccctcatcacgactttctcaccaaccaaaaccgaatcccgcgtcgcgtccatcctcccgcgccactaatcaactaagacattccggtatcccgcgacgccattgaagaaagaggtgcgttccaatagaaggggtgttcttgactcgtctccctcacatcccactgtgtacctgctgctttcacaagaaaatcctgaacccgacaagacacccgagaggaggagctgcttcacagtcgatcagcggaaggaaagacatctgctttgcgcgccaggcccgctttgcgtggaccatcttgatccaattgcccgcctctcagttttccttcccacaactcgagctgtgaatcatcaaacttttttggactggtttcccccgagaacaacacaagcattgtagcactacttctgatatcactgcacacccaacgcactttttattcatcttcagacattcaacccacgagccattgctgacatcgatcccatttactcagattcagcaaaatgctcgtcaagaacctcctccctgccttcgtggcaattggctctgccgctggtgagtccatgatgcgaacatctcgtgaagccatgacgaggtgactgacatgctatgacaccagcccaaagcggcacctgctccatctccggaggcacaacaaccatcaacagccaggccgatgctactgggcttgcgagctgcagaacggtccgcggtagcgtagttattggacgcagcgccggccccagcattgatctctctggccctggtgagatcactggcgaccttaaggtggccgacaatggcatcatcgagaccctccagagcagcgacctcgccaccattggcggcaagttccagctgaagaatgtcaccaagctcacctccgtaagcatgtctaagctcactgctgccaaggagatcgagtgggacaccgtcaccaacatcgagtctgtgaccctcggccccgtcaacaaggtcgacgacatcagaatcagcatcacctccctcaggaatctcgatgctctcgacctcggcaacgttgccaacctcaagcttgacaacaacgcccgtctgtccaagttctccagcaaccttcgcaccttgagcaagaaccttgttcttgcttccaacggtattggcggcatcggtctcgaggttgagctccctaacctcgtctgggctgtcgagctcgacatcaacaacgtcaccaccttctccgttccctccctcaagactgtcaacggcagcgctcgcttcggctccaacttcttccagtccttctccgccccaaaccttactgccaccagctccggtgatatctccttcattggtaacgccaagctcaccaacgccaccttccccaagcttgaggccattgctggtggtctgaccattgccaacaacaccaacctcgatgagctcactggcttccccaagctcaagtctattggtggtgccgtcttgctccgtggcaacttcgagtcgtaagttttgaaatgttgaaagtttgttggacagccactaacatgatggaatttagtgttgagatgcccgctctcgacaccgtccgtggtactttcgacgcctcttcttccgccgacatttccgagtcttgcaaggccttcgacaagctcgctcctcagaaccagggcggtaacggtgtcatcgccggtggctacgactgcactagcaacaacacccaggccaacgaggataccgacggcagcacttctggcaacgacggcagtggcggcaatgatgacaaggacaacggtgccgtcggcatggccctcaacaccggcctcttcgccatcatcgcccttgccggtttcgccgtggctctctaagacgggaagagcaatgtctgatttacgaacaaggaacgacaaatctggagtttatgttgccgattaatcgtggctgagcgcatttgcatcacacacccatatcacgcgcagggattactagacttaatactcttaccaaacatgctctttccttttgacgaacgttcctcgtttcctctccctcgcctgtgaagttttttggccccctttcgcgcaatcaacgaagtcatgagagcagtcccctggtagaactcgacgcagagttttatcgggggctaggaaacgagaacgcggttaagtggaaggaggatggttgagtagagaggtgttggacaggagattcggttgtagtgtgggctgtggagaataaggaaacataataactgggtgatgggtgcggaagaggataaacatcgctctatgatttttgactggttctagcggcgttttgtttatttgtatgaaatctcttacacgttgtaatatcgatgggggccgcgagccgtgttgctggtgtcgtattgtagggttaaaagcgaatatgatgattgtctgttgagttttggacttggtctgttgcgtacttggggttcaactgtgacatggtatttttcgggaaaggatgtctcatgttcatgtccttttccgccactatcacggtctttttctgtcttggggaacgataagaataagcagtctaacagcacagccctctcactgtatacatatttgctcgttggtttcggtactactgcgttgtatatctggagacacttgggggtctccagataattgctgttttggaagttgaccaaagtagaaatattgtgtctcttgcatggtctttggttttccatccacgaccacctctacctagatttatttatacctagagatgttccccacccccccccccccccaaaaaaaaataccattcctttctctatgcagccaagtatctactcctcataaaccccttcctcaaacttttccgcgtcgtagaacccagcccgaatggtgtttccattgaagattcttccttcgagggcattgactgcctgtgatatcatgtcttgtcagcaacgctatcgaacgtttagtgtgttactgcagttgaaacttaccctcaaagccgaaacctcctccacaaactggatatacaccctcttgttctcccccagcctttcactctgatcaataaacagcctctccaccctcccatacttttccccgcactcctcccctatctcctgccccagcccagcctcaacttcagcggccaggttgggaatgttgaggagcatatcccttagcaccactaccctgctgatcttttgcccggcgttgttgttgttgttgttgttgtcttgttgcggctgtgagggagtggaaagtgacttgggggcaatgatgcgcccctgagcagcagccggatcccggaagccaccgccttccgcgtcggatttcttcttgcgtttgagaggctggacggacagggcggaggtgatgccggaggaggaggcgccgaggccggtgccggctgtccagccgtatttggacattagcttggttgcaaaggctttgccgcgggtcttttgcggaagggagccggccacgttgatggaggagtaatctacgccttcgtgttcttcggggtcggagtcgaggtccattgcttctgggtcggttgggggtggtggtggtggtggggagtatcggacgggagcacgggatatggttgcggtgtcggtggggggaggtggtggtaaggggctggaatcgggcggtggtggagggggtggttgttgttgttgttgttgtgacaaggccaaacggcgggcgtacgcgtcgtcaccggttgcgtcgtctggtatatttgctgctgttcttgggggtgacatggccggcggtgcaaagttgaacgaggtagggggtgcgaactggctgttcatgcccattcctctgcggtctggctcgtcttcgtcctcatcagtgtagcgatcctggcttcgtgacttgcgtctgtgggcgtagaggatttccttccactctcttacttcccgtattcgttcgtcgcttcggaggtattcttctacgttggttgggcgggcggggtcgtaggtctcgtcccagtttgtttgttccctttcgtcggcctttttcttctttttcctcctgccgccacgctgacgcttctcgttggaggcgctgtagaggtattcatcttcctctgttgctgcccagtcggccaatgtgcttcgctgtggtggttgcgctgctgctgctgctggggcacctggtgatgctgatgctgaggggacagcggggggagctttgggaaaggatggtttcggtttcgctgttggtctgttgacttgtggtcggcggagcataggctgaaagcgaagagctgttccataggttagcaagaatacaaagctgtgtatgcgcagaggacacacctggatctatcgccttcttcgggggaggcgcattgttgtctttggactcgttctgatctttggatgcaagcgcggggctagagctgctgtcgccgactggatcaagtaagttggcatatagggacattccgcccccgctaggacgcggcggtggtggtgctgacatcttgatggacctatgtcgaagtggttcgttgtgaaagttgatgctcagccttgcacgcgaggccaacgtggatgcagcaaacaattggagatggccgttgaggtgccaaaatagtgggtccggttgctactcttttagtggaggccctaggagtacggagtatacgtgcctcttttaagtatgctttttctgaacctatgaatcaaccgcaatgaagtcccatactgcaaaattgttatgatgcaagggaaattgtattaaggacgtagagagtccatgaaaatatatgtcatcgctcaaaaatatccttattcatcctactcaaacctcgactattcttaggacctctgcttcgggaccttcttgccttccatggcttccacgtccttcttgtcatagtaatgccctccaaactctgtaagccacttggggtcaatggggatgacactcctcacaaactccttgctcgtcaccaccaactcgtggtaaataatgacccttggtggcggatcaatacccctgacgacactgctcgggtgcacgtataccgtcatgttgttcttcagcgtcctgtacccgtcaccactgcggttcaacctagccgcgttcaagaagaaggccgacgttagagctcgaagaatcgggctcatgttggatatcccaccgcaagatgattcggacccttcgagcactcgatcgcacagtttggcgagctggtctcggacatcacgggctctggtcaaacttcgctgcgtgaggaagttttcctttgcccagatgggagagtagtccgagtctacccattggttgtagacattgagcagagtcaggtggtcaccaccgtccttgacagtgaaccgcgccctggcagagtcggcgtggaccgccttgtccttgggccggaagaaaagggttgctacctcgccgagcattgcgacaatggtgagaacctccgaaacacactcttcagcggtggccgcgatgagtgccttggcaagcataggttcagctgggaactcgcccatttgccgaccaacacgtgtcaaggcgccagcggagttgagtgctccaagggcatagagaaggttgagagacttgatgagaagctcggtgggtggggggtcgaggaagtcaaagttgaggagatcatcgatacctaaagccttgagttgcagaaccacactggagagcgacgtcctttgaatctcaggagttggcgattcgtccatttcggacaagtaggcaaacctggtgtacagacggaagcattttcctggacggacacgaccagcacgacccatacgctggttggcggcagctcgagagcagggcacgacagccaacgttgactggccagtcgtaccgactgggctaaaggtgttctctttggcataacccgagtcaatgacatagacgatgccatcaattgtcagcgaggtttcggcaatattcgtggaaaacaccacctttcttgcattcggtggcgttggttcgaaaatcttggcttgtagttctgaaggcatgttggcatagattggtaacgcgatgatttcgggcactcggctccctagctgccgcttgatctctgtaacctgctcgcaggcatggtcaatttcttcttgacctgtaaggaacacgagaatgtcgccttcgggttgcgtcgcgtgcagttgaaagactgtggcaatgctggcttccacatagttggcttcgggcttttctgtgtagtagacctccacgggatggactctgccgggaacgttgaagatgggcgctccgtcgaagtaaccgctgaacttctcagcattgagggtagctgacgagataatgagcttcagctctggtcttgctctggtgagatccttgatcaaagccaacagaatatcggtatggaccgttctttcgtgggcctcgtcgatgataatggccgagtatccttctaatgtcggtgatgttaccatctccctcagaagcataccatccgtcatgtatttaagaatagtcttctcgctggtacagtcttcgaaacggatcgagtatccaacctccctgcccaccttcacgcccatctcgtcagcgacacgagcagcaacactcatggccgcaacacgacgaggttgcgtacaggcaaccttcatcccttcgttagtgtaacctgcctcgtgaaggtactggggtatttgcgtggtctttcctgaaccagtctcaccgacaagaatcagaacctggtattctttgatggcgtccagaaaagcctcacgataggcgtatacggggaggctcttccggacctcttggatggacatgtgcgcccgttccgctgcctcgatccgggccttgagtaccctctgctcctgggtcaaaccgtcactaggctgggtgagctttgcggccgcatcgcgaacaaatgcaatgttatcttcgtccagcaagaagtcgtacttgccctcctcctcctcacgttcccggctctggatttgcgcctttgccttgacggtttgttctcgttcccattcttcgtactcggtgatgtgcttctcgtttccgaactgatccctctccacatggcgcctgttcagcgcctcctccttcttcttgctatcggccccatattggtcaggtagacggtagccgtcttggtagtcgtcgatgcgcaatcgctcctcggccagccgtaggatttcccgatttttggcgaagtctgctttttcccgttccgatagccgtacaccagaccgcaactcagctgtctcttccgcgacctgttttcggagcagcgccagcttctctgtttctctcttggccaggtagtcaaggcgtgacttgaggcgcaagtcgcttattttggagtcgtcgcgtccggtatcaccgcggcttattttagaaccgctccctccgtccctttccctcctgtcactgtctctttcgctgcctctttctcgtggagagctggaccgtcgatgtcgtggcgattcgtcgccatttcgtcgcctgcgccgcttcggagaccgtgaccgatcgcgcttccgctctttggatggcgcggaagggccctcgtccatagacacaaaggcgtatcgtttgttggaagccattgtcgatgccttttggttgatggtgatgatctgagaggcaacaacacttccgatttcttatcttatcagcaagggtgcacaggcccttggaccatccttcaaggtcctctcaaaaggtagagagggttaaggttccatgtttcccctcagacctgtaaagaccacttcacaacttgaacttcgctcggatctcggtaaatatttccatggccttcttttgaatcatgaattgccgttgctaacagcaaagcctcaaaaggggctctcattcgcctttcactgttcagcttcatggccctggcagtgcgatatcgccacgaaccaatcagatgcaacctctcaacgcacaaccagtagtgagttaacagggacaagtcggtatgagaccgcttctgagacatgctagaggagtacggtatgtctcgggaagttctgtaccttaaacactgatgtttctctacaaaacaccagtttcctggtcttatacgtgttgaacctgccatcaagatgacttccatcgctgaagctcacggcgttcggcacagttctgttggacccactcgtctcaagttgtcgcagctccgatgacacaatgcggtagcgccgccgtttacggataggagggcagtgacggggggcacagatcgacgcctctcgctattcattcaaaaagctggaacttttacctcattctgaagatcccatcaattcatgtacttgccacttttgtacatttccaaaagcctctcaatcggccagcactgtgatacccttccatcttctaggtaacaccattggcgcacacctcagttcccgctatataacacttggccgaatcacgacacaaaggagacaatgtctaccctccaatcagccatcaatggggccagccatgccgtggctgtaattgtgccatccaaacccagccctctggtgatgacatacaaggatctgctggctgaggtgctgtcgttccagcagaagcttgctgccatcggcatcactcatgggtcccctgtgtctatcgccacggttaactcgtacgaattcatcgtctcttttctcgctgcttcatggcagcgtggcattgctgcaccgctgaacccagcctacaagcaagaggagtttgagttctatattgaggatgtcaagtcagctattgttttggttcccaagggcgcctaccagaaaggtgcgcctgccgtcaaggccgcccagaagttcaacgctgccatcgctgagagctattgggatgaccaaaagaaggaggtcgcgctggatgtcaaggaacttgggcagttgaatggcaaggggcaacaaccgctgctgaagccgcagccagatgacattgccttggtccttcacacaagtggcaccacctctcggcccaaggttgtccctctctcccaccgcaacctgaccagaacgatgagaaacatccagcaaacataccagttgactgacgcggaccggaccatgctggtcatgcccctcttccacgtccacggtctcctctgcggtctcttggctcctcttctttcgggtggttccatggtggtgccaagcaagttctctgctactgaattctggcaagacttcatcacccacaaggcgaattggtacactgctgtgcctaccatccaccagatccttctcaagcaccccaccccgaaccccctcccaaagatccgctttatccggtcatgctcgtctcccctttccccgacagttttccatgctcttgagaagacctacaatgcccccgtgctcgaagcgtatgccatgacggaggccgctcatcaaatgacatctaatcctcttcctcctgcaaagagaaagcctgggactgtgggtatcggtcagggtgtcgaagtcgtcattcttgatgatgcaggaaacaaagtgccacagggcactgagggagagatttccattcgcggcgaaaatgttacgtctggctacctcaacaaccccgaagccaacaagactgcttttacagccagtggctacttccgaactggcgaccagggcaagctggatgaggatggctatgtcgtgatcacaggtcgtatcaaggagctcatcaacaagggcggcgagaagatctcgcccatcgagttggacaatgttcttacacggaacccagccgtctcggaagctgtgagtttcgctattccggatgagatgtatggccaggacattggtgttgccatcgttctcaagccgggccagaaattgagcgatgaggatgtgaagaagtgggttggggacaagctggccaagttcaagattcccaagaaggtctatttcactgatgtcatgcccaagactgcgactggcaagatccagagacgcatcgtggccgagaccatgcaaaagaaggaagggagggcgaagttgtaaatggacgcgagtatttgcgggctgcaccaagctagctgtgtgcttgatttttgaatgaggatctggctgtcagtgggtaattttctaagataaatatctcaaggttgtgtggtttatttatctggttcctttggctagttatgcaaatagaatggcatgaaaagtgtctttcactctatattagtctacccatggagaattgaggagtacctgcatgggaaggcaaacagactgtcaagcagccaaaggagtcaggcatgcaactccatgtccgattgatcaatgctctaatccaacaaacgaagtgacttcccttatctccaaacctttgcccacttgtgctgcccggtaattccagtttgttatcagctttttcgagctgcgtgtatggaatttaacaagtctcgcatgaaaaccaaacctgctgttgctgatatggtctgtgcgcaccccctgatccaaagtaaacaacggccccttttccaagctgacaaccgccaattccgtaacaaacagaccttaccaaagatgataagcaacggtacaacacactggctttgccatggatttcttcggtgactctaccgtatcaacctattaaccgggtggtgttgtgtttcccaggttgtggtcgcttttcacccgtggcccagttgctgagcagtgccttccttcctcgtcgatagctcctgccgtggcaagcacatccagcaccaggcctacatcagcacacacaaggcgagctgctccttccgtttggaatcgtagaacgaacgcagggcacacagtctaaattttttccaggtaggtatttattctcggcgacctgcgtgtcctctctccctcttttcttcccacacaaaccaacacctctccaattttgaaaccggcgacattgtcgcgggtccgcaccctctgaccgattattcaacgccgagaataccacttcggctttgtttgaccatcagcctgaagtatttattgtcgacttccttgggtacttctcgctctgcttcttgttgtctgcaacaagcagcaaccagccacgcccgagacttcaacacaggtaagactcccctctcccctctccttccatacccacttcccagcctttccttcctggcccaaccaaggcaacggcctcatttcccaaaccctgtctgctctgcctcttctaccatacctcgacccacggcatatcaggtcggtcgagcggctttttccagtttttccaacaacctctaccactgaccgaccgactgacttcaaggaaaccctggaactctcgacttcagaaacacatcaccttcaccagtactaccaagttgacccgtcgccaaaatgtcttgggacaacgggaacgataactggggcaaccccactcccgccgccaccagcggcggtgacgattggggcaaaggttctgcttccaacaacaatgatggcaatggctttggcgatgacagcttccgcggtgttgccacctctggcaacggcggttttagcgatgctgccccctttggcggcgacggcgagcaccgcggcgagaccgggtaagtccttcttgatcaccctcctatttccagcagacatcatccctaacatatcatcagtcacaacaaggctgattgctccaacccgcgcaagcctcttggtgcttgccgccgctgcggtgacgaaggtcactatagcaaggattgtcccactgctggtcccatgacctgcaacgcatgcggttcaacggaacaccttcgcaaggagtgtcccgatgccgggccaatgctttgcaagaactgtggcgaagagggtagtctgttgctgcctgagtgattgacaatgacatcgaatgctaactccttgcgtccaggccacaccatctctgcttgcgagaatgctcgcaaggtggaccgcagcgaaattcccgacaagactactgaggaagcttgggagttgatcaagactgctgtcgccgagcgcgacattgacgacctcaaggctgcagttcagatttacgtgaagtcacagcctgactgcacttatcagcagctcgagtcggccttccgtggtcatgacctcggggtttggctcatcgcccttgagagacccactgtctctactctgaccaatatggatctgcagggaaatcttgggaagaaatacacggtgtcgtaccgtttctcccccaaccccgctcgcccccgcgagcgtgagggttggcccgagactgaagaggagcgtatggagcgcttggctgacgctggcgagctcgttgctggtggtttgcccaagtgtcgcaactgcgaccagcttggtcatatctctaaacactgcaaggaggacaagcgtgaaaacgagcgaatccaggtcaagtgctacaactgtgacgaggtcggccatcgtgtccgcgactgtaagctctggtctcgctgggtatgtgatgcagagagctagctaacattgattgaaggcccgactcctcgcgtggacaagttcgcctgcaagaactgtggacagcctggccatcccgtggctgaatgccccgagcctcgctccgccgagggtgtcgaatgtcgcaagtgcaacgagagtaagtcatcacggcccatgtgtgttccttgaagctcatgatcttggactgactggttcctgtgttagctggccacttttcgaaggattgcccgtctgccggtcctcgtggctgccggaattgtggccaagagggccacatgtccaaggaatgcacagaacccaagaacatggataatgtgcagtgccgcaactgcgatgagatgggtcacttctcaaaggagtgccccaagcctcctgactgtaagttgatgtcgtttctcgacctatcgatgacgtgcttgctgacaatctctcaaacagggtctcgtgtcgagtgccaaaactgccaccagaagggtcacaccaaggttcgctgtccgaaccccttggtctcggatgaggacagcggcggttttggtggtggtgacggtggttttggcggtggtggtggtggctttggcggaggcgatggcggcttcgacaacgctgccccttgtgccgacgacggcggctggtaatgcactgcttcctacatctctatgggaatatggtctttggggattttggatggaatctttctgagagtttccgtcaacttgagctcttgatcttctggggctatttcttagaagagttttcttttcacacagccagcaggtaccaatagggtagctatcttgcatgggctttgtttccgctctgacagaaaacgatggtttttttactactgaagccgattgattttgtgacgcaaataagggcggtgttgtgataaacaaatatatttatgatctggcagttatatacacgagccatgcgtgtttttccatttgttcccggcttctggtctacttctggcctactttgtcaagacaccaatgatgtgtggcatggtctggaaccaaggcgagttggccggttgggccagatcgacttcttgccacgggcccgcgtcttggaggaggtacttggatgtatctctgcacatctcacagccacccacgaagtgaggccagaaaatgttcataaaggctgattatctcagggtcagtgatgcttttgagatgattgttagacaaaaaaaggaagacatacactgataccaccccagccactttggctgcttgggttcccagggctccccttgccccggcagttccccgtcaaaagtcttgacgtgctcgtacacgtaccacttcccgtctggcttgaggtactcgtacagcatcttgatgtttttttgcggctcggggatcgagcagaggcacatgacggtcatgacgctgtccacgctccccttttcgatatgcgccaccgcctcgaggtcctcgatcccgacggggatgacattgtatctcccttccaacccggcagttttgaccgtttggcgcagggaggcggcgtttccctcgttcggctcgacgccgtagatcttggtgatggaggggatttgggagagggtggggagccacattcccgaaccggggcctatctcgaggactgtgccggataggggggggtggattggggatgggtgggtgatgcccctggagatgtgccctgataaaagggggatgacgagggcggaggagttttctctgacttgggggccgacgaaggaccagaagcgggtgaaccagagggatttgaggagggggaggttccaggggaggaggagggaaggttgggagaggatggttcgggggaggaaggtgagggaaaggaggatgaacttttgggggaagaggagggaggtgaggatgtcccagagggagtattcttgcttcatgacgggcatggtggtggtggtggtggtgttcacttggaatggttcaatttgggagaggtgtctgtgggaaaagttaatgattaagaagtgagctgagctgggagggaaagggacgtactgaggggtaggggtgtgtttggtccatatatatactcttacacagtagtagggcggcttatacacgcttcagcctgtccaatcaagctgtacatcgcaccaggaaggaaacagaagcctcaggggttctccattttccctcctccctttgtacccgaaagacttggccgatatttgccgggatgcgggttagggttaaagttcgagaccagggactgccagcgataagaagatagctggtgcgtgcccaatcagactcgcacgataagatttacatgttcccaatggccactctgtctgcattggaagctcttcttgcgccgtgccgcgagctgatgggtgccgccctgggattctgtataagtgtactttactcttgggagcgccaacgaaatttcgtggcaaacaccgtctgatttctcccttgaattttttatatcaggacacgttcggccacttgtcactcgtttcagacttggttcacctattcaccacgtcggcgccctcgcgcgcaatcccctgaagctatcacccaagtacacccgcagactcccacagcaggggacacacacgacacatacggtcaagatgaggttcggcaaggggctccttttggggctgcttgcctttgcgcaagttgtcatgggcgaggattactacaaggtccgtttatgccgttctgtctccccgtcgcaagtttataaactaacatttggtgtcacaggtcctcggtgtcggcaaggacgcaacggagaaacagatcaagtctgcctacaggcaactaagcaagaaataccacccagacaagaacccgtacgtctctctccgtgagcctcagccattgcgcagccaatgctgaccttgaaaaaaacaggggtgacgacacggcccacgagaagttcgtcctcgtctccgaagcctacgaggcgctctccgaccaagagtcacgctccatgtacgaccagctcggctacgacgcctacaagcagcgcaagcaaaacggcgggcagggcggcggtcacgaccccttcgacctcttctcccgcttcttcggcggcagcggccactttggcaaccgacctggggagcgccgcggccccaacctcgagctcaaggtcggcatcgccctgcgagacttttacaatgggaaaacgacagagttccagtgggacaagcagcaaatctgcgacgagtgcgaggggaccggtgcggcggataaggtggtgcataaatgtcatgcctgcaacgggcagggtgtcagattggtgaggcaccagatcgcgcccgggatggtcacccaggtgcagatgcagtgcgatcactgcggtgggaggggcaagtccatcaagcacaagtgcaaggcttgcggtggcgagcgggttgttcgcaagcctactcctgtgtcggttactattcagcggggcatggctaatggggtgcggatcgcgtatgagaacgaggccgacgagagcccggactgggtggctggtgatttgctggttactcttgttgagaaggagcccagtctggaggaggacaacccggaccatgtggatggtgtgttctttaggcgcaagggcaatgatgtctactggaaggaggtgctgtctgtccgggaggcctggatgggcgactggaccagaaatctcacacacctggacgggcatatcgtacggttagggcgcaaaagaggggagatcattcagcccggccacgtcgagacggtgccaggggagggtatgcccatctgggacgaggacggggacagcgtctaccacaagacccagtttggcaacctctacgtcgagtacacggttatcttgccagaccagatggagagcgggatggagaaggagctgtgggcgctgttccaaaagtacaggcaaaagaacggggtggatctgcacaaggatagcggcaggccagaaaaggttgttttgcatgaggacagggagcaggagcgggagcatgaggagttatgatgatatatttttggtaaaggcggtttctttttttttcttccaccaacagctagagagcggaaactagatgggtttcatttttataagtatgcggcattacaatgtattacatggacgtaacagcagacaagaaatcaggatattccagtcgtatatgtgtgtgtattacccctgagttgtgatccgtttccataaagacaaaataagcaaagtcatatctaacgtaaacaacacattgatatatcgagccaaagataaaaaacatcaaatcaacaaaacaacatgtataagaaaccaagacgtaaactcaacggcaaaaaaaaaaaataaaaaaaaaaaaaaaaccaataaaaaagccaaaacgcaaggtcattaaaagtcatcaccgattcctcctctcccgatcatcactatcatcatcatccctgtgatatcgcctactactcctcctactcctcctccgctttcgatcttcatcaccgtaataatcatcgtcatcatggtcgtaatcgtgagaatcgtgacgtccctttttggtcccccgactgctctccccccgctcatcctccgtctgtctcttatcactcctcttccgccttctataccgatcatcgtcctcatcatcaccctcatcctcactccgatcgtgaccccgacctttgccctttctgtctctactatccctgttcccatcccgactaccgcttccttcaccgtgaccaccttgcaacagattgccgcttagcaaacccccaatcaaccccatccaactccccttcccttccaagactcctgtgacattttgcacaatcctctccaccgtctccttgtccgtcccgctgacagcccaatcgcccatcatgttcagcccattcggtccctttgggctgcggtactcaaacgaccccttcctagaatgcaccccaccccgcctgtcttcatgcccctgggcggtaagcggtctcccctcgccgtcaaaccgatctggcagctcctccacggcagattcatcatcgtcatctgataccgctttggatttcttgcgaagagctttgtcatcgtcgctgctggtggtgggatcgaggggagaaggaggcgtgatgtcgctgtcctcttctgcgcctgaccttgcggcttcctgggcttcgcggtggcggcggagggtggcttgggatttaggggacaggggaacgaagaccaccgagcgggcggtgcgaggggtgccggggatgtcgtcgttggggtcgtcggtttcggtttggggggtcatgatgggggatgttgggggggagtagaagggggtgagcttgtggtttagaccatctaagacatcaaagttagtgattcaggagagctagattgtgaagatacacggcagggtatatatcatggatggtctgtaatgtcaatggggcaaaagggctaaacaccgagaccagacgcacccttcttgtcgccttctacgttggggcgggggcttgtggcgacggtggctgcataggcagcggctgcagctgcagctgttgctgggatggaacgaccaacgacatgagaagcttcattactcacatgttcagggcctgggggttgattaggtggcggaccttggggtgctggcggcggcggcatctggtgtggagggggaggtggcatgccgttgttggtggctgccgagttgggcgggacaccaggcggttgaggggagaagccggtgtagtcaggtgggcggtagggctggtactgctgctgatggaggttgtccgagacgtagttgggatggttggtgaagccgttgttgactacaggctgcggcggcggcggtggttgatagtatccgcccgaggcatgggctggagatggcgttcgtctgtagtcgtcctcatcctcatagccttggtatcacgttagtagatggttccaagtcagctttctggaaaaacagtcagttctactcacgtctttggtcccgctctttgccccggctcttctcccgctccctcctccgctcgatgtcacggtcatagctcctatctcggcttcggtccctaggcctgtccttagatcggtctctgctcctgtcacggtcacggtctcggtcttcgtcacgatctctcctgctacgatccctatcacggtccctatcgcggtctctctcacgatccctctctcggtctctctcatctctatccctttctttttccttttctttctctttcttgctatcacgaaccttcttgatgccaaaggctgcagcgccagccgcagcagctccggcagccaagtctctcagcttactgccactcctcttctccttgtccgtctcgggctcgctgtcggccgagtaatcactatcatcgcctctcgatcgtcttcggtggcccctcttcctccgtccgcggtgtcggccctcctccgccgcggattcataccccgctgccgcggcagccggtcccatcgccgtgccgtaaggatcgtggggacgggccgggttcgcatacagggggtgcgccccgtactcaaccatgcctaattcaggatcagtgggtggaaggtcagcgtcggggtacgtgggtccggaccgaggtaaacttctgcttctgctgcgccggcgataggattcctcatcgcgcgcatagtgctcttcatcgctgagctcgcgctcacgcttcagtgcctccttctcgcgctcgccctccttcttgtcctgtcgcttgtcgtacatcttcttggccccggcggcggcaagaccggcggctaccatctcggcgccggtgcgcaggcgagatcgggagcggctcttaccatcgcgggacttgcttctcttgtggcggtagtgctggacgagtccaaccgcggcggcagtgccgagtccggctttggctgctgcgcttttggatcgcttgcggctgggggaacgggagctgtcgcttgaagcacggtggacggggcgtccgcgggccatctcctccttttcgaccttgttgctctggtacagtttggcagcgccggcagctgcgagagccacagcggcgataccaagacctgtcttgagcctagagtgaggtgaccgcgaacgagagcgcgaacgcgagtgcccatgccgagaccgagagcgctccctgatgatgatctccttgtccttttctccatacttgtcttcgtaggcgctgtgagcgcgtctggcaacctcggtaccgatggctcccagggcagcgccagcgaggactttgcgaccacgcttctcaggaagctcaccctgggcattgcggcgagatgctagaatggcagagatacctgcgccagcaagagcaccttcggcaatgtggcgcttcctgtggggactgctcgactcctcacgcttgacgattctccgtctgacatatacctctttgtctgactcggcatcgctgtagccgtcatgatgatggctgtgacggctatggctgtggtggtgatgatggtggtggcggtgaggctcgccatagcgttcaacctcgtattcttcacgttctccacggaaaggaccgagctcgcgagattcccggcgataatagtattcctcgtcccgagtggggatgcgggctatcgccacattggtctcttgagcctgttcacggatgacaagaggcggcggtgggggcgcctcctgaacaatgattctctgctcagggacacgttggcgaatgacgatgggggcaggctggacgacgggttcgtagtattccgtctccttgcgccagcgttcaatctctccgctgtacctgtcgtcgtcacggtggtcacgctcctcaatccggcgttccaccacaacctcaccgccgtgggaatcccggtgctcgaccctcctctccactcggacttcagtctgcttgtcctcatcccagtatgaacggcgttcccagtcacgaggagtcctcggcgagaaggcatcttcgcgatcgcgctcggctcggacaagttccttggactcgtagacaaccttggggcggtcggtgatatcctgacgccaatactcgttgttccggtcatctcgctccacaacctgcctctcaaccacggtgcgggtccggtcatagtcccggtcatcccgctcccgctcgataatacgctcccgctccacaacagtgtccctgtccccgccgcgatcgcgatactcggtccggtcgacccggatgaagtcgtctctgggctcgcgctccctctcccgctcgattacctcacggcgctctacataggtggcgctgtgaggcgacggctcgaaggcagagcgaggacgctcgggaacgtacaccctctcaacccgacggtcgacctcgatgtggtcctcccgatcccggcctacacggctgccgccaccatatcggctgcggcgatcctcctccacgacctcgatatcgcgctcacgctcgcgctccacccgatcggtcttctccactgagaccggtccaactttgtaccgacgcactgtggttctcttgtagccctcatcgtcggagggcgacgtgtcccgggcgtaacgggactcgcggtacacctcgggcatggtgggcgagtttgggtcggtgttgggtcacacccaagtggtgggtagtagcggtagtagtgggagtagtagttatgagatacgaaacaaaactcgcgatgtgggtatcacgaaaaaagaagaaaagactaacaacaaaaatgtggaaaagttgcagagagatttccaacaagtggaaaggaagggcggggtgggaagaaaaaggctgagctgttgctataagagagcgagcccgcaaggtgggatgtggaccgaaggaaggagatggagggggggggggggcactgggggctgggcagtgcgcatgccttgtcagcgacgggggagaagccagaccttggccctgcaacacctgcatgcattatggcgctgtaagcaactgtaactaaagtgacttattacgcagggcaaggaacccgtgaaatattcgctggaaacccaatcgaggcgcagttgtgggctctcttgcgaggtattccggccgtgtacctgacattctccccctctttgatcatgtatcacacgataggctctcccagctatctcttagatgccgatgttggtctgcaacccaggtcgagcttgttggcgcttccgccatgttggtcaggggccacggcctatgcgaacagactatactatgatcctcttctcctaaaagaaggcaaaagaaagcggcgttgcgaaacaacggaaacaaaactttgcgccatgcgccgttaagagagcagagcggggtcctgaagaagacggtcacaaaatgtggcctcgttgagtgagatatgactgcctagtgtggaaagagactgtgttctcaatggcctgcgccgctctcatgtccagttggaccagtccagcctctcttctttttctcggaagaaaaatccaaccgcacctccatcatcaaagccggcagcaagaggttctcacacagtgggatatctaatgtgatccaatatcgaagctactgcgagagcaatgaccaagttccagcctatgaaaccaccatgcagccacaccttctctgcatttctagcagcagtgctacccgcctggtcacactgcctgggaatccagacgaattacctcatgaacccagtctgatcaagattcaacatgatcgagagaggtgcgagagtccatcatcctggaaccttcatcgcatcgtgtgtgccggcttggaagcttctgggtccacgcgcgttcctcgttttgaccgggtggcccctcatgagttcactcgaactgcgaccatgggacggcaaaacgaacggcagctcaggatgagcccagccctgtgactcggtcatgatatgggaaaaggtggttcaggcggtgaaggggggtgaggtgactgttatattgccgtcgggaggttcatcgcaacaagagcagctgatgggatgttccgtcagttacccctcccccgcgctgcagttgacttctcgtccaggggctttacatatctacatctactgaacttgcagtcaaacaatgcattccatcttctgcaggatgaaaagattgatccccacaagagtgtatctccaaaatacctgcgtgaatactgcagtgactgcctctttgcctgacaatgtgtcgaggcccaaaagaaaatcacagcaagtgagaaccgcgcgggtcagacatatttcgtcatctgccccactgcctgtgaagccaaggctacaatgccaagatgtcttttttagcgtccttttgggtctcactcactaacatatcgctttcacgaaaaacaggctgtgagttgaaatctctacttttgtgatgccgtggcaataaaatccacgaaacgaaacacaactgctccatgaaaagaggccgctctactccggccgatttgaccatcgggcctctcggtctcagatcctcagctccgaatgaccgtcttcttcaaccccggagcggctcgggtggctgagtgagtactaggctgaggctgagcttgcttctcgatacatgaccgttaggggccatgacaaggtattaaaacggctcgtgattgggtgtcttgtaagttatggctaatctatgtatggaccagtcttctatcgttacatgaccatacttgtaccaactgtaagtgagccggtatcctaagcagagcctcatgtactgtgggactgtgggcggagaaggatgacaccaaggtgaccgtcgttcttttgatatcaagtggcctgaagcgtatactatagacaagagtggaagcggcagttgatgggaccttgacatgccgtgctatggggtactgcgatctagacatggagagctgacgagtgatggctattcgacataggtggactagaataggagtgcgatggtgaagggcttgatgggttcgtactcgtcgtgttgatgttgtattccgaaggcgaagctctcgtcgtcgatagattggctcatagttccgcaaacctaagactgaggttaatcgtaatttgtacccttgatctcacattcatgggaagctcgaaaagtcactgccaagcacgcacaaagcttaatcatcagacttgtcatattcccatttgatgtggcgagggtagtccttcaactaaccgcccaagccgcaaccaagcttgccgtggaatcagggctcttgtggaggtaccatcggtgtcgagcccgcagtccatgaaactgccagaggccgcaagaccgagcccatcccacttttgcttaaacacatctcaatttcccgtgtaagctacgccgatgaaccagaacccttgatatcaatgcacccatcccaatggtcgtgaatgcgatacgccgtcgcaaaagatccaggcaagctttggaagtacaaagggaacccgaggagtcaaaaacacgccttgccgatattaaccgtttagtcgaagagaccgaagcccatgtcatcgtcggactcctccttctctgtagcaagttgttagcaccatattcaagagcatatcgggccggaagcccagggtgggagtactgaccctcctccttggcctcctcgggagcggcctcagcagcaccgccagcggcagcagcagcgccaccagcagcggcaggggcggcaccaccaccggagccgacgttggaaagaaggtccttcacatccttgccctcgagagcctgtagcacagcaaaacaacccaagtcagtcatctaatcgtctcgtggccggatgcccgcgttcggaatgcgtagttctcggtgtttcgtaccttggcgaaaagggaagcccagataggctcgacatcctcaatgccggcggccttgatgatggtctggatcttgtcggcctatttcgcaagtcagtcgctcgttccgcccaaatcgccccgtaaatcgcagaattgcgcggggcaccagaagattctccttacagtgatctcaacaccgtcatcggcgaggatcagggccgcataggacgtcgcaagctcagcggtagacattttgaatgtggtttgtcgagacggcaaggtgctgatgctcgaaggactttttgtcgtgggatgtcgagataccgaagcttgaaattcgcgaagaggagaaattaagagttgtgcgcatgacagaaagagaatagcgtggccctacagctggcaggtgtgaaatggtcattgcgcagctgaccgccgcctgtcggtctaggagagcaaaagtggatattcgtcaaggtgcccggctggcaacggctggaagaagtcgctgtccgggctctctctgattggcttgggcagccgctgagccatccgctgtggcctgccaggaaccccagtcgggcctttgatcgatctccttgctaagaccggccccgccattgaagctcccctctgttcccccaccacaactgacgtcgcggacagggcctgcacgtcgtccagaggccgaattccaatctagacctttcctcttgcaagcaaataaacaccacatgggcgcagttgcatcgaattcacccattctcgtatgaccgaatacgataattgactctctctgatatccttgttcacctcgtagccgaaagaagtgctgccagtcgtgcggcgcaaagaagtggccggttggtcaagagcaaggttggccagggcaggagatcaagctcctccagatcccggtgggttttccagcgagagctgtttcctcgcgagcttttgccactgaccatccgttgcccactgtcagctgggaatacatataagccatcatcggcccttctcctcttttgtttgtaccggccagtccacctagtcttcatcaacaccttttctcagttcaccttgcacccaagatggagaccccagcgattcccatgcccaacgatgcgcgggagcaggagattctgcagaagctcacggctatccgggatcaactgctgctcctaaagatggaccgaacaaagtacattcggagccaagatgtcatggtgcaataccaggaactggtggaacaagtcaagctgctgaacgaggtccgaaaaggggcacatctaggggagaacagacgtatgcgaaccacagcatcagcggccacggactgctttgtactaacatctgcgcgtagtcgacaaggtgctcgagagctgtttccaactcatctcccttttctttatgacgattgggcgaacgaccgacgttcccgccgcctatgccctgacctcgactgtgaagcgactcctcgatcatctcacagaagccggtctcttctcgccaaaagatctcgacagcctttcggatacactgggaaggttggatgggatcttgaagaacgcgaacgcacaacattcaccatacctggtcgaactcctttccaaacgcgaagagctatgcaagacgatgcttgcaaagttgcgggaaaagctggacgagctggataaacctttgcaggccatctatgagaggttaatatctatcatgagatcaatgtcgcttgccaacaccaagacaaagttcgccacatccgaagtccagaagctgcaagcaaagctcaaggagattgaagagtccagagtggatggcaagtttgttgatgaagaagggaacgaaatccgtggcagcgacctagtctcagcacttctggcgaggtgtttgaggtggtcagatatcgtgttggagaggtacgtcatgcgcccttcaataatgagacgcccgaactaacgcagacgatcacagaaaggggcaaatacctgaagctttcagaacaaaatacgagattctcaccggtgtgcgcaacgatcttgaaaagctttccatcacgcaagcctggtccctccgagaaaccgatttgtacgatttccaacgagagctcgacaagattgacgagagtagggtggacgggaactgggtcgacgacgagggcaaccctgccgaactgtacgttcaacgaacgctgctttacctcatcagacgcagctacggctacatttattacctgatgaactcgtctgagccagtgtcagaggcgttgttaccggtgtacaaccagttgcagacgttgaagaggtgtctggtggaggtcaaaaactcgggaggcgtgagctcggttagggagttatatccttatagcatgaaggtgtgttgccctgtgttataatgtcccaacttcctaattactgacaatcgatagcttaattcaatcgacaacatgcgcgtcgatggcaagttcatggttggcaacgatattccagagggacagggaagtgtcagtgagctgctggctgagtgctttgacctcagctacgagctcagggtggccgcggaagaactggaagatggcagtgctgatagctagctggccatgttcgtttcggttgtatgatatttcgggtttttggacgcatggttttgcgccaagatatgttgctgatggcgttatgaacgggttgatgacaataattgggtgcaatcgtacccgaagctgattttagagcactggtattatggcgtgccataatggattttgaggtttgacaggaacagccgccatagtttttactttgggtcatttgaagagtttcctagcgagctcgggattgcagttagaccattggttccgacatgaattaatcatatttggtctatcgtggtctcaggggcctattgtactgagtgtgtgtgattttagacgaagaattaaaattccggcgcaacacattcatggacatcgtcaaatgcacactctcttctctctcttctccccaccacatacaccaacttcctactgcttggtattagggtcagggaacttttcgtcctgtccagggactgggaaccggaaggcgcagaggaagggccacatttgggccttttcccatgctgttagcacgatcatggtaagggctgagagagaaggaaacttacattctccacatcccagactccctccttggcgtagatgtcatttctcaacacctccttgatctcctcccgggaggcggcgctgatgacgatggtgctgcctgcgaaagagaacttggtcgggtcggaaccctgggggggcttgttgaggacggcaccgcccattttgtagaggccggaatcgacagctggtttgaggccgccgaagtgttgactttatttcattagtatccggtaacttggtgagaggagggggagggaggaaacatacggccggacctcgagacgcttctcatgagcaccggggaagtcggggatgacgacgagccattctacctttttgggggcttcggtggaggacattgttctgatgggttgctgttgaaatctaataggtgatataatagaagaaaaggaaccaaaactaggtttgctggttgggggcttggaagaaagaaaagcaagtctgttaaaggttgaagctgcaaatgaacgcaggtgaggtgatgccataaggtggagtcgtatttgacttgatagatacaccgattgcggccggcggaggaatatgcaagttgtaccgaactgcggaaagtgatacctctcaagaaggaagtggtgcctcttccgaacgaatgccgacgatcgccgcaaggggttgaattggcagtgcggggccgccgcggggaagttgtgtggttgtcaactacgggtacagcctacatgaaggtttcttggccgagaaggtttgatttaggttgttgattctggggatcctgctagcttgggacttggcactgaattaggcaggtttgttggatcactggatgatgtgttgaaaatcactttcaaggcgcgcccttgaaatgttgacttggatggtgaccccacctattcagtacacatatgggggtgttcaggggtaatgaacctaacctaccttgtgaaagaacgcaaacatacatcaaatgaggagggggacttattttgagtatccagttaagaacataaaccatcggctttcgagacacagtgttgcccctccattatcgcttcctatctagacgctggcagcatacctcataagatttatgacaaaagcctagttggcaatgatggcagcactgggcacaaaaccggcctccttcaatgtcaacccaaagtccacgccagcctcgaatgtcttccgtgggaagttgatctggaagctctgcacaggaacaccagtctcctcttccacagcgtgagccacctcgaacaaagtcgtttcgcttgggtaaatcttcatcaagttgcccttctgcttggtctgaatcctgagacgagcagtggcggcggacgagcctgaagcagaactacctcccagagcagacaatggggcggcgggagccacaaccggggcttgtggtgctctaccctcgcggagagccttggcctcctcctccttgcgctttctctctgccttgtcggcctcgatctttgccttgatgcgcttcttggcttcggcatcggcaatcttctcttgcttcttcctctcggcctccttgattctctccttgcgctgaagctcctccttgagctcttgggagtccttggtggccttcatacgaatctgctcattgcgcttggcggtttccttctcggcctcagactggacggctctcttcgcagcgagcttctgtcgaagctcttctagtctagctttcttttcctcttctgtcaacggggcaatctcgtcagtggactcggagaagtcttggtggtctcttgggtgatgttagccatgtgaactaaatgagaagctggtaagattggatacgaacgtcttggtagcgtgaaaggtggcttggtcgtggttgcggaacttcttgccacattcgttgcaaaccaaggactttgcggtctcaccagaagggatgttggcaccagtcgtatcttcatcttcgtcctcagctgaggcctggttttgagcctggagctcttccaaggacttatcctggtttgcctctagccaatcaagggcttgttgcactgcgttgagtgttagaaccggggctgaaaatgagtggcatgacaagatgtgtccgtgacggtgatgcttacagtttccagtcttcttggcggcgatttccgcacgagcctgctcaaagcccatggagagcagcacatcaagatcggcagtcgtcatctcgaatgagagtgttgcttctgttttaattgatgattggcaatggtggtggtgaaagtgaaagtagatgccaagatcaagggcaggtggtggtgttgaggagttgttggttgtcgagtgggggaatacccaacacgaaatcaagctaaattttataagacgaaaaggctgaacaacgttcaactgttcaaaacctgtgcgccacaatggaaccggtgttagcttttacgcagggacctggctttgaactgctcaaaagcaagctgatattcaaacgattcggttgttagcagtcagcctcaaccttgagcttaggatgatagcctgggctgtaggttgaaagggtgcacgtcatcacagaaggccaaccagtagaaacagtgggggcgcggcatgtgatagcacccattgttttatacattccagatcgccggcaactctctcttctcgaaataggttggatatcacagatactgctggcaaagccatatgtactcgttaacttgtacttttactctactgcatgtcgacttgatgtcctgaactctggcagtggctgaattagtaattttggccccagtgttctcaggtagcaacccaattggagcccaagaacagctgtcttggtggcagcccagcccaaaccctccacctgggaaagtcactgacacgctggaccatcagcacgggcccacgaacccggatcgccctaggctcgaatcagaaggggtcgaaacctggccaagaagcaactttgccgtcactgtgctgtgctgcgctctgctcggaatgtcgtaagacacctcatatctcaagctctaaccaacaggccttctcatcgcaacaactctccgccgctctcccatctcttccaccgtccgccttctctggtagattcttcgcgccgaatcctgacgaaaaccttgtcgtcgcacgatatcaccacaccgagcgtcccctttggtgcacgaacattgaaaaccccccaaattcgctgcgcgattccgtcacctgggctccaccaaaacggtcgcagcaaacatccacaaacatctaaacgttcttttgagcacgcccgagaccttgctataccgtcatcatgtccgtcgagattgaaccctttgagctcggcttccgcagtacgttgtgtcctccagatcgccaacatccacagagacattcgaaggaccatatctgaccgagctagggccatttactatcgaggtcgcgcagatcctcaagatcaagaacaccaacaaagagccaattgctttcaaggtatatcaagatgtctttcaagttgtgtctcacttttcaagtggctaaccggatcctcctgtttgtaggttaaaacgacagcccctaagcagtacgtctcgagacttcgcgattctccacaataattacattggcctacgagagtggtgttgctaactgccacaggtactgtgttcgaccaaactctggtcgtgttgagcccggccatgaagtcgaagtttcaggtaggcacatcgtggacatgtttggaaagttggggcgggtggctgacatacacgtagtcctcctgcaggccatgaagcaggagcctcctgccgacgccaagtgccgtgacaagttcctcgtccagtccgttaccatcaccggcgacaaggacttcaccaacgttcagcagattgtgggtcactcttcacagccggcggtgaaaaaaacaataccatactgaccagttattcttgtagtgggacggtgtgccaaagtcggcaatccaagagagaaagatccgagtctcttggctcgccgccaacgacgacggaaacgcggaacctgcggtgtcgactcctccccgtcgctcacttgctaatgtatgttatcccacttggtttctccgtggcgggggagggggtgaatgggtgcaaaaattcgcatcccatccccgcgatcccctcgtcacatgggcgactagcgctaaccacaactgtatagggccatgaggatacccccaatgccgcccctccagcctactcttccccacacgatgaatccaccattctcgataacacctctccaggccaacccgagcaggagtccagggaggagactgggtcaactgtcgccgaatccgccgtggccgccgtcaagaccacagccgtcgagacctacgaagagatcaaggcgaagctcgctcaggcggaggctacgattgcccagctaaagaacgacgcagcaagtggactcagacaaaggaaggcagccgtaacctccgaggcagacaacagcaagccttcccagcccgagctcgcccaggcgacgagacaaggcaccgagggtgtgtccgttaaggtcgtggccatcctgtgctttgttagtttcatgttggcgtacttcttcttttagagggtatacagccggtctggaaagcgtggggcaaaaggtgacggtgttgttggttttcttgctacattgaggcgcggcgtcgaatcacaaataatcaccacctatcttcaccacggggccccatacccatcattagttcccccataccccataccctcacccccccacacggagctctcctttgttgttttactgttttgttatttatgggtagacgtatggtatacgttgttatgtctatgtctctcggtgtctctctctctctctctccctctctctctctctccctctctctctctctctgtgtgtgcccagtgtcgtttgtttgtctctgtgactggacgacaagttcatgacaaaatacgactgactttctgatggttgttttttcttgtagcggcatgatgagagcgaggatagtattattgcaattagctagcaaggatgttgttgcctggcaatgtgaaattaatcggttacacctgtttgctttgatattggtgtgtgtatcataatgtgttcggggattacattcaggggctgggaagggctttgtgcgcagattgacagctattgttattattacctttgctacgctagcagtacgccaacatgtgtatcgatagaggagtgaatgcaaacggctaagcgtaggctttatactgtattttcttttcctagccatagagcttgtgccacaattacagaattgtcaagggagatcagggtacgtctcccggaagccatcatgcccacctgttaccctagaacctcatcaccaccgctggcggcttgttccccaaaatctcatcaatctcccccatcacctcctccgtcagcaacttgtacaccctcaacgcctccacattctcatacacctgttccggcgaactcgctcctgttatggcgctactaacatgcttgttcgccagcacccacgccaacgccagcacgctctgcttcacgcccaaccgctcggcgattggtttgagcttggagaccgtgtcaaccatttcctgaaactcttccttgcccgtgcgcttccagaagccggagatgaactcgagctgggtttgggcgaagcgggagtcgggcgggatgccggatttgtattttcctgagaggatcccctgccgcaaaggggagaagacggtcaggcctagggatgggggagtgcggaggaggtgggcgagggtggattcgacgcggaggcgctcgagcatgttgtaccggggctgttctgttaccttgttagtgagaggagacataggggtagggagagaaaaaaaagggggagggggtacccattaaaggaccgatgaggttgagtttatctgcgtagtggcgtgcttcggctatttcgtctgcgtcccactcgctggtgccccagtagagggccttgcctatgtcgattaggtggttgaaggctcggactgtttcttccatgggggtgtttctgtctggtctgtgggcgtagatcaagtcgacgtagtcgagttggaggcgttcgagggattggttcatgccttcgatgatgtgctttcgggagagcccaatgttgtttactagtctggtgctgaaggctgagccccaatagatctttctctccgttagtggggttcaggcatgggggttggtgttaaaggagtgtaccttggtagagatgacgagatcgtttctttgccagccaaacttcttgatggcctcgcccatgaccttttcggactcacccttcgcgtacacctcggcacagtcaaagaagttgacaccgacgtcgtaggcggctttcatgcaggcgaaggtgccttctctgtcgacatgaccgccgtatgtcagccagccgccgagggagatggcagaaacttggagaccggagcggcccaagaagcggtattccatctcggggagatcagtaggcggtgacatattgaaaaggctatcggagaaactaatgggtagaattgggtctggctgtagaagagagggaagagagatggccgagagacactgccctttaacagtttaccacttgctgaacccggagcacggcataacatagtgtacgaaatagcaggccgccgtctgagcaaacggtacggcaagctcccgtgatgcagatccggtatgagaaggtcgtggtaggtaacagacaggggtttgtatcaacccccactgttacccctcttctatggtgtttcctggttcgtgaaagataggacgaggctcgagagcgtaccacaggaaggatattgtggtgtcttgtttggttggccatagctccagcaccatgatgatatgtgcaaccaagacacaagacgccttccacttggaaggctgaaggcaggatatgagtccgcggccaattcaacccttgaagttgtcacttcgtaatcagctcctaacctgcgatgacaggacttccaaccgaatgggctttgctgatggcgtcattgcaactaaggtgttgtaagagatttctaggtcatgcgttcaagtctattgctgaatatctacactgggtggttagatatgggtacaccgaccaattgggcaatatcacttacacctatcagtcttcattgttgacactgccccttgggcttgccaactgcctatcccaatgattgttggttctctagttggctgcccgtgttggtcaaggaagaaatgtcgaaaaggacaagaagttctggttaacatctcataaacaaaaacaatcctgtccaacacaccacttttcaacgcccagttcggatggacagcccactttcacaggcacaggcgagcttctggaacgataacccctttttcgatcttggagatctttgaagcatgggccactggcccctcctggttggctccagcagatcagataccccacaattgagggacctgagcccctgtccgccaccgccaactgttgaaattggacggaggaacccaagcgagcaacctcaagggttcacaactaccgaccctgcgccaacctttttttgttgattgtcttttccgtcaagctggtcttgcggcttcactcgtttcttctcgacgttgacagtacccattcggatttcccatcatggcttccacaacaattacgagcaacggcacgaccaagagaaaggctgccaatggcatcagcaacggccacgccaacggcgcgacggcgccccccaagaacgcggacgaccagaaggaacatgactttttctggacttatactgaagagccacaccggacgcggaggttggccatcatcaaggcgcaccctgaggtatgtttgagcacagtgtctgcgttaagaaagcatcaatcgctaaccattgtcctgttaggtcttaaaactatctggtgccgaaccattaacgaaatatgtcgtcgccggcgtcgttgccctccagatcctttgcgcccacctcctccgagacacgcccttctggtccctgaagttctgggcggtcgcctacatcattggcgccacctcgaaccagaatctcttcctggccatccatgagatctcccacaacctcgctttcaggtcgcccctggccaaccgcctctttgccatcttcgccaaccttcctatcgcgttgccctacagtgcttcattcaggccttaccatctgacacatcacaagtccctcggagttgatggcctcgataccgatctgcctaccgctcttgaagccgtcttcctcgactcgatcctcggcaaggccttcttctgcaccttccagatcctattctacgccctccgcccgatggccgtttaccgtgtccccttcacctgggtccactggctcaatgttgccgttcagctgtccttcgactacgccctcattgccttgctcccgaactacttctcggtcaactcggtcctgtacctgatcctgtcttccttcctggctggcagtctccacccaacagcagggcacttcatcgccgaacactacgtgtatgagcacatttcggacgaagccagagaccccgagaacaagatccctcttcctgagacctacagctactacggcatcttgaactttttcacttacaatgtcggtctgcacaatgagcaccacgacttccctgcgatcccctggactagactgcccaagttgaacaagattgccaaggagttttatgatcccctgcctacacacgagagctgggtgtatgtgctttggcagttcatctttgatgacaagattggcatgacgagccgtgtcaagagaaagcagggagggagagttgtgggtggtggaaatgttgctgccaaggccaaagtggcggactggacagctgaggagattgaggcttaattttgtttttgaagggttaatgatgtatttcgggagacatctgtttgctcactgtgggttatgagtaagtctggagttgaaacgagaccaaaaaaggggtttgatacgaacgaacctagactagacggacggggcaagagcattggtgtattgtacaatgacattgcttatgaggtgcgtttaatttttgggctgataggttattgtaatgggtgagtaagtatatatttgagaatttatgagcattattttatctaggtggtctaatattcgaaaacagcaaactggaaacaaaagcaataaacgtctttattcacccttcaactccgacgcccacccccgtatcgcccccttttcctcctctgtcaagtttatcccaaacacctctttcaacacctcagtcctctcctcctcggtcctacaaaccttgaccaactctgtcctccctcccaaattctgcttcacctccccctgaaccatcatcacctttccctttatcttctgttctccctcctcccctcctctcagaaaccgaatcaccagcaccgtgtacgtctgatgattcctctcgcactcgctcaaataaacattcaggttctcaaaatccaactcggtaaactcgtgctccggcacaaaggcgtagtagctgtcccagggcttttcaggcgagtttcggtactcgtagatccagtgcttgagcgcgcccttggactcgtcacggaagcgctggtcggggagccagtcgcgggtgtagcggatttgctgggtgccgatggtgttgtggtggatgaggtgttcggttaggggcagggggaaggttgggccgtcgccgccgaagccggcgtctaggacgtattgttgggcggggttggtgttggggagggtgaggatgttgactaggtggacgtagccgttgtaggggccttggggggtgccgtttgtgcggttgcggttgcggacgcccgagtagtgaatcgaggagaagccgagggcgcggaggatgtgggagaagaagatggagagttccatgcagtagcctcctctgccgcgccttggggaggtgacaagtttggtgaagaggtgtggggggtcgaggaggatgcggtggaaggggttgtagtggatggagaggttctcgtaggggaaggaggtgatttgggcttggaagatggtggtgaggtagtctaggtcgaggacggggtgggaggaagggtggtatgactcatcgagaccgacgtaggagagatactgagagacctgggagagggtgtaggctgagccgttgggtttgaagttgtcttggtcggccatggtgagcgttggatcaatgaacttcgatttttgctaccgtcaaacactctcttgatccatcgatcttggtgttttgaccactgattaagattttagtttcagtcatattagcaagtactactccttgtgactcaccatcatagggtatctccaacgtaaacccgacaagccggtcgtcggcagggcgtgaaggcgtcatcgcaactaacaccgttctaggaatgattctgcccaacaatcatacaagagaagttataagtatgtttattgatctgatattgccagagcatacacttggatatactatacagacccctaaccctgctacaaacagtgattaaatcttccaatcacacgacacatctctcggccattttcttaccgtatatgctagttatgagggttaaacaacacttgatgaatcattgggctgtaagtgatactttttttgctgcttggcccatattttccagcagaaagatgctgcgtgtcggccaaaaagacaatctagtaaccatggttttgagcatttagacgctcgccttgagatgtcccttgtgtctcaagggtgcctcatacaacacagttcacgaggttatgtcagcagtcacctcatcactacaggactgacttctgccttggagcacacgtatcaatactgaaacccaaagagcagccaagattgataaaaacctcgctcgaggttcatcccgccaccatctactcagactgccaccccacgcgtgtggctgctcagactcgtgggcgaccgtgatgggccagccaaacttcgagaggcgcaatgcccagccagtgacagcatcgggttcctgcgcagatgaccgaaaggtaatgtgagcaggatgactccgatgttatgtctgtggcatgcagtctctacaatcccaatatcttctatctccccctttcgataatgggtgacgcggcagcaagtgtgagagtttttggtactgcagcgatgcatagtaagccatacagaaaaacccattcgctggctgcaacccatcacgcggttttcctcacaaggggaggatgggttaagttcgggacgagaggacccctacccaacccacacgtcaccacgtgtcatgcagccgttggtataaggacaagacactcaggcctcaagactactgcgtatatgctgggtagcgaagcggtatttttcttcatctgttcgtcgcattgtcttgcgccgtttttttgctgatttctcaaccagtctcagacaacccgggccccggtatcgcatgatgaaggagttccgtcagagcgccagaaggaaaagttttcgcgatcacagtccacgccacacactcacacacctcacacacacctgcccctgagtttgctgacagggctgggtagctgggttctcggcaaacggctgtccctggtgaggctagcattcggcccaagccggtgcggtatattctcatacttttgtcccgatacatccgagaagatattgtgagagcacgcggcaagacggaggcaaagacatgcccggtataacttcccagctgcctgttttcgtggcactcgagatatccgagtgcctgtcgtgctctccttgatcccgcggcgcggcgtgatggttcgacagaccagggctgagggctgcttatcgtgggtttcactgaactggcgagaatttgtaaaaggacacccacccggctgaaagggctatggcgtgttaccaaaatggaccagaatggcacccgtccacttggccgtttgtgagaggctgagccgttgcccaccacttcaatgcggggttgatagaggagtacctggccccatatagggcatgacgtcgtcgccgacaccagccctagcagcagagcaggtattgtacacgatctcgatctgcgtagaaacttttatcattgtgaactgccatagcctgagaccacgagctgagcagcaagagagccatacgatcaccaggtctacctgcgcgtgcctcgaatgttagcgttgcgcgacggctttagggttgcggtcgatcgacgtcgccaacagcttgttcctagactcggcatcggtttttgtccatgattttcggaccagggccttcggatcggatcgctggattcaatcctccagagaggcagttgatatatgtctcgcgctctcacgaacgctaattgttgatatctttgagctgagtcattggggaaagttgacaaaaagttacggatgccgcatcttccggccatcaatcaatgacaatgacagatgcatgcagatatcaaaagctggttcggcaaataaacaacagacgaaagtgaaaatgttttcgccgaattattcttccgatgggaaacaggaggaggaggagccttcaagtaccgtcttaacagcacctgcctccgaggctggcacaaactttttggggcgcgccgcgcagccggatttggtggggaagagaaattctggaatcgggaaaagagcgggccaagacttaccgagagacttgcgatctgacagagctacaagtggagacttgacacgccgcctctgtccgtcgaccgtcaaagggatatcatcgtcacatgatgtaccagaccgcccggccaggtaccgtgacatctctcaaggggtgaacagcatcgtgtggtggaagggaaaccgggtgcgttttctcccgctgggttttcagagttgttgggttgtgctcgctcccacactgctgtgttgtcgtgaattgatatggagtacttttactttggataggtaggtcgcttgtgtaatgtgccggaccaagtctccgccccaaccttctggtcgattctatggtaagagtttgatgactgggctggcgacgacgacgacaggagggagggacgattggtattgacggcggtgaggtcgaagcggcgatatcagtagagattcgtattcctcgaatactttgttgaatggaggccattatgcgctgccctgtaaatatcaaagaagtcccttttgagttgatgtgacggcaatttagtggcctggaagcgagagtcgagccccaaaacggccaagtggaggggtggacgccagcgcacactgctcgcacgctacccactgcccatttgtgcctgcaacctgcaacacattgcacaggcagggaagcttggatgcgctgcgtacctacctgaccaacgacatcatcctccatctcccacatcttccaatcactctctgcctctcccaccacgcactcaacaccgcccgcgtggaccaaaccccaaaccccaaatcccaaacccactccccatagtgttcgctcgtctgattagcatctactcgatagcgcccaagtcgcctatttgtccgcccttttacggaatcgtcatagtacggagcctcccaagagacgcggcctgcagttcgacaacctaaatctgtctcagacgcattgcgatagccgcgaaaagtcgaatagtaaatcgttgggacccatccataatgatttgctggaccctgcgaactctgagcagctaagacccgccctggcatgtgtgagtggtggtcgagatcgagcctccgcccttcctcctccactcgactcaactcgcacctacgcatgctgcagcagacatggacccgtcgtccaacaagccgactggctcagcagaggccgaccgctcgcagtcaaccggcagtatcccaactgccctgctccatcccacgttatcccgcgaatccacctcgagcacggcaaccataaccccaaagaccgactcgtggccctcgaagttgacttcgcagacctcgcagacctcgaccacgtccacctcctcttcggctgcaccttcacctctccactcgcgcgagccctctccaacacgaccgccgcggcagcaacgtacgagcacctcacgagcgtcatccatcaaccccgggccccggtcgcggaaaaacagtgctcaggatctaggaaaacaagccaacccgccaccaccaccaccaccaccccccacgacgaaaacgttgtcctccacgacgcctactcttctgcccactgtatcaaacccaagcttcaatgcgggtgcacccgtcaagtcacccacgtccatggagcatattcgaaagtcaccccggtggccggtatcccctaggctacgatctcctccacccattctccaccagccaaacatcccacctcagcgacgatcagagcacgaaacaactctaattgctcttcagcgtgcgaccccgccccagcctcgataccaggagcctcagtcagacaccgataccgacgacgcccacatgccgtctgggttacgaacccccgctcgaggtggtggaagcagctcagtcttggagactgtccaggaagttagtccactgggttcgcaacggggacaaggagagtcgctggaggaaaagattgctagcagcatggcttctgaatcgtcacaggcggatctgattggtctcggtctgtccaaggagacagtgggtagatccaacactggcccgaacgacagtggtagtgatagtggcagcatcaaggccagccgacggggcggatccgggatgccaccgccccctttgacgacaaggcagtcgagcacctcgatcaacaagccgggcatgcccaagaccaagaccggcgacctgccattgcagagtatgacggtcgagacggagacggttacctcgattccccaagctgcgttggccccaagtgttggcacccaggtgtcaagtgccagtttgcggacaaaggccagcaacgagacgatacgaccgaggaaggagaaaaagaagccgccacggaagcaacccactgtgacggcggtcaatggtgagaaaccacgttcagctacatcccctaaattacgacatcacatgtccatgtattcagtttcttcttattctattaccgacaagcgcccgtctcccccaagctctttcagctctcatgagagcgtgataacggatgccaagcgggaaccgggaggcaggaggcagagcctagtttctcagatcagcagcatgagcaacctactgacacgaacacgtgtagcatcctccaaggccgatatcttcgaggccaaggtcgcaagcgccgtcgaggaagcaaactcgtccgattccgaagagacttttgtctacgattctaacccaccagatgcccgtgaccgaccgccgagatttcattcacgaacgccgagtgcgacatccatggtcagccaaatcgatcggcctgggatgaggtccatccacaccgtgatggagagttctgggcctcagatggttgtcaagaagagcatgaaattcgtcaacacttacaacagcaatgcaaatgacggcatctatggcgacgatgatgggaagggaactggcaggagcaatgccggttctgcccggggaactgcacgacatcaccatcatttcggccgttggggccgtaacggaggcagcaatggtcacccctcattgttcgccgagcactcgcctttcagtaacgctgcagctgttgggaacggaggctcaagacactcttccaaccctccgagtccccgctacgctaatgctcgtaactactcagcagcaaatggaaagaggtcgacacatctatcagcagggtatgatctcgacgacaacactactggcgctgacgacgagacaacacccttggttcagtcctccacgatgcgatcatcaaggtcaggcagaagccggaggggtcctcactcgcactcataccggtcgattgaggcgcaacaatacaggtcacctccctcggtcctcaaccggttcgcgagttgtctggtcttgacggtcatgctgttgctcattgtctcgggcgccatcggcttcatgtttgcgacatcacaacctctcaccaatgttcagctcaccaatatgagccatattgtggccagccaacaggagcttatgctcgatcttaccatcaaagcccataaccccaacgtcgtggttgtagctgtggattcttgcaacatcgaggtcttcgccaagtcgccacgcggaatgtcggattcagagtggtggcgccatacccatcccggcgaggttggaccaccacccatcaagagacccgaaggcgaaatgttggcgatggaggccgacgatgatgatgattcggcgcctaacctgcacctcggcaccatcactggattcgagagtcccctgactttcgagggttctttcttcaaccagggcgattcgtactcgactggcgaggtccgcctgaaagatcctggcaacgtcaccaaacctggtggtcccgagcgatgggagcgggtcctggaggacgagttcacgttgattttgaagggcgtcatcacatacactcttcccctgagccaacgggagcgaaaggccaccatcactgcgaagaagatcatcagaccaaactcggccgacgaccctgcggtccaacccgacgacggggaggttaccatctcacttataccttaataattggcactgacttcggccatgcgtccagcgactgcagataaatttccttttttactttatgtgaatgactctctttttttcacgaagacaaagacatacctattttattctcttacacttttcattctctcttcggtggcaattggttacatgtgtatatttctggggcttgtgtgtttgtgtgatgaagcgttgcatggcattatggactaagatatattcccccgggagaacatgggctggtaaagaggcaaagcaaactgggcgttggttggattggtatacaaaaattcaaaactcacatcacaaacaaattgagcaatcaaagactggcattataagaaaaggaaaagacgggactgtacagagtttctccatcattggtagtttagggggtacctaatacgtaatgatggtgagatggatggtggagggcatgtggtctgaaggataagtgctggaggtgtttctgttgggacccgcagactagggggggggggggggggttgaggggacttttgtgagggttgagtgtgataacagatatctgtgagagcgaaagatactcttataggaacaagattttgatgaatatcacataaacttgatgtcactattgccaccatatctttgaagttgatgtggcttttgagcagcaaaggggaatgcatgtgcacacagcagccgttaccttcgggccaagttctttatacattgcatgatatcaatataagcacattctattgtcgttgtcaagtgtgtaaacaagaaagacgctcaacaaagttcaggctttcgcttacgatctatcatcattgagcaacaacttcaaaacataactctcatcataccccctaccctgctatgttcgcctcatgctcacaaatgaaacgttcatctctgtctatacccaccaaagcatacaaacgtcccccttcttcaaccatagccacccaagatgaacttcaactccaccacaaacaaaactacacactcaaaaagaaactcaacaaagaccaaagcaaaacaaaagccacaacagatcattatatatacctaattaaccaccctcccatcccatcatccctcccagtagtattcccagtttaacttgatcatttcgtttctgtgtcttcatcttcatcggaaatatacccgtacgtacgttgttcatcagtagtttagcccattcccgtatttcatcatcttttatagccccccttcaccccctcacacaccatccatttatcctacccacctctccatcccgctgtccaacacaccctctcccatcataaaactctaattcgttaaaagaagaagacgtgaactactccctaattgtctcggccgtcccaacagcttgctcatccttcttcacaaacgcgctcgttgcccatcccatccagctgttcctcttgttcgccctctcggccgctgcttgagcctcggcattctcctgcacgagcctcaacggcctgggcttgttgcccccaaacgtcgtcttctccttctcgtgctggcttctgggaggggagctatggctggagacgaaatcccgttcgagaatcgagtccccgctcgtgctgcttgtttcgcttcgcatgcccgggaagttgcccgccgaagctggaggggcaccggtcgtggagtgggcgctttgagggccgttgccgctggtgctgccgctcatgctggagcggttgcctgctccctggggcgcccagaaggtctgggaggatcggagggatggggaaagcgggccgtcaacggcggaagggcccttgtacatggcgtttacgagcgaggcggcgccgacagaggtgtactgatcgctcatgggcctagcacggcgagtcgaggtgttacgggtcaggccgatggggatgctgggcgccgtttccgggttggagacgtcggcgctggccgagggcatgaagctcatggggcggggcttggggcggacgccgccgccgatgctcatcgtcttggcgcgctggaggagggacggtccaggtggaggggccgcctgcttgggggtggggggcggggggagttccttgttggtgtttgcgtttgcgttgcccttgaaatcgctgctctggtcgaggatgtgctcgaatccttggtgctgcaacagacgctcaatgatcttgttgatgtaaagagtcagagccttattttggtctttaaccgacttgatctccgcctctaggcgcctctgagcctcgagctcctgttcgtttggggggtcgctttcggcagcgccgttgagctcatcggccaagctggctccgttggatctgccttccagggcagcgagagcgtcttggttcgccgaggcgtgaccgagatagctgaaatcgttcgttccaaagtcgcccttgagagtccggtcttggagaagcagctggtaactttcgttgtcttccatcaacctagcgttggccacacgggcctccatgagctggcgctcaacttcctgaagacggccaccgccctggttttgcgactcgacaagcttgatctgtgcctcggccaactcgagtctgagagattcaatcagcttgtccttttgcagcaacaacttggagttgttgcgtgaatcgctgcggtggatggacgaagggggcgcaaagcttccattttcgatgctgggcgagttggtcacggctgtgtttgggtatcagtatattttccacgcgcaaaccagaccacaaaaacactcacattgccgcgtcggcctgtcctcgtccaggttcctctgcgcgaggctgtctttgaggcgctgaatcacggtctgcatctcctcctcgcggttggccatctcctccttctccttcatcatgccactccgctcagcctcgtagatgttctccatctcgcgcatctggcgggcagtctcgcgcttctcattggtgagtgtctcgatctgctcttcttgttcgtgaaccctctcctcaagcttcgcctgctccctgtgcgcctcgtccagcttgtcctgaaggatctcgacctgacgcttggttgactcggccgagctctcggccctctccagtcgcgtcttcaagtcgtcgatgatggccacggtctcggcgcggatggcctcatcacgctcggcgtcggctgggctaccgctcctgccattgctagagatgccgttgagaagggactggcgcctttcgtgggcggccgcacgtgcggagacaggtgtcccggtgcgtgaaggacgggcgctgcgtgttgcggcggcgggtgtggtgccagacgtgctggaggtggtaggagttgatgatctcgcactcgggcgctgcggagttccagtgggtgtctcgcgaccagtcgccggaggcttcttgacgacggcagccatggcgggtaggttggttttatgaaatgtagtataggttcctttgttgcggtgagtctagcgatactctgccactactatgcaaaaaagaaagaacccaagatgcagagcgaaaaggtcgggtaacgagcgcaaagtcgataggctgaaagaggggctcgaagactctttttggggcggtgaagaggaagagaaactcgacgtttcacctccagttcggacgttatgtttgtgaaggggggggacgaccccggacaacagctgagggaggatatttgccgacccacttgccttgtcgggcgttctggcgctgttattagtggcgtttgggggacccttggtcactgggcttcttgactctctagcgacttattctgagctggttgactcttttcaaggctttctgctggatatcgtagtctcgatcaaggtttgacaacaggttgtgcttgtttgcgctggcagcctcgacaggtcgagtgataggaatggatttgttggctgggacctgcctggactggttgctgggatctctcagagcatgccgacctccgaggcagttcgtctgttgctaggtatacatatgcacctcggccacgagaccaaagcgctaactattcaagccctcaagtgatgtgacttgcaggaggcaagtcataataagcaggtgtgtgtgggagagctactagcagtaaggtcgcacgccggcctcttgatgggattccacccaaagagctgtcttcatcttctttgtcgacttgggaacacgagcacaaatacaccaccagccttaacaagacaagagacccgggaagcaattacggctttaaaaccttgtttatcatgcaccgacagcggtctcacctcttccatgttcgctgcgaggtaaagtggtcggggactcgctgaattgagcaacccgccccgcgttagctgttcatgcagcgattgcctggtctcttgatcctcgtccgccgttatgagtccggggcacgtggagaatggagaaccataatgagcaaaccaacaactcaagcgccctgaaacaatgggtagctcatcgacagtctcattaatcctctaagtgtcctttacctgtgtatttgcctccttacgtggtcatgaacatcggccgtggccaacaaaggaagcaggcttcagattccgccctcgggttccacatcatgttttaattaaaacaattcgacctttcaatgcgctctctccatacctaccgcgcatagggagctgtcagtggtcgatctggcatggatcttccctttcgatcccgataacccgaagggtgtcgaccggatgcttatgccagctgtgaggtgtcttcctaccacctggtctaacgtagctcaacatctgggttgttggcttacactgggaggcaaaccatggaggattccaactgataaatcgagaacaccgactttgttcagaggcaacgcagcgaagctgatttagtcaccacgactgggcaacactaatcaataaaacaaagagatggcaacgagaggtcatgtattacgactatctattggagccatcaatccagggcaagccctgaccaaccatggccatcaaaatcactttttgagccgagcagagcccggtgtgtgacttgccggagttgagaacccgaacgccgtgccaaatgccaactcttttccctgtctttttcaggttgactctttaggcagtctggtcagccagaatgtcggagtcaccagcgtcgaggatggccatggtggagcacttgaagagcttgccaagagcggtaccaagctcaatctgtaagggagggaggttcgttagcacttgatcttgtaccctccaaagcctatagcagacttcttctctgggtggaccgtttgacaacgtggtgtcttcacggccaagaacaaacatccaggattgatgcccggtgttttttctggttgcagagtctacgggactgtcgggattcaacttacgttggtgccgttgtagtggtggactgaggtcttgctcatcatggagtagtactcgagctcagacttgcggagaggaggggtgttggcagcgatgaggatcaacttggccttgccggtgcggagggccttgagggtcgatctgtatccaaggacgaccttgcctgtaaaccgccaccgttagtgattttttcgccatcaaaattgaggctctcacgagcagctcagcggccacaaacgtaccggacttcataacaagggccagcttggcgccgatggactgagcgtccgacttagacttcttgggggccattgcgacggttggggatggtttgacagagatagaagttggcctcgaaggttggtgttgtccttgtctttggcaggaagcgtcgtcgggttgcagaaaaagtccaagtgaagttttccagaaagtttggaaatctccaaatcccaagcaaacgtgggtcggctctgattggctgcgtacagtgggtcggattttccttgtgccctaacagccccacttttacgtgatcagctcagccggcaggaaaatgagcccgcgattggtaatcgaaggcgaatttgaatgtggtcaaaatacagaggcttcccacttgtccctctcgcaccccaacacccagcgacacccacacccagcgacatcgcgaaaatcagtcaagatggcccgccgtcccgccagatgctaccggtactgcaagaacaaggtaagcttgcgataatttgagatgttgaagttttgaacctttggaaggagtcggtcggcattttcgtttcgggatttgtgggcggaaaaatggacgatggaccatgggcatgacggaggaccgagcagaaagaggaggattcacgacaacgaaggacaccgacgacaacaatggcgacaataacaacgacaacaacaacggggttctgactgtattgtgctcgtctttgaacaagatgctgacctcatttttttgatagccgtaccctaagtcgcgcttcaaccgcggtgtccccgaccccaagattcgcatcttcgatcttggccgcaagcgtgccaccgtcgatgacttccctctctgcatccacctcgtttccaacgagttggaacagctgagctctgaggcccttgaagccgcccgtatttgcgccaacaagtacctcgtcaagcttgccggcaaggaaggtttccacctccgtgtccgtgcccacccctaccatgtcgtccgtatcaacaagatgttgtcctgcgccggtgccgatagacttcagactggtatgcgtggtgcctggggtaagcccaacggcactgtcgcccgtgtcaacattggccagatcatcttgagcgttcgcacccgtgactctagtaagtttttccggaccatgttctgcaaccaccgcggatgctaaccgctgtcttcagaccgtgctatcgctctcgaggctctccgccgctcccagtacaagttccccggtcgccaaaagatcattatctccaagaactggggcttcacccccctccgccgcgacgagtacctcgaggccaaggccgccggccgcgtcaaggtcgatggtgcttatgttcagttcttgtccaacaagggcaacctcgctcagaacatgaagcgcttccctgatgccttcactgcctaaagtggtgctggtgacggggtcgttggggaaaagaatggttatttggcttgagggtggcgcaacgggtcatttttagggcagagacgaaggcatgtttttagtaaaggccgtgccttgacagtcaatggaaccattcagccatgaatgttcagcaaggatttgtgcattgtaccctcttgtgagacccggaccgttgagaattggtacgggatccctaatgacagtgattcaaaaagcgtacaatcaaaactttccactgaacatccatgagtgaatccatatatgtagcagctgctgttattctgtaataacacagggtgcccggcaagatgctgatgtcccacatcacaacagcctgggactgtggcaacacgaaaattcaagatgaggacgactctaagtgcagcgacaccgcctggaacggacataggacctcatgaatatacgaccgctgctgctaaataatgactgcgatgcgcatgacatcatccgtatcgtttattagcacgaatgatgacagaagtctcggcttggagacaggaggggggaatccaccaagatctcttcggcgtctcctcctctatgtacatacggccatcctattttgcgctatgagcctggagaaggccaagcagaacaagccctgcttcgagtgtagtgtaattcatgatcaaacgagatccggtcccggctttgcttgttgttggtcttcttgatatcgacagacagtggctaacacccccgccatacgttggtcacttgttatcgcttagtgagcttttttgtgacattggatcggctaccagttctaatcagcccaatcatctgactggtcatcgccggtttcttcggctaacacttccttgggctgtcatcctcgtggcagctgttatttaatcgtttcaaaagctcgatcttggaacttgaggttggaggtggggcttatcggatccgtccgactcgataacgtcaggccaaggccaatcaagctgtcacgcaactaaaaaatctgtggagtgttggatggggtcttttgaacgcgcaaaggggagcacttgcagaccggacgggaccccgttgccacgagagacacacgcaggatgaaaatatcatcaaacgcgaatgttgttcgatattgccgcaacaggcgagaaaaaggccaacgttgatatttgaaaaagcagcgtttaactcgtccaaggtggggtaaaaaacggacagggtctcccgctcatcaaaagatcttatcctcgtgagctgtctgatagcatcccgtgctgcgggctctgtgctcagttcacatctcgcagcttgcaggccgccccccattcttcccgatcgcccctcgcccagcccgccgcaacctctccagtctgctttccgtcatcctttgtacctgcacatatctcgtcagaaccgggcattgtcaagatttgcagccgactctcagttgccatattccaggcaaggcgggttacacgacgccgccgtcagcaagtcagcggccatactcaccgttccatcgccatcacctcatcgatagatatcgcaaatcgctgttgaaacccatcagggtgtggttgctgagagacctggacccccaacctaaccccctcaccgcttcctaccagtaaaagcacgcgactttgcatctcttcctctcaacaaaccacccaagaccattcgctttagtcacggctcgcctcccgaccaccggagtggtcctttgcgaagcgcccttcctttttggggacccccgcgataaacaacctgtcacctttaggggtcttcttgcccagccccctgttgcccaacaccatcaacctccatccatctcagcgctgtcgctgttgtgctgtgtgttcacagtcgtctttcgctgttcaaaatggcattccaccagcctacgcgacaagttcaacaaccgcggattgcccgtgccgagtctgaagatgggggttctgccatcctctcaccccaggctcgcttggacaccaatgaaccccatacatgggttttgtttacaccaggtactgatgccggaaccacaacttcctacctgagctctgtccaagatgatcaaattacgcccgggagatccagaatcagcgatttgggaagtcttgacaccgcagcgcgctccgacttcaactcgcaaccgagcaactccgtagtgccatctgtggctcttgtaaacagcatcgcagaagatgacgccgagcttgacagcctcgacagccacctcccagacttcaggacagcgcatagtccatatcatcagccagacatcatccattcgacgcacatcttccctggtcacgatggcctgggttcgttccgattcgaagtgcccggtaatagcgtacaggctcaggagcgcatgtatgcttttgaacagttcaacccaaatcgcgtcatgcacaggagggagagctttgacttggctcgccttcagctggagagtcaagagccaaaagaggcggagcgaaatcagagaatagaggcgtggcggttagaacagagtcagcttttgttggaggatatcaaaaaggaaacaaagaggcggaggagacagtcagagctgtcggcacagagggctcggttggagaagggcgtcttagaagatgtgatcgcaaggagcgttgccgacgaggaagccgaagatatcaatcttgccggtacagaatggcacgaccaggatgaagcatcaacggacacctcgaagggaggattgtggagtcgactcacgcgcaaggtaatctgcgacatgatgggcattgatgacaaactgctcgccattctatttggggaggtgcttccggatgagaacgatatgaaaactcccagggggtctcccaaggactcagctcaccccgcatttgcgaacaaggaatcagagtcacgcgacgactcgacatggcaactacacatgctggaacggattgcaaatgagcttggcggaattgtccatcagatgtcgacacatcctggggccttttccacttacagtcgtgttcaacagacgccccttccatacgccgggttgcccatgataccagaagcgccagacagcattcaaaggatgaacagcagcgccgcttccatgccgcaattcaagcccaccattggacaatcggcagatgctggcgttgcgcagccattgaatgccatcccgtccacgtcctcagacgctacccctgatgtggccaccagcaacggccagacttttacgcaacaggagtgggagcaagatcttgatatccgcctcgttttccgctacctacggtcacgatttacctcgtctcgcccatcatctcctccgttcacatcgggaacatcgcatttagccacctcgagcacccaagagttagcggccaaggcagcccggattcgacagcaccatccactggtatcccacgcacatgcgaattcacacggccaccaccggccccgtccggcggagcgacgcagtttcagatcaacaacgccggctaatcccgtcacaatgagacatggtcccggtagctgtgcaagccagagcacgaggcgatctgcgaggaggagtagcatgtcttcgaggcaatcatctcggcatttttgggacattgggggctccattgggactggtagtatcattgctagcgccgggcctattatgggaagttggggcgaggtctaaatgtatggtcaacgtctggttggggacgcattttcggcgcacatctctgtttcctttttcttctcggtatttagaccctagaaggtcatatttggacatcatgttgcaagaagcggtcaatatattcctatcataatggagcacacaacggaagcagggcgtattggttaccgggggagcattcgtcacccaccactcatgagccagaataagttagacatttcgatggtttgaaatcccaacaattttttttcattcatggatacaactcctcagcctcaatcgtcgccctgcgtttccaatggataaacatgagcggcaagttagcattcatataacggcgatgcgagtgtaagcctcgttaatcagatgtgaacgaccgggtgactgccgagcacaagcttttgatccaccgacgacatggtacgtcccattcgccggagagatcaagagaccacttggggtggctgggctgcagggcaccgagaatctgagagggtgagaaaagaggagaagctctcacagaggtaccaaccgcccattgcgacgcggtcaactgagacagggatgctaagtggtttctaaccaatggttgagctccagcatcgcgacaggtcgaagcgagcaaggggccagcagccaattcgaggacggtccgctatggatctacacccctcgacgcgtttgttcataatgagcatccaatcgcctcttttctgcttgtttatcaacgctgcagcgaggcacaacaaacgggtcaaaagtggatcgaaacggtattcacgttgaaaagggttgcatggtatgcattgccgagtcatctggcagtgctggctatcgcaggtcgacagggatggagcgaaatcgtgtgttcctgggcttcacctccttcctggatgtgttcgtgctcccccaccccgccttgcaccttgcccgattctctgacctgaacctgagtttgcgacctgcgacctgcaacttgcgttttgcgacttgcgacatcgtggtcccaagcttccccagtgctgcctacaacgcctcacgttttttttctttgcttcgcctttgctacctgcctgttcgtgcactgcgcgcgccttttggtcggatcaccttttcacagttaaacttcgagaatcactatccgtacctatattaaataccagttggttgccgtttgctagcccgtcttcttccccacctcaccttgtcgccatgtctgtgtagtcttgtcgcattgtcgcaaagctgcgcaagcaccctgtggcgtctgaggatgccaatacgcctgcttgggaagctgagctgcggcgcctgaagctatccatctccctcagacaagctgaccaggaacagtatcatgtactaagcccgccgtgtcctcgtcaagtcgcgacccagcttagtcctggcgttgggtcgcaccggaaacttgcccgacttctcgtcctctcctgcaatctacactctgcaacctgcaatctcgcccatttcctttccctcaggaagccatccgacccaacttgttccaccacccaaaactaaccgtgtggagggtcaatcgcattgggagatgatctcccgaggccccaatggctgcgactcctttcgatccctctgtccagggcaactcttttgtatttgacatctacaccgatggccaaaccttgcgcgcgccggcgcctgctcccgcgactttcctccctggcggaccatgcaactacaccgacccatctctcccgcgatgcggttgccgccggttctggagcaattctgctctcgccgcaacgggtaccatcgagatttgcatgtgctcacatcatgcctgcttccatgaggatgccccttcaggtcaaacccagcaaacccagcttggcccaacccagatcttgcctgtggctggcgtcgtaggccaggagaaccaaaagcccaggagccaccgggaaccgctgagtcccgtccaggagctagtgaactggccgatgcccaccagctttggggcatcgttggatctaaacctgctggactttcaaaatacggaacctaacccaaggatagaggccaccactccactgccgattggacaccttcagccggctcaggacagcccaatgcccgacacattcaaccactggggggagataatcgagactcaggccgagaacattagcctcagcgggtttccaacacttccagctcagtgtctgctgacccaaggacctccatcgacaacttcatccagccaggccagatatctacgaccatttgctgggaggggattgcagacgctcaatgtgcttagagaggatgccgtttgcccaggacctaatgatgatgaccctactcaggaacatgatccattgtccaggcgcgagcgggaggagacacccaaggcgtcttcgcattcacagggcaaaactccaaaacctgatgacaacagcgcatatcagaaactcaccgaaacagtcgagtcacacgaacagcgaatagacagactcgaaaacacctccttttctgttgccggccacgaagaatgccacgacaagcacgacaacgtcgacatgcgagtcacggaactggagtcacgggtggatgaagtggaaaaaatgctgaacgacaatgggagcgtggtgggaagcaggcgacacactcggaatgatgctattgccgacgatgctaccgccagtgtggtctctgtagccaccaacacgacaatttccgcatccaaccgggttgaggtgtacaaccagatccaaaagctccaggctcaagtcaaccagctgcaagctgccgcgctgccaacgtacgccaagccctgggagcttgaagtcgtgtttatgccgttccccctgaaaggcgtgtgggtgcaggcaaacgagtttcctgcccaacgccggtctctaggcggtgatggggagtggatgcagatgcaaaacacgctcagcagggcaacaccagatccgcagtcacccaaatttgccgagtggcccggtcaatcgccagagtcgaactggttgcttccaagggcgttcgcggcaggaagaatcattgatcagagattaaagagccgcggcctcatcaagacagttctggttcgaggagctgatgcccgcagtgttcagcttgccattcacgatgccttctctgaagtcctccgggtatctgctctcgctggagttcgatcagattattcgccaaactccccgctaaacgagttcatgggtctgagacaagcatgggttcctctgcgaaagcttcacaaggactcaaaactacgatttctcacaccagctgagatggctacaccagcgctgtgggatttcacctttctggtttcgagtgtcatcatgaaagccagcggtgtccaccgtctgtacatcacgcaacccgaggcatatctccaggatcatcccttgggctatcatgcgatggatgctggttggacatggcaaaggcttcgcgaattgagtagattctatcccgactctcaaagtaccaccggcgatgttcccgaggccgatgctatggaagaatgctgggtgtggaatgatcgggtggatgagcctccaagtcacaacgcatccgtcctgagccttcgccactcacacctacagcgtttgtctagacgctcctccaccgagccctcgcagcagttttataccggtgtgcagtcgcccatactcaccaacggtctgagcttcatccgtgcagggtctcctcttactcaaagagaacgaaagggctcttggccgccacagtttactcggactggctcagtcccaccaccttccatacctatacagtctgcgcaatccgtggcccgacgacgtgtctcgaccgtagcgccctatgagcggcgctcctcccctctggtcactcgtccaaccccacggatcactactgttcagacgtctggcgtatcagctaagaagcgacgactgggcacccgctcgccgagtctcgtcccgcgcaacacacctcgttggagccgcaccagcatgagccggtcaccatctctcgccccgccaggcatgttcggccaccatgacgagcgcgaccgtacaccgttttactatgcaacccctcacagtgaagctgtgggcgaatacggctatcagcgtgggggaagccggggccctccccaggcaatgttgcgcaccaacggctacgaacctgacgacgatgaggacgaagagatgacagatgatttccaggacgatgacacccaaggaagctcgtcggacccctgcgatagtgaaatgactcatgacgactctcctgccaaacaggtgagagtcagccagggatcgtttggttttggaaccgacggcgagggcaatgacatggatgacgtcgacattgatgtctacgaagacgacgaggaagacgagcttgatggagtcgacaccgatcacactcccggccgtcaaaaccattaccatagcagccacgccgcctggggcaaccaagccgctgtcgcgcatgtcaccagaccggaagacatcccgcgggctggaattgaggaccagatgtctgatggtgaaaacgtggacccttcctcctctttttcttccttcgcctcggatgtatccggatcattccactcttcccaatcgagacagcagcaacacgacgaccaacaagaagagatagaaatccaccaagacgaagacgaagaagaccgggaagaacgaaggagcaacaccagcgcgagaagcagccaggcgccgtccgagtacagcagcagaccgggcccatggaatatcgttccttcccctgctagtcctaccaggactatcacagctgacaccaaggctgtggcggccagtcagcaagaagcaggtgtcaaggcccactccatcaaaagggagagatctagcctcaattctctgatggatttcaggattcacgaagacaggacggctcagtcatgatgcgggagctgaggattggttctggaaatctcatctttactatcatagtacatacgttttcttatgttttttccttatcattatttggatcagtttaagggaggcggggtttgaggatagcgatgatctaggttcttattatcactctcggatttctcactcacacatggcgttttgtttcttggatctcaagcgagcatctttgactactatctcacaagggttgcggtgggcggtttgtcttgtctatggggggtttggcaattgggaatatcatgtacagggagcgagtggagcgacaaattcatgtattagcgggtcaagaaggtttatctagcaagttttttatcttgcattttcatagcggcatggttacctacgtagatatatctcactctgtctctatgtttgtggtctgtatgtagtggatgttccctcgacttggttggtgtacgagtgtggtacataggccagtattcacctgtgtaaacctcagacttaataatttcaaagcggcagaaagaagaatataacgacagcaacaccaaacacagacatcattgttggtatcatatcgcagtatctctaaaatcatggctcgtaaatgcaataataacccacaaccacccttttttgtaccgcccgcccctgaaacgccaaaactccagtcccctcttctttagcaggcgacaaactaggagaaatgaataccctcctcgtggaacgccaccaatagcttcaaaaagtcgttctgatcgcactgcctcgctctcttctcccccagccccgtgctcgcaagcaccttgttgaccttggccttgaccaccatcgcaacctttgacttggggttcctgctcggcgttttggcaacggcggccttgtcctcctcgtccttcatctccttgaaaaactcgggcatatcctcatcgtcttccacatccatcccgttatcatcctcctcctcctcctcattatcatccgcatccgctccatcatcatccatatcaacatccatcccctcttcctcccccaccaccgcccccgtccccgcagcagccccttcatcaacaggaatattattcaacgagcaatacaccttgtaattcctctcacacatggccaaaacctccttgatcgcaaatgacgcattcaacgtcttgttcttcctgttgaacgcaatcctcaacaacccatcaaactcatcaaaagcaatattcggcctcgccgacccaatcaacggctcaatcctaacaacgtcactctccaccttgggaggcggcttaaagttttgtttccccaccttcatgatgtgcttgcaggtggcccaaaagttgacattgaccgacagacgggagtagagcgcgtcgccgggtttggcgacgaggcgtttggcaaactcgcgctggaacatgaggaccgccacgcggggagggttgggcatggcgagcatcttgaagatcagaggagaggagatttggtagggtgtgttggagatgagggcgtcgcaggggggcatttcgggcattttgatcacgtcaccgaggatgacttcgagctttttggccaggggggtgccttggacgcgcttggttacttcggcgcccatgcgggggtcgatatcgactgagaaagagggaacattagtacttgaaaagggggtagggggtggaagaaaggaaggaaggaaggaaggggggcggcatactggcaatgaccttctttgccttttccagggcgcggacggtgatgttaccggtaccaggaccgatttcgacgacgacatcggtgggcttgaggtaggccttttcgacaatggcgtcgctgatgccggggttcttgagaatatgctggccatagtccttgtcgaacttgaagatgttggtgctggcggcgggcttcgacttgcgatcgtaggggccgctgggccctccgcccttcttctgcttggcggcctttggcatgatgtcgtctgcaattttggcggtgggatgatcagactcgggaggttttgttcggaaccttgcgacaggtctgttgtctcggccggtgactcgcgcttaaagtgaatacagaaccctcaccgcagccttctagcgatcatccgaatgtcccatatgttccacataatttttggggctggcagaaaaaatgggaccccgccagaatcgataagataagcccacttggggggtcacaccgcccgagcagtgccgagcatggggttgccaagccacccaagttcttctgcgaggttcagcgctccaggggtcgagcaagcaagagtgggctgtttcgggctgccgaactgacgtaacgggccgcgctattcattgcggcgaagctcttttcaaaggcacctttccagacaggtaaaggttcgggtgcttccatacgatcattctccgggaccgtggttgaacaacactatttttctgaattatattgcctacctaacttgttaatctcataatactacctgtaccacaggctcactgtgtcgagtgagctccacctgcagctgcttgcaccttgcttggcgtgtgtaagcaagaaggctgaagctgcccgagctgccatcatttgtctcggctaatacattttcacatcaataccgagaatcaacatatcacaacagtcaaaatgtcgatacgcatagctctggagaacccgcccgagttctacacgaacttggatatcatgaagggccatgtcgtgctcacccttagccggcatgagacagtgggcgccatcatcgtgaagcttgagggagagtcaaggacggccctgggaatcccaaacgacaactctagcaccggagtaccgcacagagaaatgccatcggccggggacatcatctacgaaaaccacaagattctctacaaagtagcccaggcatttcccaacgagaacgctccacctcaggccagtcccatcgtactcaacccaggtcagcatcattttcccttccagttcaagtttcccttcaacaactcatgtggcaacgccgaagccatggccaagattggaggtgttgtgaatgccggtggattcgctccaggagctggactatttggactaggcgggatccgcgtgatggacgggaccaagcagttgatgtactctcacgttacgaagacgttacctcctagtttcacgggattccctggcgaggcagagattcgatactacgtcaaagtcacgatacaaaggccgggcttattcaaggagaattggagatatcaaataggactcaaattcttacccatcgaaccacccagaccaccaaaaagcaaccaagaggcatatgccaggcgtccattcgcctttgcgcctcgcacgccaccttccacggcgccaccgtctactaagaagcggacctcgttctttggaaggagtaccactccgcaaccaccacccccggttggcggaccctcgaacccatcctcgtcggccgaggccagcttagcaacaccgccctcgatcgagatgtctgctcgcctcccacatccagctattctgacatgcaataagtcaataccactacgacttatcgccaagaaactggcacccagcaatggagaggtgtacctcgtagctatacagattgacctcatcggcaagaccatcgtacgatgtcaggacttggtcaacaacgagttaaaccgttgggtgatagtctcacgccagggtctttccatacctgtatccaagccagacgacgccgtaggaaccgaggttgtccttcccgatgccatctggaacaacgtgcctctccccaacaccgtcatgccgagtttccagacgtgtaatctgaggtactttctcttgtgctccctgcctcctttcttattcctattactgacacccccgcgatttagtcgtgagtaccaactggaagtcaagctcggactcgcctggggaaagccagacggcgccaaccacgcctccaacagctcctctttctttggcggttccaaccggaacaagggcaagaacctcgccaacatcccacaggagatccacctccccctcaacttcagcaacgtccaagtcttctccggtctcactcccccagcagaattggtagaggccatgcgtcaaggacgaacacgaccagccaggaaacaaaccggtcctaatggtcgtcctccacagcaacaacctcaaccacagcccaatatcccacctcaaggtgtggcttcttcatcacgcccatctgcaccagtgctgccgcctagaccggtggcagccacaccacagaacgatacctcggaagcggcgctttacccgcctcagttaagaccgggccaagacgcaccgccgtatgacgatgcgccccctacatatgaggaggcaatggcggaggagatgactgggccggtttttccaagcacggcaagaccagcctacagcggagtgacggatgagaatgcggcgagtagtttgcctgagaaaaattagcctttaacttttccgagggatgagaatggaaaagggggatcaagttaatttgaagcatttgctgttgagggcatcggccttatcacacactcaaagagattccctagctcttctctctttttttccttcttttttgtttctagcaaacttaatatccccccttttttccagtctagtattaattagaatatggataatactatcttcagtgtcgtctctttgagctaggtagttcttcaaatcaacctcggtgtatatgtcctaccttttgcgtacatgtgtatgatttgaaacaagccttgatatcgcatggatacattactggttgagtaataaaaagaacagtcaaacaaaagtgtccatctcgcttggtgacgcctcaagacgatgttgataatggtgatcatatggacgcaacgcaacagaatgggagccatttcagcctacttggtctgtttaactctcacatgtacacccagaaatcaggaaggacttcaatagcaatttgttttattcttttttttcaattaattgctaggagtatccgctaggtagctcaactatccagacacacatttacaatcatttttcatgtagtatgcagcgcagatattcatccgccatttcgcttgatcgatcgacagatgtcttgctgggtccatcccaactaacaaatatgctatcggttgttcctccccaacgagtgcgcagctgacgggcaaaatcaacgatgctattcccccctccccctttccctcgctgactcgtatggtttttgctccactccatccacgcctcctcctccgtaccagccaagtacccaaaccacaggtgtaacacacctggtatgaaagttcagcaaatagcgggcgccattgtgcctctcgtcccccacttttgttgaataaaaacgctagaaatccgggtatagtttgctgacctcccccaaaacgcccgcaatgcttggaaagtaaaatgactataaacaagacaagaatggaaaggtgattgactttggaaatatcagtcaatctcgatcacttccacttcgcgtcgcacttctggccgacgtgccgttgtgggtgtagatgatgcttttctcttgcgggtagaggagccggaagggacggccgcaggagtgtccgtctcactgaggtcgtcgtcgtcactctccacgacggcggtccacgtcccatccgctttgacgtggatcgatttggtctgtagtttgttctgctgagccaactgttcacggacaccgcaaagaaacccgtcaatgcgtaggctgttgggtctcgcatcttgaagacagatgggacagcgccatttgtcagggttacttggctcggattggatagaactggggcagccacagtccggcgtaatgctgtgaaagcacttggttgtcggcttagaagggcgagtctcgagccaagtcagcaagtcaaaacactccagatgcgtgcacgaggcaccccttgcgggaactgcgaacatcttggccgtgaaagggtcagccatgtcgattggcagatctggagcctcaatgatcaacccatcgtcgtcggagactggggttaaccgcttcttgatgatctgcagcgtgtattcctctggtagcaggccgttatcccaagcgcgacggacagcggtcctttcgccaaccgtctcaatcacctcgacggcgatgacgtagctgtgctcgccacttttttctccggagacaggaaccacaatcgacagtttgttggagccgcaaacgacgtgatcagtcaactcggtcgccaagtctttgccgttgtgaggttgccggcgagcttcaagagtcttgtcgttaaacctcataaaaatgttgcgcggccagctcatctcctttgtgacccactcatgctctgccggtattgttctcgaggggccaagcttgcagcaacggagtctccatcgcagagcgccgtcaaaatgcgtactgaatgggaccaaaatcgccgaagttggccttgctgttctaaccgcgaggtcaaactgttccgctgtcacatcaaatgaaaactcgtataccgagccttgcggacgtacaaggcttggcggtattgcaaacctgtccatggcttggaaaagacgctccggtgttccatccttggggacacgttttggacttcggcagcccgactggtgcaaagaagccgcaagagatctcctatctgtgggttcatagggccattctgggcgtggaatagtcacgtccttggcaggaataagcaaatccggctgcctaggggtcgacgctgcgcgctgaggggtgctctgcgatgttatttgcactgccgctgcagcgggttgctgtcgatccaacacgggtcgcggcacaccgaaaccggtaggtgtcgtggtaggcgccaatgatgctcgccccaattggggcgaggcgacttgcgcaatttgtgtattgatcggtgcaacatagggcctttcgaggtgtcgccgttgttgatctggttgaagttcgtgaagctgttgatgttgctgggtttggtgcgctatacctcgttgtaaaacctgctgctgctcaaacagctgctgttgaaactgctgctggatctgctgctgctggatctgtggccgttgctgaaattgctgttgctggtattgaatctgctgcggcagcggcatgcgttgttgttggatgtgttgaatctgttgcaatggtgattgtggcaactgagcagcttgcagttcccgcgtctgctgttgtcgatattggcttaccatctgctgtgccagctgtgcctgatgcagctgtgtcgcctggtactggggagaggcagaatactgcataacaggcgagggagcgggactatgaaacgatgtaggctgtggaggagggaattgctgggagggaaccacgggtggtgatggtactccgagccggactggtgggtgttgattcaggcgtagcttctcggcgtcggacctcttgaccaactcctggtatcgggcaatgagggcttggttgattctgatgatggtctcaggagaatccccaacggccacgcatgcgccacaagcctgatgcattcgacgttcttggtcctccttgaatgcattgtccaaagcctgggcgtggacaccatcggggataccgagtcttcgacgattggcagtgaataggatttctcgcatgatgggagaatagcacagcagtcgaccttggagttcatccagcacgtacggataccggcgcatgcaggtttcctgcgtcagggaaacatgttcagttaccatgctccgtaggaaattgcccacccacgatttcattgtcgccctaggaactggatgttcccgcagctggtcaactgagaccggaaacgaggcaaagaacctcaggtttgtcggggtcagttgatcgttcctcttgagaatctctgccacggtggtaaacccaagatctatcatgattatatcggccacatcatccttcttaaggatacgatgggcatcctgacgattgatcgaccagatggcgtagagctggtgaagggccaggaagaagtagtcgttccttttgcatgcatccaccaaaagttgaatacgcggtctatccagccgagcgttcatcgcagtcattcctccatgagcattgacgtgtcggtgaatctgtgcctcgaaggcctggcatttgagcggtacggtgctggggacgcgaggtcggtcagtatgaggtctccgggcgcgttttgggggacgacttactcggtccgacgccgttcttgcggagtaggagccgcagccgcgttcgttgattgacagccaccatcttggtctatcgccgcgtccacggcattgcccgactcagcgctcacggagcacagctgattgttgcttgtctggggggacagggcgtgagccgacggggcctggaaaagggaccggatttctggtggccatgattcatctggttgaggagtccaactattttgattcgctgctgggtcgagctcgaaacgggcatgggtcatgggaacattggttgccgccgacgccggtgtcatgtttgatgccggagtcggcgcatcagacagtgaggcgggaagcggattcgggctgtccaaggcatttgacagggcagggcttggctcgtcactaggagccggcgatgggaggattgtctgagcgggtctgtaaggattagcaggctagccatggagcgctcctagccatgtgtgaacggggtctttgcatgaatggggaaaggtgtcagatggaaagaattggataagctatggccttactggacttcggttgtctgtatttgcggtgatcctgattgcggtggtggctgtggttggaaatgcggttctggtcggggttggggagcagtcggcagcgagactggaggatacttcctcggccggccccgttttgcttggggcgctggttttattgatgctgcggacggaggcgggttcgggtttactggaagagccctcgatgctgccgatggcggattcaaccacgagggttgtgctcgagcacctagaaaagcgtttgcggtcgcgtttgaagatgcaatctgcgcacggtcggcgcccgaagccagctggtttcgactggaagttgtattgggcgccatcggtcgagtcaagccgcgatctctctcacgccccgatgttggccgagaggagaggagagggcttggaagactggagagagcgccagtggtcgggtcagcaagatgaaccgatgttttcttcttttgatcatgcagcggtgaaccaaacagcaaaagcaaacaaaggcaggcaggccagtgtggtttgcagctctagcatcatatgccagcgggacagctggagaacgcgtgggcggaaaagagaaggcaacacgaaccatcgaaacgaaaagaaacggaatcactaggtttctaggcaggcgatgattagaaaaatactcgaatatatatttcaaagatcatttgtactgggagcggcggcttcctcgtcaggcggaaataaagccaggaaggtgcgtgaagttgactgaggcaagatggaaggaaaaccccttgccaggagctttcttttgagaagcccaaagtggcaagcgcattcgagcggacccaaaagaaaaatgacgggctggactttcctgccaaagcaaagacaaagtgccactacctcaagaccatcatggacagtggctaccgactgcaggtgcctgcctaaggtatgcatggaattaggtggacattattctcaagaaaatatcgcaatacaacaaacaacacgaaggcacttccttacatgcgggttgctgggccgcgcaaagtgcgggcggcacgggcaggtggcggctgggaattttcgacgtggtagtcgcagcccggaggctaccttatttttatttatttatcccaacttctcatggagcaacagcccagtcgacaggttgcccctcctactcaagctgttggcgaacgaaacgatgaattttactgttctcgcccactcgtactttgtgggacaatgccctgctgtgcgagtagagtactggaggagacataggtacatggtactcgatgcacaatgtcctgcatcccatagtatgaaatacctgggttccccagaatcaacccccactagatcttgactacactaggagcttatcttatcagagctagactctgggcaaggagtgggtcccaagacccctgtctcaattgcctgggccaaaaaaaagtttccagcaggctgtcgcgcgcgggcagcaaccacacaaacgaagctcacgactggcaccaccccctcggctttcaggttttcttcaccaacgcattcgaaatggcagcagaagttcaaccgttaccgctggttaagctgccttcgggccccagccccgtcactcccgaacagcgatattggagatccttcaagaaccagaaattacatacctcgacggcaacatggcccatctcgcacatcagtttccccgcccagacaggcgccgtcctgtccaattccatggttgccgccacaaagatcaatgacctctttgcagtaacctcaggtccccgtgtggacatcttctcgatacgaaagcgcgagctcctcaagacgattggtcgcttcgacagcgaggcccattccggcgagattagggctgacggcagagcgctggtcgccggtgaggattcgggaaagatgcaggtttttgatgtcggcggcggtacaagggccgttattctcaagacatggcacatccacaagcagccggtgtgggttacaaagtggtcacccaccgagctcactaccctcatgagttgcagtgacgacaagacggtccggctgtgggatctgccatcaaacaaccccagccatgcctttaccggtcactcagattacgtccgcagcggcgctttcatccccggcggcaacagcaacatgctggtcaccggttcctacgatgagacggtccgggtgtgggatgccaggacaccgggcggttcagtcttcacctttaagcacaaggacccaatcgaagaagtcctgccccttcccgggggcaccaccctcctcgctgcctccggaaacgccatctcggtccttgacctggtcgccgcgaaaccactgcgtcttatcacgaaccaccaaaagactgtcacaagtctctcgttggcgtccaatggcaagcgtgttgtcagcggcagtctggatggccatgtcaaggtctttgagacttccaactggaacgtcgtgtttgggtgcaaatactccagccctatcctctccctctcggtcatcgccgccggcgcagcccaagaagaccgccacctcgccgtaggcatgcagtccggcgtgttggccatccgcaccaagctgtcaggagcagccgccgagaaggcccgcgagcgcgccgctatcgaagccgccattggcacctcagctctcgacaagatcgacgccagaaatgccaagcgcaaacgcgcagccgtcagcaacaagaacatggacatgctgggcgaaaacgtcgacgtcgtcatcccaacatcagacactggctccaggaagaagaagctcaagccctggcagcgcaactacaaggatgggttctacgccgcgtgtctagacgaagtaatcgacatgtccgggccagagtaccaacctcttaccgccctcaccgttctcattgctcttcgtcaccggtccgcgctccgcgaggcgctcgagggtcgcgacgaagtgtccatcatccctcttctaaaatgggtgagcaaatacattgttgacccgcgctacctcagcatttgcgtcgatgtgtccttccacttgtacgatctctacagcgagcacgttgccggaagctcagaactggcagtgttgttccacgctctcctcggcaaggtgtcaagggcggcgagcaaggcgcaaaccgccatggaagtggcgggcatgttggagaccttgacgttggggaataactagggggcagcgtcagtttgttaatgaaggggcaagcctacttttgtgtatttcttaattattctctgtctggtctatttgtattgcattgcgtcggagtttttatattgttctatttgatccaagaggggataggaaagggtttattaaaaagccactgctgctctcgtactgttgttactgttgtggttgttttgttgtcttttgacatagagagatacctatactcggatattgctgcgagaaggggcatgacggggaaataaaacatatgtttcggatgggtctacctggtttggcgtttcgtggcggtcaacgtctttctgtattggtgtgtaatctcttgtcatgatacggtcttttgaaatggctcaaatattaggatgtatttcttcacatgttagggttggttgtctccaaaaacatcactttcggcgatgaatcatgtcctcctcgccgtcaagccgggtacgccacccgatcttggtgtgagtcagtcggatgccctagggctctgaaatcgtctcccaaacagctggtggtcacatcaaatggattatccatcatggttttgatgtcagaggctttgagctaatggctcaaccttccaccaagactcttcttttctcttcccaacaaaagccaacttcaaccttaataaatgtgctggggggattcatcactcatcaagatgaaagaggaaatgttcaatcaagtctcatttacgccccaaatcatccataacatccccacaatgttggcccatccatatccctaccctaccctacatgttcccaaaaagctaaaatccaccgctgtatataacagaacacctcctcgtcatatccataagtcgtataggcaaattcaccttccgtcccaaaaaaagtccaaaccaagggaaatgaaagctcaaaaaatgatgagatatcatagaattccaatgttggaaatgcgcctctttttaccactgcccctgatgcgcatacccctgatggcgcctcgacgatctccccgttccaatatcaatcgacctcaactcctcctccaggctcaactcccttccaccacccaccccaccaccattggcatacccgtcattttgatgccgataccccgcgtcatgataatcataatcatccatccctcctcgtctggcagcactactgctgtgcaactgcagcgcgccgctcatattactattattatacccctgggaaggcggcaacgccaaagggatcttagccggaggaggaggcccattccgtccaatactcccctgcatggaagggtggtaattctccccggcgccatagtcaaaagttgaggctcgtgggagatttctttgggaattaaagttgtcctggtgaggaggcaggggagcaagaggctgagagtctaagccaacgttgctgttcctccttccgggaccaagaccattggcgccagacatgactggttctgatggtgagaacccagacgagatggacatgcgatggggaggtttcttttggaggcgatttcggccgttggagacaggcggggacggagtgagggaatcaaaagagtcaggtgcgacgtagctttgtggacgggaggcggcaacgatgcgtagaggacgacggccggtcgaagatacgggctgcggttgtggaccacccggtgtaggacgaggagcgggagatgtctgtgtcggcttcttcgcttcgggttcaggtgcccaagtgtccatgggcaaatggtcagaggggtcaacttcgcgaccatcgtgtgtgatgatcttgccagtggctgcgtcgtagtctggcagagcagcggtcgggtcgtgcatggcagcagcggcggcggtggggttgagaacctcatagctgtcggggccgaaaggaacgctggacatagcacggctatcagaggatggtggtctggggcttactgatttgcggcggatggtgtgttgctgctggggtgggttgtgatgttgctggggcgggttgggactagggtcacgaacgggtgggttgggcgagtatgcccgcgacttgatcactacgttaacactcgatgtcgatggccctgctgtgtaagtcatgggactcctgccatgagcaggaggctgagcgttgtagctcgccggggatccatcttgatcatatctccgagcgacatccatggttctgccccttgggggtgtctccatttgcgcttgttggttgtaccgtcgacgaccactgtcttcgttgacacgcaccgcgatctcctgtgagatgtttggatcaatcccaggaatcaacgcagcaggcactggtgcagccgagtagctgtttgacccattatcgggctcatctcgccatggcagtgctctctggttctgatgggactcgtacgtgggaaggctaggctcggaatgccggccatagttggaagaagacgagtaatccgacggttcccgccgtgacaagtcggtggaggacatgacgtagccattggagctctgatatcccgattgttcctgcattccaggcgaggtcgaacagcgctggtcttgcacgccaggagaagtcgagtaccgctggtcttgtacactgggagaagtcgagtaccgctggtcttgcatcccaggcgaggtcgagtaccggtcttggatcccaggagaagtcgagtaccgctgatcttgcatgcctggagaggtggagtattgatggtccactgcattgctcggtcttctccctgaaatgttcagtggagcagggctagtctgttcaaagtccagatcatactgttgttgagattggccaggaggcgccctgcccatgcttcttctgttcgaattagaagactcgggagactcggggacgtcttcgacggtggcttgcatgcctctatgtgactggtcatacccgttcgtgtcatatgaataatgtctaggtggcgggggttgctctatagcctgatactgagagccaggcagagcagctggtgacgagtcggcagccttgtaagttggacgccccgggtaacttgaaggggaggcagaagcacgatgggcctcgttcctcagaacgtcttgtctcattgtcggcggagtcccttgaaaccctgaattgggagcagagttgaggctaggcctagaccgatgggcgggaggtggaggaggtcgatcgtcactaaattcctgaggtggctcctgttgtggtgctccatatgggtcactgggcctagagtcatagcggtcgtacgactgcgattgctgtccagggtatctgtccactctttccggtgtctggtattgttgagagggcggtggctctcgtcgaagatcggcactacgctctcgacgaggataatgttccagtggtggtggttgctgctggtagcgcgacgactgagacccatactcaatatgctgcaggggtgactgagacggcacatatgatgaaataggatttggctgagagcgaggcggtgtctctaccggctccggcgcaggggcaggtggtggtggctttgacgacggtgcgggtgagggtgttttccccgtaaccggatccgaaggtaggggccgccgtttcggcatggccctgggtcccgtggcggccactggcgctgtctcgggttgctgctcattttctgctaaagaagcttgttgcggatttcttgacttggttggtgccttgtcgggcttggggtggttgtcgtagtatgtgagttcaagacggagctcgccagcatatttacccctgcattgcagctggtgccattgatcactctgcccacccccatcgacaatgatatcgcgcaggtctatccatgcctcgcctataagttcggtcttcttgtcgtcgttgaacacggacactttaagctgaaagtagtctggtgagtcgtgaactgtgaatctgagttcttgatccctgtgtgacatgacatggttagtcgagttcaccatcccatctatctagccttgtgttgctgtgacccgaaagattgggggaaacataccatctgggagtttgaccgccacgaatgtcggtgctggtcttctttgcttctttccccaggcgcgcagcgcagtaaggatcttgttttccaatcgtcttgcggttcggtaagtttttcgcccggtccaccaccaaaacaagcgtaccgatttctggtccatcggcactcatgtctgagaagatgcccgccgtatgggcgagcgggagggtttttgttctggtggacattttgcccttatttttctgttttgtggctctggattgatcaaaagaagggatcgggattgtttactcgaggggggcttggcccagcggctgttggtccttgttttgggggggagggtgtttccaggttgtgctgacgtgcggtccgaggtaggtgccccgctgacaacgaggtcgaatgcttgacttcagaagtgtgtcaaaaaacaaaagagaaacatgaggtcagactgaagagttaggccacgacccagaaagctcaacgaagggaaggagggaaagaaggagcaggtgcagaaagaagaaagcaccctgatgagagagcaggtggaagcacaagcacaggaagcacacaagcacaagcacaagcatccgcacggcagtggtgccgcccgggccccccaaacaaccgctagcttgggttagatcgcgcgtctctgcggtggttgggtggattccaagttgggggattacgtgcatttccactggatttggggtggctggtgcgcccgatacccgcgttaccgcgcaaatccgcgaggctgggctgatgcccggaacaggggtttaaagctgtttcctgatcgaccttgcagtggcagccccaaatcctcgtctctgatttgcaccagcctctttccccttcctgcatcccgacatcccaagataaagagatttcaactgcagcttgaaacgcaacttccctttgcatctgtttccaggttgtttggttctttctcgggttatggcgtgtcgcgactcgcgagccatcctctgtctcccaagccaccttgttgacgtcttgaactccaccttgatgttgcttttaccaagaatccacgatcttcccgaaacaaaaccccacaactggagaaatcaggaaccggatttcagctcttgtcatgtctctcgagctggggtcaccactgtaaaggtatatgtcacatgagctatttttccaggtctatgtaatacctgaagacaggtatatttgatcactgttgtgctagttttgcttggatgctatggtagttacaaatgaaatatcgaggagactcgaggttggattatattttacaagatttcagacacgctaatttcccgcttccccacgtgtagcggtttacatgttgttgaggcgctcctcagcagacttcttagcctcgtcagagacattagggttcttcatggtcctgtccggccaaaccaccgttagctgccgtgtttcggaacgcgcgcctcggatgcaacggatcacttacgccttgagaccaccggcaacgttgcctgggttcttgtccttggtgtcgctggccttggggactacacgcgtgattagcaagagacatcgggtgttcatggagagcacgcgtaccgtcaccaccgttgaactcgttgtcgagaattttttgggagttatccttggactccttggaggtgttggggttgttcaagttggccttgtggccgccggcgatctgagcatcagtaggcatcctgaaggttggttaattgtatggagagattgcgttttgtgtgaggggtgatgagaattagtgtctggaaggtgggatctccccggtcatatatcaacaataccagttgatagcacgatgcggcttgctcgctcaacgggtggctttgtcgtgtagagccaagctagagctcactataggcttgggcatgttttcttgacgcaaggttccttgatcgggattatagagtagcacgtcatggacaaaataactggcacagcaaagtaggtcaattcgggagagtggtccgaatcgcacttgaaaagatacctagttaagatgcgttagagatgattagttactagggctcggaagatagttaatagatcttaacgaataattaaagaggcctattcattatttaatgaggtataaattaatggccatcacacgttctactaacctagagtacctgctattttgtccaggacatgagtaggcgcttcgaaaagaggacggtgagaatggccgacatcatgggcaaagtccgaacatgatgtcgagatccagcgggcgctttgccatggagtccaccggacccatgcaaacatccgtagttgaagctaaaatcgatcgctccaggggggacggttcttagatccagattcccgcagatctacaactccacgtcaataactagaccgagcgaaaagttcccaaccttgaaccgtcttgcaccagcttgacgattctgaagctaaggactgatgatgtcaggaaaaggggttcaggaacgctaacacagatgtctgtctttaggagaacagcaagttcgtcatgtaacgtcaatcataaatctttggtgtcttgaagcccgagatattcagctgcatcttcaaaatctggatgactgccaagacgggttctttgatacaacaacaatataggggcagggtgtgtgcttaatagccggtgccctgctttccgatcttgcatcatgtcagcaatcagtgagtgatcttcccaccaggtgccgtcgtattgggtgcagcaaagctgactatgcacatatatatgtctgagaaaggtaacgaatgggaacaaatggattttttgtgcaggccatcaactccaacaagagtcattgcgtcctctgtgcgtctgccagtggtgacgaggaacttcttcagccctacaacaagctccactggctgatggggaaggctagaaacttggcgttacgtcaatagcgtccgaggttcaacctcgcggcaacgtcctgtcaatcaaattgtcgtgatagaaatgcttactggccttctgtcgtctcggttgaggaacaagacctcagctttcagcattcatcatgaagtgaggacatccggacgtcccgacggtgaggacacgccaaccgtgactcgtggaaagctgcgtccagtagggagacactgcagcgttgtgagcccctcgggccgaatcttcaggctcaaatatgctgtcgatctttgcagattatgtgtcggtaaagaaatcaggaactttggaagttcaaagtcgacgcaaaactctttggatgcctcgtatcttgaagctcaaaaaacatttacaaaagaaaagttgacatcggacaataaagccacgctattcccaatcagaacatctccacaatttagcgccgttgtcttatcgataaaccaaaaaccaagccacagtccccatctgcggcgctactttcccgcttcagtgtttcccccgtttggtcaccacctgtccacaaggctgagagccgaattattgattcttgtcgtcacctgcacttgcccactcttgttgatttgctcgtgtgtggtgcatattcagctccaaactgtcgggtctccgccttgcgccccgctctctaacaaccgttttctaggaggccgtccggggtaattggccgattccccacgtgctaggcatgttgtttcaagactttcaaaacatcacatcatcatcaacaacctaaaaccacacccaagccgattccaaaaatacctcccacgtggctggcagagcaaggtggcgatttcactcggtacctacaacatggctgcctcagacatcctcctctctgacaacccagagccgaaacctccggtggtcaactacgtcctctcctttttgctggtgggcatagcgtgggggttgacgacacccttcatccgcgccgcggcccgctcccactcccctccaccccacccgctgctcgagtcacgctctgtgcagtcgagtgtggtgaagcggaaggtgctcggggctttttttggtgtgatggacctgttgaggaacccgaggtatgcggtgccgctggtgctgaacttgacggggagcgtgtggttctttttgttgattgggaaggctggtatgtgtcaccccccctcccctcgtatgggaaagggtaggtggctggatggttgctgataggatgatacagaactgagcttgacggtgcctattgtgaatacctgtgcgttcttgtttaccgtgctgggtgagtggtgggtggaagggaaggttatcagccgtggtagggcttgttgctatattcaactacggccaatagctaacttgtgtaccagataccttgattggcatgtttttagccgtgggtggaattgcattgtgtgtacagagcaagaatgtttagattcgttgctggtagttggagtacatatattatacacagtcgaagagatttagcgtatcatattgaagccactcaatgcaagactgttttgcaattcaacaactattttcctacgctgctcccggcagttcgtagggcccccccttttttggtatcctttaacgtcccctgacaaaatatgctgtgtgtatgcatgtatgaccatccaacccacccgcaagaagctcctgttccagacagagccccaagccagtaccaaaccattcaacaaatatgtacagttgaactttttaataaccatagcgaaacgacaaaagaaaaggaataaatccaaaacggggaaaataaaacctgtatccctgcgtgtgctgacccgtggtatcttgtaatccaatgtttttaaaaaccctaaacaaaacctggaatccatcgaaaatgtcgccccgaaagaaaaagaagaaaaatgttcagtgggaaattgaccgtcccccccatgatgcaaagaagagaagaagaagagaggagataattatttttgtgtagttgatgactcgcatcgtatcgtgttgttgttgttccccttttttggccgacggagaatttggcaagaaggggggcccccggggtatcgatgtgtgtaaacattaagttttgttctccgatcatggtcgtggtttcgtgaggcatggtgaaaaaatcgtcgagttgaaccggccgtgaaccgtgatgtgatcaggtcgtcgtcgtcgtgacaagtcgtgaattagggattaagctctccgagtccgaacccaccgctgcacagcgcggaggcttgggtcttcgtctacccagcggcccatggtcatgtcggagacctgaagctccgagtagatggcttcgtcggtgatgtttgcgagctcctactttttgtaagtttttctgagggggcaacaggaaaaggagaaaaaagaaacagtgaaaagtagacgtacagcacgcagttgttggtcgcaggccctgagttggctctggttgccagagtgaggcctgccacccataagaatctgatcccgccattcgatccagcgctgcacagcagcctgacggagatagatcttttggccttcgtgacggcgagcgtaggcgtcaaggaggactctgttgggtccatgacgttaataccaagaaaaaggggaggacggataaccaagtttggaggacgagaaacctactgcttaagctcggccttggcctgctcgtccgcaccaccactcgcgcgggggactgtgatgtcggcagcgcagttgagaatgtgctggccatcaagagcgcactggcgaagtgctgcccatccctccgtgtagtagtcatccatgtcggtagggttgaccggggcagcagcaatgtaatactgaagagtgcgaaagtcggaaagcaattcggccacgcgggcggtgcggtattcgttgactggagcttcccgttagtctcataacttcctgaggagcggtggcctgccaaggtgaagatcgcttttcagcaagcctcgtcgggggtggcgcctcggttggattcatgggagtggacgatggcttcccgggggatactttcgtaaatttccgatgacgcacaagcccatcagagggggtgggcattgtgttgatagggcttaggcttgagtgtagggggtaaaagagggggggtgtgggtgctaaggggtgagcaacatacgtccgtcagacatggtagcggtcaggttttggagaactgaaaatcgagtgtcgaagaagggtgaatatacagggtcaaggaattattgagttcgatggcaagaactgctcgttatctcgaacttggtgaaaagcaaggcaggagtgagaaaaaaagatggttgatgctgggaaaacaaggaaggccaggaggatgggagtatgctgcactctatgcaagacacaagagatatcaagtctgaaaagagaagagattggcgctcaatcgctgagtgaaggtgatgatggcttggtggtgtcctgtcgacggcaactgggggcgaaccccattgactttatgtagatgtctcgacatggtggatatcaaaccgttgaggggatcaagaccaaagacatcgcaaggaggactccgaatcagagttccccctagaggtacgtatcttggacggggtcaatgtgtgtgagtgtgtgagtgcgtgagtgagatggcagcatgcacgttgtcgcgataaacccgggactaagtcccggagtatttcgacagcatgactacgtcaaaggcttgggtaagtctatacccgcagagaggacagattagatcatcagccgcttgatgcccagcctgcaggccggtgccctgtcgcacgaggagggagatgcatcgccatgttagtggaggagaggtttgatggaggtggagtgtcgagatgctacgtcgatttcctgctatccatgtgccttgcattccattcctcgtagggagaaggcccctacctagctgggcagtgttgtaccgtgagtccacacccccctttgtccgtgataccgaatgaatgcacggccttgaacctccacctcccccaccgctgcaaggcctgagatgtgagaggctggagagggacgatggaggcagcagaatgacggcggcacacggctgcaacggtgtgatttcagacgggccctggtcaggctggacaagagctgcaggtccaatgcagcctcctatcgtttgggcggcatctcacggccaaaggctgtggaaatgccttgaagggttcgatatgggacaaaaagagcctctcgggccctgtcctggtggctttggatggtttgtgcaccgtgatgttgacaggggggtccccgaaacggcagttctaacgagtattcagcgacgccacagtagatgggctaaaccgctttcgggcctccccggtgatggccagaacggccagaactctccgtggaggcagcttgctgtggctcaagacttcggcagccaatggccttcctagccgtgttgcccaacaactcccaacaccgttgccgaaccaagctgaagcagcaaaaaacatcaatggtgcagttttgtcattcgattccaggccaaatgtgagcaagtgggagggaccgtcttccttggataactgtttttggactttctcgaagtgtctcggactggtgatgacggtgttttgcggtgtgaggacgggacgaacggcaggcggcgccgttgagagaggcttgagaggcttgaagcagccttggaggggatccacgacccctccttccatccgccaaacgcgagacgactttctcgccaagtccacgaagaaggctgcttgtcagcttctcagggccctctggtcgacctgcagcagcgtgcatcgacctctcacagtccttcccacgcacccggataaccttgcccccatgaactatgcactcatcgtccgaactcttctgccacactaatccccaacatgcctaacccgatcccacgcactcgggtagaatccgaatttgagaggcagctttgtgggtccctgcatgtaattccaagttgaaaccgaccagagtcgaaacgtcgatgaggaccatccccagatcctggccgctttgctggcggcccagaagccacacacaagagccgcttgttgacaaccgcaccagtggcatctattcccgcatctcccgccgttgctcccgtccaggttgccaccgcgtggtttggtccgtgtggccgcaggaatatgtaactgccccgtcagcaaaagcaaaagcatgttgatgcggtcactgtccgcccagttgcgttgagggtctcggttcagaggcacgaagctagtgggtagatatctggctgtttcacaccgcagcacgcacccacaacgaggaacgtcttcagccttcaaacggtaagccacactggatacgacacagggcacacggctacgaggctacgcccattgtgacatggttgaatcttgaaccggtctattttagacgctctttcctgcatgctgcatatgatagattctatggcacgagtgaatgaaccgtagcacaaaacaacgcgcgggatgtggatatagggggtccaaaaacctcaccatatcatacctgatttcttgtctactcccccactccctcactccctcagcctgaccttccaagagcccacagcgaatcagcacctggcatcctgcctggtcggccgcggcactacacccactttcccccgaggtagtattttctctccatcacctcagtccttctcggcgatagcctgtaatctgtcgtcgatctcgtcctctgtaagtgtcctgaacccagggtatgtgccttccttgccgtctgggcgtggccctcccacaataccaatctcaatctcggtcttcttgaagtccatgctgaggaccgtgctcagtgttgtgattgcaagctcaacaacctccttccaatcaccgtccgcataatcccggttcttgagcttcttctcgagatgattgagcgcctcctgctgcttgggacccgcagctgtgcccttgtaaccgatatagtaaccggcggggtcgcacttgaataactgcggccccaactcggaatcgagggagatcagcgtcacagcgagaccatatgggcgcatgtatgcctagcaaggatgtcagcttcgatattccaatattcccctgccaaggcaagtcaatatttcccgtcgtcatacccgttgagtgtacacttgactgatattggcaagtctcttggccagagcatcgcatggcatctcatagccaaacttgtatctgaactcggccgcttctgactgggcacgctgggagaacgctcgcgcatctgcgatggagcctgtcatgacgcaaccaaccgagggcgagatctggaagatgtgtgtgacggaagaagggtcgatgagcttgtcctgcaccacgctgttagagctgaccggctaggcagcagaatatcggttgcttctgacgtactggaaccttcttctgggacaggacaacagcgcagtccttgcccctgacgccaatggacatgatgttggcggctgtgatggccttgaaggcatattctgcaggacatccctttgtcagtctctctcctactcagacgcaaccagtccccatttccaattctctcaactcttcgacagcttcctctccttggttcctcctcgtctactgccctccttctccccttgcccctccctctcggctatggcacttgtacataccaacttggtacagtcttccttggtcggagaaaatggtaatgtgtcggtcgtaaccagcgttgcctgcgcatcaagtgttagccaggaccaaagtggagctcgaagctcgcccgacagcgtcgcagctggtaatcgacgtacccgccatcttgaccgatgcgagctgatgaaagctttattgaaggattgtatgagcggatgggaggaggacgaatcggtagatgcgcaatgtcaaagatcgggcagtggtggttgttttggtggtggtggtgttggtgttgagcaggcggcaaggagcttcgttcgtcgttgcggttggcctggcagggaagctccagctgccgatcgacgcgttgctctgcttgcctggagaaggctgacggccagctgttgcgggcggtctggctgccttgaaagttaggcattaattagaaagcagatcttggcttaagtggctggggcccaagcttcaatggtagtggggttgccccacattcttaacttctgctctgttatcgggcgcaagacccctgtattgggcgctgataagcactggcggaacagaaatttgctgcaggctgtttctcattcaactggcagcatcgacacaaacacccaatagaactcacgacatcgccaaacggccccaatatttcttgcattcggaaactcttgggtctcgttcaaaacagcgctactcggctcaatttgcacttttgccgtttctgtgggaacccgcgcccctgtccgtcctacgtcgtctgtctcggtccagggcttttttttcttcacctcggtcgacacctgtttgcctgcttcttctttgctggccaacatgtccgctcgtgtcccggcctggaagcgattgggcctcaagctcaagggagcatccgacgagagccctgtcttgagctcgaccggccccaatgccaattccgcttcgcaagtaaacggcagccctgtgagcgcgctcaagagaaagcaaccactatatcagtcgccggccaacagctataacagcaattcgtatgcgcaaactcccaacaagaggttccgagccgacgaagaaactcctggatcacaaaggaaatctgtgtccttcacagcggacaccaagaagacatccgtcgaaccagcaaagaagaaggcaaagaaaaagaaggccaagaagccagcgcaacctgttgccaaacccgagacgaaccttgaaccatccctcgattaccttcgccagtggcacactgcgcgcgactcgtggaagttcaacaagaaccaccagacattgctcattaagtatctctttgacggcgacaagatcccgtcagccgatattccaattttctaccaatatatcagcgacctcaagggaggcgtgcggacgaggttacgagagacggcggtggagatcaagaagaaagatatggagcagggtgtcagcgctttccctgccgacaccaaggacaaggccaccaagcagacagagtacgaggaggttatctcgcgatttcttgaggacctgcaacagcatcaaaagcaacgtcagtctactggtaccaatgccaatggcaagcgcccattagaggaggtacaatatgtcatcagaaccgtggaccctctggtcaagcagcgagcactgaggcgcatccgcgctgagatcgtggccgtagaattagcgtcggacagtgaggagagcaccataacatcgacagccgctgcgtcaactatcacttcttcctcttcgtcatcgtcaggacaggagaacgcagtcgcagacaagagaacacgcagtgatgatgattcacaacagcctgccaagaagcgcagactgagaaaagtacgcaatatcagcgatgatgagagcagcagctcgtccgagtcggaaagtgatagctctgacgacgatgacgatgacgaagatgagaacatggcggatgcgccgaatggtaaggaggatgaggaaacgagtagcagcagctcgtcctcctccgagtcttcatcagaggatgagtctgatgatgaagaggaagcagatgatgggagcgattctgacagcagcgaaagtagcgagagtagtgagagtgattcggactgagcatctgtcttgtttagaggttattagccggatgggtcaaattttgttacgatctggtcatcatgtacatcataaacgagcttcacagcatggcggacagttactcaagctaattcagcactcggatatggtagatcaatgacaactgaatttctaatgtcacagggtgtctcatgtaacagtaaaatagtataccataaataaaaagagagttgctgccacccaaatgatgtttgcgctgtacagtgttatcctgtacttgatgttcaagacgatgccaccccccacttctacctactcctctttctcggccatgacaagaagattgaaacaaatgtacgatggtcccgcaacgccttgctacaaaaatcgaaaatcataaaagcagagagcctacctaatgctgcgcataaataccagaataccccccaatccgctctagctctgtccttgggtcacgccaacccctgatcaccaaccgacgtgctcacatgatccataaatgcagccgctcccttctcttgtatccaaaggaagataaactcataaacatcgttgccttgaccagctcacattgactggaagccagaacagaaaaagaaaaaaaatcatgcctcctccatcagactccccacctcaagaagtccaacacactctccccgatccataacagcgacaatcgcattatcctcatactgcccatccccaagcgcaaccctcatccccagcacccactcggccgccttttccacgctcgagtcggcagcaacaggcacaaactccttcttgctcgtcaccagccaccccttcagctcctccaacctggtcaccagatccgccgagtccagcttcctgatccgcctgggggagataacatccccggtctgcaacctcacccaccccgaaggcgaggcatagcccgccctgagcacatccgcacccgtagccgtcttttctgggggggtattcaggagcggaatcatctccattcgcaccgccagttccctcgcgctcttttcactcgagcttggcttcctcagtgcagccccgatcgcgccgccggggtgatttttggcaaacacgctcgccacgctggggtgtagctccctgctggcgacgattgcgagcgcatcccctaccgtcagcgccaccgtcgtggaggttgttggtgccgacacgccaaaggactttgtctctggctcgtggatcggtgcgggaagaaggatggtgtcggggcggtgcttgatcagctcgcatgtttccgggcgggtgtgagacgtcaagaggatgagaggaagtgacttgtcgaggtgagggagaagcgtcaggagctcgggggttttgccggagaaggtgatcagcaagaaggtgtcgcgggggccgatctggcccagatcgccgtggagggcctcggtggggtggagaaaaacggcttggatggcgagcgagttgaaggttgcgacgagcttcttggcgatgtgccctgacttgccgacgcctattactactatcttgccgtctgtcgctcctcggctgtgggagtggtgttggtggtgggggtatttggggtggttgcagcgggtgatggcctcaacggcgcggttgaagccttcgcgggcgagacggtcggtggagtagagcgccgtcaggttctgcagggcagtggtctcggtggagaggacgtggacggcgttggagagacgctcttcgacggcgagcttctcgtcggcgacggcaatggccggctgggagagggagagggcctcgatcggcatgccattgcaaaagtcatcgtcctcggcgggtgtgatgggggacggaggggacagtggggggatggttgagaaggtcggaggcatctggcggaggaggtaaacctcgctgttgtggacgggagtgcgcccgtgctggcgctgttcaaccattttgccgcagtgtttcttcttccgtcctacaacgagcgcacttgcaaaactccctctcctgctagacaattcctcccttcttctgcctctgtttttttgttcccactgtttcaattccttctagaagtgtttttctttcgaatcggcgcgagtcgctcgtgggccacggctcaccgaatgcctggggtggagaattggactcgggtttccacgggtctgggaagtaccggtaagggcaccccttcgaaaggatcaagtttgcaactggcacaactttgaccaaaaggtaaagcttgagtgtaccgaaggagcggtaaagagatgaacttcttgttctgaaagaagatgagagagtcggtcaatctatcgaccgaattgctgacgatgtccgtctgatccgttctatccgcggtattatagtcgccccgaagtcttgatctgtatgtgaatggtggggatttggtggaggggtactttgatgttggtcccttgaatacgacgtccgttctcgcaggtgtgtaagaagagacaggtgtgtaagaagagacaggtgctgtgtagaccaagaacggaagagaaaaggtcaaggtgggagaaaagaaaaattattagttagagggaggagggcatggttatgacggggcaacacaaagcctcagtaggtatttgtgatcctatcattcccggggccctattttccctccaaaaatggagccgtttgatgtcaagggacaacctaacgagttcgttcttgggttggaccccgaggggaggcaaagtgtagcgatcttcagggtttggtatccctccaagatcgggaacttaccctgatgggcaaacgaaccagggaaatcagatcaaaaataccccagcagcgctagccgcagttctctctgcctttgtgcggcaggtgtgtgtggtagcggcccatttcagatgcatggagatggattcaggtgggtggattggggggggaggggatggatgcttggatacccactgccacggttgagataaattgcttccttcgaggcttttgctgctgatgaatcaacggacgtggtgggatggcggggctctccaacctaggttgatttggcccgcgtctacacgcgtgtttagcatatgctttctacgggtggcgtgcatgggggtcctctttggcaagtggttgcgcgagcttgcgtgatttgcccaagccatcctatacattctttttattctcttgttctctataactgacctcgttatgtgtgccgcccatccgtatttcaccgccagacttcctggccttctcttttgggcatttattctgtaacctggtggacgctgccgaggcgtcttatctataagatcagggttggataaggcaaggggattttgccgagcggtcggcgcggggaatagccccgaatgatgtcggtggcagcctgttccgttttctgaacccttttctctccgggctccgatcgctcggcccctttctccctaacgccgagatctgttccggttgactggatcggttggaatatgctctgatctgaggcactggggatcttaccatcaatcacgttgatggccctgacgcaaccatctgctgcctgtcctccatcgatgtgctctactaggtacggtgacgctcaagatcttggttttggaagtttgcactttacagccagacgaatggaagaaacctggaccgttgaactttggcgttgcaacggctgccctgcccagaccagccccagactgccggcccggctccgatggttagtggtgtcaatcggagaatggaaataaaaagtgacaatccactctatgctgtagtccacaagacagcttagcggctcttgcgtcatattgcgaatgcggaagaaggaggggatacaatggatgatctggtttttgaattgcctctttgttccagcaaaacgtatgctgctcttggtgcaattaggcagtttgatctatacctactaccatatatataaggtatgcaagtattgtccagagacattcttattggacacgaccagcatactgtccatagcatggtgttattgaagtaaaagattctcagcatcttctatccgtatgaacatacactcaagcaatccttttgatactcttcttcatggcttagcgatgccaagtccacaatgaagcaacacttgcgtcccgtcgtgcccttgcaccatgaaccctaacccatgacattgctatagcaacacttgcgtcccgtcgtgcccttgcaccatgaaccctaacccatgacattgctatcccttatcgcagcttatcagtttgccgctgaccgtgtcgttgtcgcggggtagtatttttggaacctcgtagatagacctcaacaatatctttccaccaatatctttccttccacctgagcatttccatataggtctctagcctagccactcatttggtagtttcgtgtatctctccatcggttattgtcatcgctattgcaaacatggctgagaagatttcggtccttttcgtttgcctgggcaacatctgtagatcgaccatggctgaaggcgtcttccaagccatggcaaagaaggagccgtacaaggatctggttgccgatattgattcttgcggaacaggtatgtctctctcgatgatgtcgccctctgtgtcgtctccagcaaccctaaccacactatctttctttgaccaggtgggtaccacattggtgaaggaccagatgaccgcaccatgtccaccctcgaatctcatggtatcactgactatgtgcatgcggcacgcaaggtaaggctcggtctatcgatcggcgggttcgggcatcgtttctaatcgctgttgaaggtgaatgcgtctgatttcgacaagtttgattacatcttcgccatggaccgtgccaacctctccgacctccaacgtatccagcaacgcaaatcgaacaacaaggccaaagtgatgcttttcggagagtactcaggaaccggcaaggccgaggtgatcagtgacccctactatggtgggcagcagggtttcgagaaggcgtatgaacaggcgacccgtttctcgaccaatttcctcaaggaagtcttccctgacgttaactaagccctagctttgatcggttctttgctgtcgagccaagtgtcgtggtgtcgtgttttcgcccatggatagacaaaagataccatttttggattgattgcttattgacgttgtgtcctcctcgtctcaaccctatgcgctaccacgctgcaacttccatctctgttcctgcattcacttcacgcaccggtgtgctcgtcatgtcggttctggaaaatcgatacttcggatggggggctgaaggtcctgctagtcttgcccttccagtgatttgcagagcagggcaacagatctacttatacatattctgatccattctcgcatgcttcgagattcaaaaggatgtcttgctgatcgcctcattatctcgtaatatgaccagacaaagcttgaagcgaggtcttcgggaatcgccttcaactcttgggcactgcatcaatccggaatggtgccatctggcaccctacaccatgccattttgagaggtgcgtcagccctacgaccaatttcagtggcccacgaccggcaggccgcccggcagagtggttctggatgagactgacccccgagaaacgttggaaggattcaaattggaagcatactacctcggtagttgtccactgtgaagagatcaagctcagcagcagcagcgtcgttgacacaactcggtcgggttgaaagaggtggtgatcttcccaacagatagtacgccgtacccctctcggccggattagtctgagcactgctatttggcgaggaccgacgatacgagcaaaccaacaaggcttggagctgtcggtttggaccagttgcgaagaaccctagacaccaccgtcatttcatgatgtcgacgaacaaagaagcaggcaaccttgagcgcttcaggcggcttttgaaaccccatttcttcatctccctctacccacttcgatctgacaaacagacccatttgggatgagaacttcttctgcttggattcatgcgagaggcgaggtttctcgcgcgcgcgtactgaagcacactgcaagtcagcttgattagcgcctggacttcctgacaggggctgctcaaagtatgtatctctccacagcactttggctggagagtgacatgcccagtgtgtcagtgtctggaaagcagcggccgccgacgggtgattgtggggattcgaagccccagaaccccgccggcccccatttttgtgctcttcaccaagcatcccttgtcatttgtcacgccaaccggcagccgagcttgcaagccagggtcgcatctcagcccctccatcttgttcgctgcggcgctgccttgcatttctcctttctccatcaaaggacggttgcggacgccttaaataccagactcacatcgggcttcgaagccagacgtttctgggctgcctcctccttctacccttctaccccctcctccactcttggtgccttggatccctctgccccgctacctacctgacctccccggttcggcccctttccgtcgcaaactgtcgttcctcagctcgaaacttgctctcccactgcttccttcccatcccgtcccacactcggcctcccgtcttttgtgtgttgcctgacaggctttgtccgtgcctatcgatagctgcttacctgcccctccttttttttgggtcctccccgcatcgttgagctccatcgcctttcccgccagcatctccccagaccgttcaggcataaatatccatcatgggcgatctccagggccgtaaggtgttcaaggtgttcaaccaggacttcatcgtcgatgaaagatacaccgtgaccaaggagcttggtcagggcgcatacggcattgtctggtatggccattcatattgcccctcattttctacgcccaacagccaaactgaccattgctgtcctctcccattctagtgccgcggtgaacaaccagaccaacgagggtgttgccatcaagaaggtcaccaatgtgttcagcaagaagattttggccaagcgcgccctgcgcgagatcaagctcctgcagcacttcaggggtcaccgaaatgtaagcccagcatacgcacaagtccacacacactccacgcagaacgctagaagactgacacatcctccttttgatgacacagatcacctgcttgtatgatatggatattcccagaccagacagcttcaacgagacatatctttatgagggtatgtggccaccacactattgtctgtcccctttgtctcgagacgatgcgctgacacagtttgtgacccgcagagttgatggagtgcgatcttgctgccatcattcgttccggccagcctcttaccgacgcccatttccagtctttcatttaccaaatcctctgcggtctgaaatacattcactcagccaacgttctccatcgcgatctcaagccaggaaacttgcttgtcaacgccgactgcgaactgaagatttgcgatttcggtctggcgcgtggcttctcggttgatcccgaggaaaatgccgggtacatgactgagtatgtcgcgacgagatggtaccgcgcgcccgaaatcatgttgagcttccagaattacaccaaagctagtaggtttgcccccttgtcctatgtctgtacagcggtgagctgacgtcacggcttctcatagttgacgtatggtctgttggctgcattctcgctgagctccttggcggtcgcccctttttcaagggtcgcgattacgtcgaccagctgaaccaaattctccacattcttggtacccctaatgaggaaactttgtctcgcatcggttcccctagggcccaggaatacgtgcggaatcttcctttcatggccaagaagtcattcccttcgctcttccctaatgccaacccggacgctctcgacctcttggaccgtatgcttgctttcgacccctctcgccgcatcagtgtcgaggaggccctcgaacacccctatcttgccatctggcacgacgctagtgacgagcccgactgcccaaccactttcaactttgacttcgaggtcatcgatgatgtcaatgaaatgcgcaagatgatcctcagcgaggttgtcaacttcagagcccaagtccgcactgtccctggccaggcgggctctgccggtaacatccaacaggcgccatcaaacgtccccattcctgcaggtggacccggccagcagtggacggccgaggacccaagaccgatggagtacggtaaccaaatgcagggtctcgaggctgagctcggaggcagataggaggctgtctctgatgttttaagcaccgagggcgaggattgggtggttataccgccctttgatcttgacaataatggtgacccgtgggtggtactgcatctgactgatatggtaacggacatacatgaaaggacactggagtcgaaagacatgccgacctttcattatgatggaacaaggatacaggcccctgctaagcacaaggcagagctccctgtccctgaccacctggtgcgagagagggcgtgggaaaaggagaagtggagggcctataagcagcatcgcaaggctgttgaaacgctcatgatcaaatgtgggtgcagaaaagcgcaagggtgtcatcatttggaagcagcggtcagatcttatactcggtatgagaaggtgagctaccgtggtggctctactcgataactctgtccaaggaagcggacattgtttatctcgacaagcttagcgattcatgtgatagcgcggattctttgttttagttatctttttgttttgatcgccgtatgttggatggaagacggaagagggggggggtgttcttgaatacctacagaacaagacaagaccagcgagcgagctggagttatagtttctcattttaaaatgaagagggtttaataaagcactaacgagggttgactgatgagaatgtgtgccctgcctcgagacaaaagtcttgtgtggccattgggaacctgaacaatgttgttgggatgaagcagtcgtcatcgtctaacatctggaccgtctacaagcaaacaaaaccagatttgtgcgaagtagcacattgtcacgactcccatccatttcagtaacacatcaacacgcaaacatcaaatcacagaagcaccaagtcatggtagtaaaatccccaaagagcctgaattaaatatttgaccttgcctttttgtcttgaacagcaaggtcttttccatctctatatatagtaccctaaccatcctccccttcagtcatcgcctgtccgcccaccgaataattcaccaaagaaaaaagaggaaccaaaaccatccattttgcaaagggtatacccatgagaaagaaaaaaacaaccgcccggaaatattgttcaaaaatgtgcaatatgcgaagtattaaatgagtgaatgagaacttgcaaagtgtggtggtggtgttggtggtagtggtgtatgtgagatgagatgaggtatatgtatcgtcatggcgctggtagtttgtatttgtgatgttgttttgtgagtgtgtatgtatggtggtgtggtaggactggttagataggtattttggggagagcggcacgggttgaaggatggtcgttggggagagaaccaaccaacacacccaaactgggagaaaacacggcaaaggatggaagctcactcggcttccatccatcccgtctaacccacgctccttctccccccaccaccaagatccaaatttgggcggttcagacccttccaagatgtccaatttcattcgacacacggaattatcgagaaacagcttagaagaaccagtaaaaggtggtgtaaggaacgctgtgcacaccgacaccagcaacaccgcacttttgccccacgccaccggctgtgatgacacggtaaacctgggtgatcccactcgagaggcccttcccgctgtctccaagctggagccaggccacggctccagtcttgagagggcccttgtcagcgttggcaggggcatccacattatccaactttgtcacactggccttgagcccgacccggttgaggtcgaacatcggggtgctgctgatgtcgaagtagtgatggccaagatactcggcgatgggaaaaccgagcagcttcaggtcctcctccttggggaatggcgctgtggcatgagcaccatacttggttcccgcgagcttgttgagagtcagaggcttgaggagaagcgcagaggggatcctatcccagagtgctttggcaatgccggtctttggcgttcctggggcgtactttgtcacgtcgtagagaatagcaacggcaccatcggccttaggggcagaggtggtgtcgacgcatgtgtaattttggataccatggccgacggcaatcttcttgagggtgaagctcggtggtggtgaggggagttctcgggcacctgtttctagttagcctcccggatccctttctctgtcatttcgatccaggttctgtggtacttacctccagtcttgggaagagtgggcacaaatgtcggttggcatggggcagcatatgctaccgtggccatcgcggcaagaagtatcgacttgactgacaccattttgtctgtggatatgaaactagggctttaatgcttccggagcagaatatgtcgttgaaatgaatcgagtccagtaagatagaaaagtattagacgattgaaccggaccgggaaaagaaacagaaaatgagatgggaaagagatgatgattgtggtgttgtcgaagaggcgggatacgaagctcttttatcttttcctctggctgggtgttcgaatatcggaaactcctccacaaggctgttcggtgctgagtcgaagggggattttggatgctgtgctgacccggaaggcacggtcgaggcagggaaggtgaggttggtagagagccagggtagcagtcaagcaggaggaaggcgtggggataaagagaaaaagaggtcagagagtttctgcagggctggtttgtgttttgtacctacctcacctcatgggggaactcctgcctcctccccccatcccccatccatccatcgcttgtacggcaagtcccatgtaggaaagtcacccacctgcctaggacaagagagaaacagaagggaaagagcgtgcagtgtaggacagggatgcgggaaagtacaggcggcacggaggtacgtaccgggcgccatctttggtacctcagtcggctgggaaggtaggaacgagtgccccgtcggcaagggtgtggaagcttgggcggcggcaggccgcgtcccaccgtttattaaggtaccaacctcgacagggatcagtcgcgcacgaaatggtgttgtcctctttgagatcaatactgcaacctacggagaaaggcctactacctaggtaaggtaactcgcggcttggatattttgtccattcggcctgccattattgccgctttgacttcctaagcttccccagactcttcaaccgcccgagtaccttgtattgattaacagactctgataaagaaggcggggcaatttccatctcccgccagactgttatggtacaggcgcttggccttgacaacgggcctcattcagcagaagctggtttggacgcccgttgcaggtgaaatgagtggtctggggacatgccaggcggcagcaagcctctaaaatgccaacggaggttcaagcaaaaacctgatgacagctgcgccattgataccacccgggagaatcattctctcccggccggaaggcttgatgatcatggccaatccatatctttttcatggacgtggctaccgagacatacataagtccatgatgcctgacgagcgaagaagtgggagtgagagtgcgactgcgggattgcacaagcgacccgaccatcgaaagctgcgcggctaactcgttggcttggctcttggcaacgacgtggtttaaccttgtatggcatggtcgaatcgtcttcccgctgtaaccctgccacctgcccagatcgatcatcatccaacacgacatcctacaaccaaagaaaggctcaccctaaccctgagcttatgggtagccggagaaagctctcttgatattcatgaatgaggtgtgccttggggaggcaggaggagttggtcacttgcgttggtgagacagaactgatctgtgtactggggatgtggtctttgctgctggtccgtgctgctgacaggaggagttagctttgagcttgttcagatcatcaccaaagaaaccatctcatgtcacccctcgcttccagatttctgttttcgtcttcgtgctgcatcagagcccaagacactcgccggtttctgaaacattctgaccagcacactggggaggcatattctgtgtcactgtctcaaagatatgatcttccccttcggcaacgcaccccgcagacttgcagctgcacgatggcacggccccacgccccgcttgcggaacaacagcctcgaccaggtttgcatcttctgaattccacgagtattcttccgccgatccgatctgggactggtcttcgtcgtggttttcttgggcttcgggttctgctcttgagatctcattcagaaaaccaagaaactaatcccaattgtaggacggaagccggaacggacatgctcaaatctgatctcacgcaccgaaatgcatctcagaggatgtcgtctgacgcaccctctcatggctgaccactgaataactaatcgtatacacacacacggctttggggctcaccaacagcctgcaagtagctagaccatcggcagagctcaacaatctggttgtcaaaatcccccggagccgtggggtggttgcggcgtgagtttcttcgtgaggggcggcgcagggcgaccacctcgagaagcaagcaacccctttctccgaccaactgggaccctgcgtctgcagccaggggagctgcaacagtggcacaggatgtccatacggacaccacaaaaccgcacaaggctcgacagcttcacgcagcagggactctcgacaccgtggaaaagaagccatggccagacgcaatgctatcgatacaaagttttgtctttgtcgcctctctccaactcactgggggttgtatctctcgcgttttgaagccacaactctcaaagtcaattctcgccatatccaacctcggatcctcaacaccctctttttacacagactctgtcggtaatgttttgcatgtctgcagagatgtttccttctgcacgtgagcgatttggttccgtttcaagtctgtgagtaaagtttcttgtttcaatctactgattgtttacgcactgacatcaaggggtaaagtcgccgacggatcactcttgataaaccccccgctgcgtccagaacttcgagctgggggcgcagttcaacatccagaagacatcattgttggctcgcctgcaaacacgagttctctgaaacagctctctgcgatgtgcctaccacctgctccttagctcaacatgcttcttcatccatcgcaggaaagcccgagtaacttccaacccttcaccgagaggccgcactcacaatgatgaataaccagttctcggttacacgtgcactgacctctcgtctcaattcttcagaggggaagagaatacagtactgtgccgcaaccccacggtgcggctttccagaacaggcttctcactcgcctcttggatgtctgcatgtggtcatggccgttctctcggacttcgaccagccattcttctattcgctagctggttgcgaggatccagcacatacaggcaccgctcagatgctcgccgtcactctccttgtaggcttcctacaaaagtggtgcaaccagatgccagcagactgactaatcgctacaccaccacaacacacgcagatgaacttgcttatatcgcttccaatcgaaaaacatttacaaatactaccgcagtgcagatgcgaatgcgatcagtcaatattccaagcattgcaggattacacaactttcgctagtggcgcaagtctgaccaatggcggagatattggctgcattgcgggcgcttagaagcgcggtcaactgcagtagtcgtccgatttctgttggcaccaacctatcgccaaaacggggagctttgccgcagaaccgcgatatcaaattcttgatggggaaaactgggcatctctgcttcttctgcccttccatcgtaggcgtccaagttgctccaggtatcgcttcctgcatgtgacaatgtttctttgcagctacggatccttcgcatccggcggtgagggtgaccagtttcttttttcttggtgacactttacacctcactgcttcgcaagttgctagcgtcgaggaatcgatagccaacatgtattacagcggcagaggagactcttaattggtctgttggcgcggtgcctcgtctatcgtgtttctgaggagaggattagccgaccctcgcgccggcccgccagcttccttttctttatctccctgtcgatattgaaggttctatgcagatatgctgtgaggagctctccccatcggggcctgtatcctgtgttacttaccatgagcccggtgttgatgctcacatgacattgagctcctgcatcctggatggcactgggtgaacttttggtttggtgggtgttgggcccgatgcagtttgcctacctactgataataggagctattggtggccacgtcgctgatatgctgcttgccctacctatattccagactctttgccttgcaggcagtgcagaacagaagaaaaccatcctcttcactgtctcttgatctctgtagaagtggccgtgtgaatcgcaatagccagacactgatcccacgactacggagccgaaacaaacagtagcccttacagctggatgcgggtagcttgataggtagttcttggggtcattgatcccgccgttcgtagcacaagacgcgcctgaggcttgagggaaggatcaagtagcagttgtaccagatacttgtgatacttgaagccgggggcatgggggaaacggtgggtcgacggtggatattcaggcatccttattgatagcccagcatgtgtctgccattgttgcttgtgaggaggcacagtacatcatgtctcgtgctttgcaatgtaagtatttagcgttcatgggatctggtagatgtgggtgtgggtggctgcgagggagacacctctttggagattcttcatcgccgctgtggaatggaaggtggcagcaagttctggatgagactgaattctctcagctgggtccataagagtgaaagcgttcgaaggagggagttgacatctagtagccgcccctcaacgggcaggcagctctcagataagacctctttaacattgcgggaatactcagtcgtccattctggtggccgctgtaaacagggctgtgccagctacgagctttatccaaggcagcaagccttctcgtccaacatagctccaacatcctcctcaaggctggattgttgtccttgacaaccaaccagccatacagatagccgcctagacgcgcctacatgttggagaaccaaggcaagggatggtcgatcgtgtggctaggcgccccaacagcatcattcacatggacttccggatggactagctggtgtatggtgcgttggcgtgtgctgatgagcgcgggggtcctgcagatttgatccttaaaccatgttctggggtggatgagaaaggctatcaacttctggggaaatatcgtcatgcttggtctctctggcaggcatacagatgatcacggcctgtaatatgtatgctccctcataggatatcggtacctggggaggttctttgttggccgacttttactcatgtgagatgcagttcgcgacatgcggcacgcggcaaagtcgaggccggttgatagggctgttatttactcgaacatcatttgtctatttcaaaagattgagagtctcttatcaagatgctctgaccttgcgtgatgtatcttggctttcatgtcatgtgcctgctgttcccgtaacccgatgcagcacgagagagaactccaaaggcatttcgctagcaacagtgggagaattttaggtggacgaacaccacaagtagttgaatctcttgtttacagcaagacttgcatgtgtttacgttgaagttgttgcgccgaatcccgtggttgttcacatggtgttctgcatgtggccccccatgtacacatcgctattcttcgtgaccagctgcagccccatgcccaaagcttggcggggagagttgaaaaccccggacttgaaatgtctcttgtattccctaggctgactatggaagagtggtgagctatgtgcaggcaggtgaggcacccgcgggggcgttgccctgtgatccgtctgaacagattaccagagcgaaaagcttacctaagttagagctttaggccatgcgtcaagaggttttgagtccaggactgtaaggcagtggccattacccaacaccacttagtagtcactcaatgctcgaagccattcaggggcactcaggggttgtttacagtgaacggtcagcgacccaccagtgagactttcacggcaaccagagctccattaacccgaacccctctgccccaacaacactcaagtaaacccaccttgccacgaagaacaatgaaaattatgcaagttgtctcaacaacttgttggttaacgcaatataaaatgaacagaaattccagaacttttggtgaaatccaacggaaatgggccaaataactgtccgacgcccgtaacaaggatggtgtaaaaaccgaacctcggttcatgctgactgcctgattggccaatgccctgaaaagcagccccacgtctgtcttatcagctgcagagaatatcttatcgatcaactcaccttcagtcccaagccttcggacgcgacacgcactcgacgaacagatcaggcagcccgatccgatcaaaatccacacctccacacgtcactgaacggtcgccaggaagaccctacctcctttccggtattttcggcctcgaacccctgtacgagaacgtcaacaaaaaaagtccccgttcaatgatataaaacccttgcccggccctgccgtgggccgcgatggcagtcgacgtagtccagtcagtctttttcgctgcctccaagtgtagcaacactcttttctgcttcggacgatacatcttcgtctgggcgatcgccttggtcttcattcttgccggcgcgctgcaatatcggctctcttcgctattccccaggaacggaatttctacggaacataagaaggcgtgattttgtgacggagaaaccgaaatggctgtcggaacgctctctctctttttccccgtcttcatcccggccgccacagcgggattggtctatgctggtcaccgcgcaacttacctcaactggagggcgatcttgaccgagttcctcacgggacctggtcggacaagtcggatcctacttctgctgtttttgggtctcaactggaagagcttgccccttgggtggacggtatgtatctcgtgatattacctggtgacaccaagctgacatttgcgccgctaggttcggatcttccattccttcattttccacttcgcgcgccgcccaaagactcttcctcagcgcgccctcttccactacagcgttacctcctctcgtacctctctcctcgaaaccgactacaacttccacaagtccaactcgacctactttgccgatgtcgacgtttcgcgttcccacctggtcactcatctgctgggcccatccatgccaatcattggcgacaacgagaagaacaagctggttctggacaaggatggcaaggtgattaaggggagctttggcataggcctgggagccgtcttttgctctttccgccgcgagattggccccatgcaaggttacgagatgtggagcagaatcgtgagctgggatcgcaagtggctttacattgtgacgcactttgttgtcaagggcaaggtcaagcctaccagctgggacggcaggtggaagggtccgacacgcagcaagatccaaaaggccgaggatgggtcggccgtggaggagccggattggagcaagtacattcacgccactgccatcagcaagtacgtgttcaagctagggcgcttcaccattcacccttcgatcatgatccaggctggtggcttgttgcccgagagaccaggtggctggagaggtggtgaggatgactgcggagacctggttgacttgggagagatcgatgctgagggcgagtgggactggaagaaggttgaggctgagcggagaaagggtctggattatgctaatcactttggggcgttggacggcacgaatcttttgtttgatggtggcgaggatggcgctattggcaacttccctattggttaagggtaaaagatttaggaagggtggtatttggatgcttagaaggcggaagagacatgatacccatttttgtgtagggagttcagagatggtattgtttagatttgagagacagcgcgctagcaggtgctcgcagcggctgatgtctgtggcaagagatgccaaaatacatcattattctatggcaggggttcagctaacaatgttgacattgttacgctgacatcgtcttttctttgcaagccacaaatccatctttgctcgcaccactgtgggtgatcaagccctcgaccacgctatcgtcatcgaaaatcacgcggtcgggccctggaggaccagaggtgtatatgtcacctggcatgatgggatactcgaaatagggaggctctgtgacaaagtcgaaggcctcgaggttcttgaactggtggggatagtagcctgtatacacgcggttgagctaaaaaaaattgcatgtgctatagtcaaaagaagagattcgagacagcccgaaaaccacgtaccgacatagctagggtcatggagcagagcgtatcccaaggcaatggcgcgggagacatccgaagagttatacgtatgagcgctgcagctccaggttgttgtgtttatgtcgcctgtggtcactaggatttggtgaccaagtggtgaggcaatggctggtagggctggaacatgggcgagaatggagagaaagagccatatggtgttagctgatgtgggggtagggtggtgagtgctggggcccaaacggcccacgattagcaactcaccttgatcatttcgaactagatgagttttttgacatcgatattctgtttcaaaaagcaaaaagcctggtgtcttgatggggaagtaggggatcgcggctctcttatcattgctggacagtgttattatatgcagtctcacatatcggatacaacggcacactgtggactttcggaccacacatgaatttcgtgcgcctaaatacacacggcaataaacatctgatgtgatgaagtgagtacctaatctgatgttcttcggatatgtcgagactatctctcatacttgtgggttcaatgcagtgagggttagggttattatgtctacgcgtttagggccttcaggggctcagggggttgactcgcagacgagtaaggggtaacacatggggccagagcaacactgaaagtccacatttaaaatgtacaaaacctgactcgttttaccaacactttcaaagctatttccacagctttgatatgggatcctcaattttgtcaacagcaagaagtcgtcgctggaatgcagacccgacatgcaattatgcggtcacggcgccgagacaagatgcctcggcaaacctccggcatcgccttcacattctccaacgggagtgggttcccgattccacatctcgtttctagtcaatccgaacaatcgatatggttgatatcgcaatccccactgcaattctctagtatttcagccactcactcacatatttttgccatcacgactcattcattcttgatccgtacatcccggtggcctctacctataattctcaaacgtaacccctgaccgcagcacgacaaaatggcatcctccaaagcctcaccatcaccaccaccatcaacaaccgaaagtaaacaacaaaacccacaatcagaagaaatggtcaccccaaccgcctcagacatctcctccgtcctcgactccccggccaacaaggcccaagaagcccaccacatcgccttcttcaattcaataccctggtgctcctccctcctcggctccaaccccaacctcatcatctcccagtccgtctcccgcatcatccgcccgtctgggtgcgaggaggacgcgctcatctcgcagacgctaaactcgccggacgccatcccggcctacatcactttttactctccccctcccaaaccgacggattatgtcaatgaggtcaagtcgcttattgccttgggaccgaaggtgaatgggtgggagggtatctgccatggggggattgtcatgacgcttttggatgaggtgatggggcagatttttgcggtcaacaaggacagcggggcgatggggagcaagatgccgcttttgacggggtatctgaacactgagtttaagaggcctgtgagaacagggacgaaggagaagccggcgattgtgttggttgttgctaggatgaccaagatcgagggaaggaagcacttttgcgagggggtggtgtatggggatgaggaggggaggaatgagctggcgagggcggaggccttgtttgtgcagttgagggagcagaagctgtgaagaggtaatttcaaaagggtataggatatatgcatcgtggtgttttgatagagggagcgataatgttggagagcgaggagcttggggttgcttgcatctgaatagactacattgggaacagtcctacctaatagatagcatggagtaagaattaccgtggtaccggttcgcaatttcaatttcaagcggcggccaacctggaagacattgaaatatgttgagtctgcccacccaacctgtccagtaccctcgcaagattcataaactaaagcttcttgccagctgggatttcaattgtatctctcttatgaagaatggcgagtttctcgatcatgatatgtctgtccttttcaatgtcgctttcaacttcattaagataaatcccgtggacttgtgaaccgttcatgagtggctcacttttctcagccaaatcgtatatgtatgtgtcaagacgcaagatacagcacctaacgccgtccgccatttgcactgacagggagggaagcgcgcggagaaagtgcccgtatcttcacaagataaacttggtctaaagcagaggtttcatgtaccactgtgtgcggcaatgttttatatgtcctgtttttattaagatactcatgtacatgaaaccatgatccaatcatcaccaaaaaaccaaatgatggaataaaaagcaagcctaattatcttatagataaaaatagagccttgatgatagcacgcacatacatcacattaatctaacctttgcccaagatccataacaccatcgctcttaaccctcgaaagtagcaaaaaatagagataaaaacaacaaaacatcactcgcaaccctccacatcggggtcaacatcagtttccccatcactaatctctgtcttgctgctgattgaaccatcaatgtcaatcgtaaaggccttctggacttcctctcccagcctgatgacgtctcgcctgctctctctgttcacaaccagcagatgagcaacatatgtccttgccccatctgtgtaaagatcaaccttgtctccggggacacaatagtcaacgcccagaacaatcttgtctgccaggtccggtcttcggcgcttgagctcctcgcatggggctagctttgacggccattgcacagtaccagcggctggagcaggaatgtataccagtcgagaccagtactgtgctccccttttcgaatcattggtgttgtcaccgagcacatggctgtagggcctagtggtcagtcgtaacctgttcttatcacccgcagcagccagcatgtgtgcagcaaagtagtccacgccgtatgtatgacgtgttggaacagtgactcggtatccaggcgggcgggcattgatctcgatcagcttgcactcggctcccgactcgggcaaagatttggcgtgcttgaggacaagatcgatcacgccatcttgcttgcggtactcgaatgtggagctcaccattctcgcctcgacatggaagacaccggtgcaaaatcctagattgacaagaatatctcggagtgtcgactttgcaatgtcttgttcctgggcaggaagggcggaagggagagtgagggcctctggcgaaaaggttgaatggacggtagcagcgctcgagtcagcatcgcagggtggttcatctgcgatttcggaaaatagaatctccccgtcgagaagcacaaagttgacatccatttctggaccatcaaagaagggctcaatgacggccgcactgccatgtcgagaagtagccttttgaactgcagtggcaagatcggcgaggttgttgacttttgacacgcattccgaggaccaccctttggtgggtttgacgataaggggaaatctggggatgaactcggcctgctggttacctccacttgctagcaaagactccagctctctcacattgtggactctggcagtctgacaaggaacgttctgtagaagccgtgatcgatatttgtccacagatgtctcaaaggcggccacgggactggtggggagtcccaatgcctctgcgacctgagccactgccacaaaaaagttgtccgacagtgtaaagacaccatggatgggaagagggtagctgacaatggactggatgatgcggtcaaccactcctgcatcctctgtcatgtcagtgacaaggaaggcttcccgatgcatcttgttttcttctgtgtctgcttgaagccaatggccctcttcgtcaacgataaccaagtcaagacctaatgctttggcggcacgatagactggacctcctgccgtgatgtttggtctaccgcgaatgagcgccacccgttgccggggaattggtgtgctggagagccatggtgcattgtgaagacgatcacgcagctcctcggtcagccttgtcctgtaaatttccaagtcgacgaacgagacagaggttggcaaatcctcccattgaacaactccagcagccgactcaaccaacgtggcaagatcatgttctgaggtaaccgggcccggggcgggacaagtggcagaatatttctgtagtgggcgcaaaggctcatgggtccgtaatatcttgtatgggaaatcctggaggcgaagttggaggaagtcggatcgggtcacgtagccgttggtagtaggaagaacaatggtaaaaacagatatggctgaagcagaccaactgggagagccaagaccgatggtttgtagagcctcaatgaatgggcttggcggagtgcttctgagcccggtgcttccgattccgttgtgttgagaatagggttgggatgggttttgcagagctgaagattgtgaagaggatgggaaaaccaccacgttggcgatggaatacagctcgcagaggggaataacctcgccaaacaagggccgatagagattggttggccctgcagagattttagcaatgctcacttggcggacaggaagaagggctggctgtttcttactgctcagaggttgttgtgtaaaggtagatgtaaccgatgagatgctgctggtcagtttatggcccagactggccctttcaccagagaatgttcctactgccatgttgatgccacgatgttgaacagtggatcgtttggtgagtcagagaacagagaaagagcaagagtgggaaggttttggggacggaggtgagtgtgttggaatcaggagcagaaaaagggcgagagttgagggaaaagaaggcaacttggcaagagcaaggcgacaatgggacaggctggatattttgttgcaaaaaaggatgccacgaccagaccaccaaacgagggttgctcaccgctggacccggacctaaagaagattccaagacatccaatgccgcggaagcagtggaacagggcacacaatacctagcttgcatcggctgcgtcatgggggcacgcagcagtactgagacgtcgatattggcacggcatgacgggagtgagactcacgggctgattgagccggagacggagattgatctagagggtgagaaccttgatgggctccatctgataatctgcgatgatctgataagcaaatttagacccacttgtgcccttgcgaccccggccacacccctatctccttcccctgtgttcccgtgcctggccctttcctttttctcaacgtctgtgcccccttgcctgtggattgctcttgccccaaatattaaatgctcaaccccgtaccttccggcagagcaagcaacaacggctccgttaggacttgccataggaaagaatggagccgataccgcagcagacacagagaagagaggtgacattgggccacgaccgagtgaaacatgcggcttcggataaaatttgtccagacagccaagaaccttgacggctggaatcagacacctcagtgtgcaccttgatggccatattctgcggcttcagcattaaaagatgatcaaaacggctggttggatcctctgcggagggcttcatctccttcccaaattgactgacggcctcaaaaaaaaatagcgctcatcaaggggaatggaacaccgcttgtctaacaaacatgcgtctcgtccggtcctatgtgggcaccctgcgggctgatctgcaggtgcagaggctgcagcagatatagagcgtgatgctgctgtttactttgggaggtttgctgcttgcgtgcaattccacccttctcgaagagcagcaatttccatgttgttgagatcatcggtcacacactgccaccgagaccatctctgagcaactgccaccacaatagtcaccacacttgtatctcttcctgagtgcctatatcaagcagcagcaacactcttgccgccatatcttgagtgacaaaccctcacggaatctattatcccgaacacacatctcaacactcacagccgcacgctccgtcatccggtttcacccgtcaccatgcctcttcttgcctcctggctgcgcattggtagccccacaaaaaaggtcgacgcatgttctcgttcgtcccaggattctttaactattgttgagaaagccgacatccttcagagccagaaggcagatgccagggaggaaaaggttcagtggctcgtccggagtatcgtcaacacccacaccgagctactcaagcttccgcaccttcgtccagcgccagccatcaataagctcttgggtaaccttgtcgccatctgcagcgagatccacgaccaagatattgtagacaaggtgtgtcgaactcatcacgggaaacgtggaagacacgagctgacaaagccaaggttttacaaaatgtgagcgtccaggctgtgttaccgtctcttagacagatctgtgcccagtcagaatcatgtcttgagcttcactgggccgaacacattctggaaggccagacccagcaagaagtcgtcgagcgcctcgagagttttccatactatgagaactatgaggatttgacccgactagaagtctgctccatcctctcggcgacaaaaaaggcaccgcgacgagttgccttcatcggctccggcccgctccctctcacctcgctatgccttttgcaggctctcaagaatgatgtggcagtgagaagcttgacacagccaaccaccaacaacaccaccgccacagacaacgcagcgaatcaggagccaattgtcctcaacgtcgactacgatgaagcggctatctctgcgtctctcaagttgagccttgctctgggagagagggggaatggaatggaattcatctgtgctgaggcaacctcggcttcggcgtcacgagatctcagcgagtttgacgtcgtgtacatggctgcgttggtgggagttacgcagacagacaaggagaagatcatgctggaagtgatcagtcggatgaggagaggggcgctactggttgtccgcagcagttggggcttgaggtcatgcttatacccagaggtcgaccttgcaactgagacactgctgaagaggcttgagccctgtgtggtagtacatccctataatcaggtggtcaactcagtcatcgttgcgagagtgcggtagccccaatctgggccggacccggggaagccgtgagagtccagtgagcattaaactggcgatagaactgcatggaagtcattcttagacatggttggatattatactggtatagtcatcatatttctcagagcggtgatgttagccatggcgtgatccttcgcttcagccgcagccgttatcggacttctgagtactcgggatacgctggatcgataccgtagcaatgggaccaattttatccgctcatgtcttacctacaactgcgtcttgtggctttagtaaaccgtctttggtttgaagtgtgtgtgaaccagtacgaggctttaagaagatacgaatcaatagtacgggcttcaaaccaatcacgccttttccgctgccacaatcttgatgcattttacctaagatcgacctcagccctacgaacagggcttgttgagggtaagcaagcggataaatcctccgcccgtaacctgcttgctgcgaagctcgtgagtggatcgtgttatgggcttgttcgcactctgctaatgccgtttccagccactccgaaacatgtaccgagatcttccaatgggaagtaaagtccgtccactggggagcttgggagctgggcggtgcaggtcaccagccccttccccgacagcctgactagcacgccacatctggtgggtgcaagaaaccagaaagcgaaaaggttccattcactccagtccagaacctcagatgcgagttcaagatttcgctttctaacgacctcaccaggactcgtacgaaccaaccccaagacaatagaacaccactgcagctctgcggctgaggacgaagcgagggtaaggtatgatgttgttgcttggcattaatgaaccacagcactggattgggcatcgtcatatacctgcactggaatacgtgcaagatctcgtattccggcaagcgatgaacctcatacatacctcccaaactcatgatccagtgcccgacctattaccctttcgataccactatgccgaccgactttacagaaggaaacagcggtaagtcggaattcgaaatgaaagacatgtcaccaccacgagacttcaggtttgcaactttctgtacggtccaagcgggccaaggctcgtgatggaggatatgcatttttcataggatcgacacgtaggaacgtgccgtaaatgttgtgttctaggtgtgtagaggttgaacatggcggtgtactctgtgactggcgaactacaccgagatggactcgggaggcccagaagggaacttgaaaggcgaacactcagtgggctgaggtacgtctattgcttcgccgagagcaggtttactcagtgtctattcttagcccgcacctttgtcttgaggatggaggccgtggggaggcagtgtgacgatgatgttatggtcatgagctggaatgagtgtcgtgatctctcggtgtaggtgaggatggaacaggaggtcgatgtgtatataacctcgccctggtccgtcatcattctcatccgtctcatcatcactcaaacaatcttcacactcacaatcagtttaacaaccacaacaacaaccaccattcctcatatccatattccaactcaaccaatacacaaattcaatatgttctccaagactaccatcgtcgcctttctcacttctttggccctcacttcggccgctcccgctgatgaaatctctgcccgccaggcaccagccgagattgctcccaccaccgtcatcggccacgctctcgctgacgcctgggacaactactgctctgcccctacttcctacggctatatcgcccgcaacgtctggaacggtcaggagtatggccagaccaccctcttcaccttcacctaccccgccgcgtcggccggcaagcagtgctggctcgacttctaccacgctcagcccagctggatctccaacaccaacggcatccaagtcgacgtcttcacctcttggggcgagaacacctgcaacgccggcgacaagtccaacaagcgtgacgccaaccttggtcgcctcaacgttccggctactggcgcggctacctgggcggccaagtacagcacttctttgactcagaagggtccttgcaaggctcctggctccgtggagaggctcgagttggtggctgtcggggataacactggactttcttaccctcaaggccctggtgctgggttgaggatcctgtacgcctaaagggattcagttcactttctttcttcaaggggctggagtgaagggtggtttatgagatcatttgatcgctttctggactttccttaacatgtgatatcattacggtacttttaaagcatactttcctttttagtttttcatagacaaatagtcactggtcaggttttatcgataacaattctccgaacgtggttccttgtgatgattgataacgaactgggaaatggaaggcatgaccggtaagacgggccggcacttgctctgtggcgggcatgtcatcactttggaagcgacaacccccatctgtcctgcttgttcttgccgggcagttcccactggttggaccccagctgcatggaaatatcggccgagtttgaagagttcattccgcccctcccgaaaagaatcgaccttcaaacctgtacgaattcacgcacgaaacacctaacgagctcaaaagggaagcagcccatccaggcaatagttctttcatgagccgacgaaagccaggctcaaagctccatgctatgatcgccgcctcgacgatcatgatcttcccaccatcttcctcaaagtggggttgcattctttgctttttagggttgcgatgcatccgactttgaagctgaccttttggtcatgaagatttcccaatactcatgtctttccgcacagtgacgaaactgagacagcaatgctgaataatacgtaggtcttctaaatctactcatcccctcgattttttcacgattctcggccgattactaaacaagatcaacgttgaaataggctcggcaaaatcaagataagctttctgacccaggcggaagggcactgtggcgaatatgcactatttgatgtgacgagacacactactgacaagggcttattcagcttacagtgacagaatttctcagtgtttgtgagtgcttcacgcccaggtggaggatttggagctgggactttcaagcgaagtggcgtcggtgttagcgtgcctctttgcagatgctgtgatgcgagccactcgtcactgtcgtgtggttcgccagcgatcccatgtcctgcagctcgaaagagggcttgcagttcgaatcgataatgctcgtgggcacaacagaatgactatcgaaattgtgaattccttcccctcgcttttccactaaagtcgagcgagaccgagacacggatatcgcggaagtacccttctggtcgtcctgcccgctgatgctttgtcggcatgtccaaaaagccaatgagacgctgtcaacccgacgatcctgctgccagcttgacgcacgtcagacatgaagttctattcaatgttactcatctgctgctccaagagaaccattaccaccatatggtgggggcgatgtcaaatgcagctggacgccagagacagcatctgacctagcctgtttaggtgtcaccgcccttgctgttgaacatcgtcaagtccagactcccagttggtcggtaaccttcaccgttccggcactacgacagggctggacagtaatcgtagcaatgactcggctttgccaagctcgatacccttagctgccgcggaggtgggtggatcgggagcgaactgggacaggcatttgaagcatgggcctttaacacacagcaaatacccaagacaacattggctgtgtctcacctgggtgagttcctcttacacctcctccccccttcacccggctcttcaaactacttttcttcagtcactcggacagccttctcagcaccacgactatccaggattgcatctcggggaggtcgcgggaggtgccagcacaccttccatttacatttctagcatggccaaatcggcagaggcacgatggcatctcggccactgggtgctccttttttctctgcccacaccatcgctctgcggttccatggcagcttggtggactgacctcgggccctcgcttgttcttcagaatgcttcaaccggcctcctcacctattccttctgtaacagcaacggcactcccatctatccacaagatccaccaatcgctctcaggaccacttacgcccccaaaaagggaacatcactggcggctactggctggtatgatcaaatcgggtcgacgtgggcctcggtattctaccaaaacaacaacgatgacattgtcaacgctgtctacaagtgtgacaacagaaccggattgtacgaccagcaagagagcaatgtcatctcggacagacgagggaccccaagcccccacacggattcaggaatctccgtcactttactgggggagcaagagggttatagggtattctaccatgacagatcgaaggcgctccagtcattgcaattcaagtcaacggacggctggtcttatggaagtccggtatcgagcaacacaaatcggtcaagtatggagatccattcgcaattttcgggtgttcgtaacgtcacagtggtgaccccgagagacgctcgaaacatggaaacagcccgtctcaacgtggacagcacctacttcatcggtaattttttcctttgccaaactgtactgagagaagttctaacagggcccgtagatacgtttccaacaccactcaaaggaggactcaacaataccagcgcctctaaccggacttcatttccatatgatacctccgcaaccccttcatttgagcttgaggcgtgggatggcaacccaaaagcaatcggcattgctattgacactgacacgacccgtcacattttctacattggaaccgatcgcgcggtccactggattgcggcgttcgtctcggcctcggttgaaggtggttttcgcgctcaggcgtctcagaacaccgacgtctggcctttggctgacgaaccaaattccgacttcaccattgcgagtcacatcgaaagcagcagcattcgactgtactatgtcagtggaggccgtataatcgaaacgaagtatcgtgatggaaattgggaccgagccgcccctgtggagagtgccaacacgacgatcatcgctgatgaaggtgctggtacgggtgatgctggtcttacaacgggagcgaaggcaggtattggtgtcggggtcagtgttggtgtccttctcatcggcgcagcagcagcagctttttggattcttcgaaagaagaagtccacaccccctgacgaggaggccacaacagctgccgacaacacagctgctacggttccgcccatgtctgagacgggaagtcaaggcgcctcctctccaacagctggtgtcgcgcgcaccggtagcggactcagtgcagacaagtgggacgctgaagtcaaggacaagccgcttacacctccaccgagagaacttgagagtccgaatcttgcgtctgagctgccgcataccaatgacaggaatgagcttcctactaagcatcatgtcacggagctaccttgatacctgagggaacaagctccaggagacatattgaaagataaagatagaggtggtatggcatggcggcgcatggagttcgtggggagcggatgtgatatgtggatgtacatggtgatattcaatgagtctagaacctatcattcttgctcacagtacaaagttttgatctgccgaaagatgctgctggcttattaacagtttcttgatgcaattcttttcaatagtttctccgagtagtaattcagatgcattgggtgaacctgactcggcaagggtttcccaatgttcaacggagaaacagagagtaaaaaaggaatgagacatgttacctctgtgcgctactgtaccctcgttcgaaccgtcaactcattctgttccactgccttcgtggattctgggaagacacagggagtggctgtgtgggaaaggaaggtccgccgatcgtgaatgaggtgaccgtctcactgcagcttgctcatgcccgactttgcgggctggccaatggtagggggacgcgacacacccttaacgaatactcgggattttgtgaagcaggaccctcggcaaagaggaaagactgactttactggaccgaatggagtcttgatggggtgagggtgctgaatcacgtggacatgtttggtgcttcatgtcaaaattctgccgatttctccttgcacgcagcagccatgggattttgtttcgctgggtagatacggtagagaggtttttcctttagaaacagaagtcattgactctgtcgcacagcatagaatgggctcgaggaatggtaaccatcgtcgagggctagattcatgttgtgttttgcggttttagacatgtcgtaccactccacagagtccagacttttgttggtcgcctctctggctctgagtagagcgggggatactatggtaatattctttgccaaaacaatcatcagtctattggggaacgcgctgaatcctcacatttagtcttctttgtttgtggaccgtgcaccctggtcatggtgaaaaagggtaaataggggtaatcttggcatctccacctagcaagccccttagctgaaactaaagtaaacaatctgaacaccatctccagttctccgcaactcctcgggaaccagatatatagtagaccactagaaaaggtcaatttgtggatgcaggtacccaagccacgatgctcaaagttgtatggacgattgatccaggtgactaccggctatatcctccgggctgaatgacaagacattttggacgtcacccattggatgaaccaacctgctcagggcggctagaatctatataacctccccatttcaatcttccatagagattccccgcagatccatgccggtatatcgtggttgacgttggccatgactgtgaggatgaatcaagcttgaagtagctatatttagttaaccagagagaaaaacatgtttgctcacttctcattctctatcctcgcatgtgaaagcccaaagaaagtatcacaatgctcacccttctgatcgcctccctcatcctcggggccaccaccgccctctccctcccccgacaggccgaccccatcgaagaagaaggctgcacccgcgccctcctcacccgctacacagaatcctacctctctgcccaaagcatcggcgacccctccatcctctccccctccccagaagtctcctacaccgaagacttccgcgccatctccatccgcgactcggtgctcaacacccccttccgcatcgcccacaaccgctccctgctcgacacgacccaatgcgcgacctacaccgagatcatcgtcaccgaccccgccaatccccgtgtgattggcacccagatcagacttgacgccacgggggagaacatcgtcaagatcgagacgttggtcaccaaggagggcgactgggcgtttaacgcgtcgctgacgtatcaatacgcggcgagggagacggagaataactggtggtttaccattcctgaagcggaccgcgacactagggaaacgatccaggctgcggcggatgcgtatttggatttgttcaatgaccctactgttgttgtgccttggggtacgccgtgcaacaggttggagggaagctggtacacgggcaatgggagcgccacggacagctgcaatgtgggggttccgtctggggtgccgatcacgcagaggaggtatgtgattgatgagacggtcgggacggtggacgcgtttgtgctgtttgggacgcggccggatagccatgagtttcgggttgagaaggggaagttgaggctggtgcatactttgactgtgatgaggaatgggacttttgtctgaaaaggggtgactacctgtaacattggtgatggaatggtattcagaggcacaaagttcaaccggcaagtctgacagaacataaatggcgtgagaaaaccggcaagtccgcttcacaaattctatctcctatcacgctgagcaccactcagtagcaacgacatcttcgtatccattgattttattcctattggcgagtgtccgattacctcccctgtggctcaaaggattcccgagtactaccttgcctcatagctgactaggaccaacgtggtcaacctcttgagtgagtgaagcaaagtctgaagttccttacctactcgaaccgctcatggggaaacacctcgcggttgaaagtgaaatcgtagtcaataccacgctcgtccattgcccccttaaactcaagaaggttttcctcggtccacggtgttccaaagcgcgtaaccttgaactctttgtttagcgacaggtcgaaagagaccaggttgggtacaaatttgtcgagtagcggcattacgtcttcgggcccgaagtggaacctgcaggagaattcgttacttccaccgtcaaacctgaaatgcttcaggttggggcaggccttgatgatgggtcgcaagctgcgattcttcagatatgctttggaaagtgtaaggcgagcgagcttctttactttgattccctccagcgatttggaccccgaggtttcctcagaccaatgttcgcggagaccctcaactgtgcatttctcgagattttacccctttcggaaagatggaaaccaaaaggcagggcgaaaggttgggggactcccccttgccgacaagcacgatcttggtgaggagttgcatagattatggggcgttcagactgagcagtgattcgtcgcggcacagtaagatgccttgatagccatcacctttggacagagggaagccagtatctcaagccttgtgttgttgctaacaggccgtactgaatacctcagacgagagcctctgggcttcgtgtacaccatccagtaatagtaatcgaactccaggtcccatagtgtagttaggtcaagcttgtgcagccacttccacatgaagctttgcgaaaagaagtggttcgggtagtactgggcaagctcaattggtaccattttggaggtctcgggacaccattgccctgcttctcgataaggtaaatctgtttaacggcttcagcaagatcgggacgaagaagtagcgtgcgggcgaaaagccaccgcttctgggtggtgggtcggtggtaaaggtgaggtgttgccacttggcttagggttctggaggtcgacgccagagctagcagagtagaaaagtctgcgaggtcactcttcagtacacagtaaggacagaagtgtccgactatgagcttgcggagctcgaaaggaagttccacgacgagagttatgactcagtcactttgctgcaagctagtagagctttcaggtcagggtcagcaatgaaggcattcatcaacctcggatattgagagtctgtcctaacttacgcgttgccgagatgtgggtgccgaagttggtttctgaagaaaggagacaagggcggtgcaagtcctgggaaagactttaaaccgcgggcggccaacgtgatggttgatttgtcgtaaggaatggtgaaagtgaagacattgaaaggaggagggttttaagcccatgatcccaacgcacagaccatgatatggtcccatctatcaagagatcatctgaaaattaggtatatctaaggagataacatgatggaaaacaaagtctgcaaagatgagccaacagcaggtatgtggctacctcgcattctcgacaataacctggatggacggttggtattaccaccaagtgccaagccaagaatggacgacatctgaagcaccaaagataccggtagcaaccctacttttgtcaacataagatgctctgaataattgcgccaaagagcagcatcgaaaagacagatgataagccgcagacatagcttcggacttcctctcgtggtagctatataattagggataaggagcccaggtaactagactagacaagtttcacgatactaggtcagtaaaagtaccaagaaactactgccttaggtaggtctttcacggcgttctcaaatgctgacgtggcgatccagcacttagactgcacaacatttcccaaagcggacagacagcgggaatgccagggtctcatggtccccacttcaacatctgtggtttttgaacaatggctctgttttcggaaggcagaaacccacgtcctttgtgtgttgtagagagccaagcacgcattccaggctgtgtgctttgctttcccttttatattacacccagcaacaccaaggatcgcaacctcacaacggttgaacggtgaacgctaaaaaaatgaatattggtgtgagtcttttgctgagtcccacattatggctctttggtctgagcactgtgactccaggggtgatggctgggtcgatttcgaacccgtggaagggacagccagcaaggccagcgacctatcacctagaggctgagactctagtgactgcacaacggctagactctgccgttgcattgtcatttcccctgtttgacacatcctctatcttgcccggattcgatgccacaacacaaggagcaagcaatgatgttgttctacgccacatcgtcacgacaatgacaaccatttcagggacaggcgagactgtggcggtgacaggattactggcagttccggtgtcagccaacaataccattcctgtagtgtcgtggcagcatggaaccatcctctctttcgaccaggtgccttcccatatggtgaagctctccgatccaaactacaacgtgaccgacgatgccgactccctggaaactttgtttaatatccagcgatttgcagcgaaccggtttgccgtcattgcggcggattacatcggcaagggcccgcttcgggaagggcgtggcgaggcctatgtcgtcaagggcgcaactacgcaaacgtgtgtggaattctcaacgctgggctcgccgcgctggaggatcttggtttgacaccggcgaaactgttcctacatggctggtcccagggtgccctcaacacgctatggttgcatcaagctctccgctccaatgggatcgatattgaagcgacggctgttgccagtcccttcagtgatctcgatcaagcatggcggtattggtctgggaaggtcattttcccactgccaaagggtctcgagagctaccctcccctggctgcctggatcgcgccttgcatgattgtggctcttggtagctacgagctgtactacaatctcccaggcctaatggagacggcggtgcggcctcaatatcgggaactagcagaaagaaattggcaagattataacatcagcgccattgatccctcaaactctcccaacagtaccaacctattggcggatagcttctggaaaggctgcacgaacgatcacattagtgcgctgcaacggcaactgatcagaaatgcagccatagactgggaatacgatagccccattcgtttctactatggtcttgccgacgaagctgtccatctggcgatggtgacgcgaacagttgctgctgggggcaggtatgccgctggaatccaggtcgccagggctagccaccgggcgacatttcttgccgggctgtatggcagcggagcatcgcttgacggcttcgataacgtgttgtcttggtttcagagcaaagcttagtcgggcactcgctgagcttgataggaggataggtattgaatgataaactgcccgataattgtaaaatacctgccatgaaagtcatccaaagtaggtagccagtcccaaaatgtccttacttcaactcaggtcaaagatgaagggtctcacgtggtatcgcgcctattttggtgtgttcaaagtctccgcggtcgcgaaacatgggtcggtcatgtttccatccacaaatgcacatgccctctgctgtctttttcttcggtattcctcttccaggtttgcaccaaactccactgcggggtttcagtgtcgccattggccatgtcatcgcttcgaccacctttttggagcttctgacgaggtacatgacatcggaggcattatgcttcaccatgtgtcgcacgcttatcgatttcgcacggctgcatcggcacctggaaagtgggcgcccgtttttaaacttgacagggacgactgtggtgtcgtgcaaggcacctgccgactagccgtagcgttccaacaggtccggggacggcccggggatagcagcacactgacgtcaatgccacaatgagctgaaggagagcaagtagagctccgtgatatatctttctgtttgtggccagtcttgcacttcctgcagatattgtcgacattatcttttggggaagctgccggtcaccctacctttcgcagtgccctcctcaataaaccagcattcgaccaacaccatcggttagctggggcactattgactgaaaaaaagttcccatcactcgccatcactccaagttctgcgataattaacatgggcaacttcctcaatcgcaagccggtcccggccccggatgcgaaccatcacacccatagcgacttgcactcggcgtcttctcgaccgagtgtcggtcagtggttcaaggcgacatggctggatatcttgaccatggctgcccttggcgccgttggtctgggtgtaaggattcttctctgggctcctgctgagctcctgacctttgggtctagttactgacagaggactcactcaggtttatcacgcgaaaccagccccgacccgttcgttccccgtcacgtttgccgacggcgagatcgtctaccccgagttcggctaccctcttcgcaaggagatcattccgatctggctcgctgcatttctagcttctgtcattcccattgtcatcatgctggtcatgcagatccgaatccgatcgttttgggacttcaacaacgcagtcattggcttgctgtacagcctaatcaccgccgccgtgttccaagttttcatcaagtggctcattggtggccttcgccctcacttccttgccgtttgccaaccggatttgtctctggcttctaatgcggctggcgtccagggagctgggtacaatggacggggatacacaggcatctactataccaagcaaatctgcaccggcgatgaagatgagatcaacgactcgctggaaagtatgcccagcgggcacaccactgccgcctttgcaggcctgatcttcctcagtctctacctgaacggcaagctgaaagtattctcggattatcaccctgccatgtggaagctggtcgttctgtacgcacctgtcctcggggcctgcttgatcggaggcgcgcttactatcgacgagtaccacaactggtacgacgttttcgccggcgctgttattggaactgtttttgctttcagcgcttaccggatgacgtatgcctcgatttgggactggaggtggaaccacgtcccgttgaaccgcacaacgtcttttacctttggacatggcggccagcaatacttggacgtgggaacgtttacgagacggggcgcttggggagagaagcacgggctgactggtcatcataatgggacggctgctcaccaccatgcggctcctatcggggcgactaccggaacgaatattcctcagaacggtgtccatggcgacaatatggtatagtgagcaatgataggtatggaatcgtgtttcagggtaatgcggagcgggaaacaaagccgggatggtgaggtagtgtaaccccaaagcaggatggaattggaatggaagcttgcggtcaagggtggagaccatgggaattattgccgagaggcacaacccctcctttcatgtcacgatgagttgctttctcattgactgatctttaatttgagatcatttgataccacaagaatttgcagttatctctcttacccaagaaaccaaaatatccttattgaaagtcattaatcaaccacgtagaacaatcaccacttaacctcactatgccgttcccatacaagacggtgctcatcacaggagcaacatcaggcatcggtcttgcactggccgagcgcatgatatctgcgggcatttttgtcattacaattggccgtcgcaaagatcgtcttgaagccctggctgagaaatatggcagcgagaaagtcgctgctgagccatttgatgtgtcggacttggacgccatgcccgcgtgggttgagcagtaagctacaccaatcctttcgtgttagcctattcgttgaccgtgatcttttttaggatcacatccaagtacccccgtctcgactccatcattctcaacgccggcttccagcggtccctcgacttcacgtccccgtccaccatctccttgtcgtccgtctcggcagagctcaccaccaattatctctccctcctccacatggtctcccattttctcccgcacctgatctcgctcgccccatccccgacgtccattgttcttgtctcctcaggtctcgctgtcctccccctgccccgatgcgcaaattactccgccaccaaagccgccgtgcacagtctggcttggtcactccggtgccagctttccggtccggaatcacctcatacccaccacatcaaggtaattgagatcatgccgccggccgtgcagacagagttgcatccccagcaaaaggacttggtagaggcggggcaggatcagcccgggattgagctggagaggtatatcgaggagacgtgggtggacttggtgggggaggaggaaaaagaggagattgtgcacagtgtgttgagggagaggttggaggcggtagaggggccgaggaagggggcgtgggaagggtttgtgagggctatgaggggggctgggttgaggttttgacgttgtggggcatttagtcgtccaagtcacaaaggtcatcatcatcctccatctcctccatgtatttccattctacttcgtctgggtggtcgttttccagtagctccttttctaccaatgagatttccagctggacgtgtttggagattgttaattcatctgctgctgcccgccttaaccaacagtttgccgccgtgtcttgcgcgggatcatcgctgaacggatggccttctagtcttggagggctgttgggagagaggggtgtgggtttagtcgtcacttgcaccagcaagttgtctctgaacggcgccgtatgaggataatcgacctcagagtccaagtcaaagcctgtatgaatatctttgttcaagaacttgagaagatgttctggtcccggtgcatctccgtcaatactacttcccggttttggtccattactttggttcaaaatatccacccaccgctctggtcgaggaagtttcctgtcaacgagccagatgccgaagcgggggaatggcggacaaaaatagaccaccaacaggtagaagatgggcgaagaactggtcccggtgacacccagaatttgaatgtataacgtcccgttggtcattaaagctcctccgtctttgagcatgatggtcccgaagtagttcatgtctgcgaaaccgaggagtcctgcatcggagctgctggaaatggccctaggtgccacaaaagaccactgttggtgactgtctttatctggcctgtatccgaatgatttccgcaagagcaaggatgccaagcgcgagcttttagcgggaaccgtaagtagagtggttgatggattgatgagggccgagggcttggggtgagtgagggtaatactatgccggcccaagctttgccattttcctctaagcaatctggtggtgtccatgaactcctgccacgaatatagggatccagttctcagtacctcgtagacgggatgtccaatgccggtggcggccaagggcaagatcatcgggtcgtctggctcgctggtccgcgcgcagtttaatttgatcgcgtagagagccggggtccgtgaattcgaaagccgctgctgatattttgaaccttcgtcttcgaatcgttgaaagagttcaactttgaggctgatgccgccattggagaggccgacattcctgggccctttatcaaaatgaatgactgccagcccgttggattcagaaaatgcttcgggagattctgcaaacaagctctcccgtaccatccactcaggatatcggcctcgtccccccatgcgttcagcaaatgagcgtgcattggtggagaatactgacccttttcgggtagtccagagaagcaccgtttcatcgttgaatagacgtatcagctcgtgctggaggcgaacaaacgcattcttgccttcaccatagaggaggggcatgtgaacgcctaggagacccatcatactgtaagccctgtcctcgatctttgttgtctggcgtttagaagcccacgagagctctgttgctatggaacacgacctaaaattctggatatccttttgttcgatcgtggttgcatatgctactgcaagtgtgcacgtttccctggagccaacgatgttccagtctgagtcgacaaaagccaagaatgacggagcaagcagctcctgttgagtccatccccttgtgaaccagcgactttggaccacctcggaattgcgaggccgtgactttccatcactgcaataatgtggagggacatcctccagaaaggcgtaacagatctgagcctcttcataccagcggaacatggagttgatggcctctccaaattcatagctgtcggccttgttgatgcaacacgtgtcgatccagacgtactgccatccctgggatcgtgcgagtttgcaacagttcttgaccttttgccggcccttgagcgatgttcgcgcagagctcgagatgtcattgaaggtgacctcctgctctccccatgtgtgtgatagaatggcatattggggcatgttgttgaggaactgctcaagtttgagggttgtagtgttgagaagtctcattttggggagtcaccactggttcaatagcaggaggggcacaaagatgaaaagaaaacgaaaaaggcaaagaaaaaagaggaaaagtgttatggaaagtaaacataacgtatttgataagcgagcggatcggataagcgagtggatcgatttccactaccctattacaaccatccttaattgcaaaacaacaatactattaacctactacaattacatcagaaacagctgaattagactcttctgcaacctcctggcacgtacggatattatatccaggcttgccgcacacaccacagcactaaaccttcgtacgccctccccctacactaccaccaccctgctcctttccttgcgccacctctccacccacagccttctggtccagtagatcctatgtattttgcacagtaagtgatcctctaagttatacgcgtattttttttactttccggcgtttacttagtgcctcgtttattttacggagcgaagatacttttaattaaaggaaaactatttaatatattatagttattatacctttagtaagttagtttactgtaattaatattaaagtcggggagttattttaatagttagtaatataaattttaataagcgttaattataaattagtttttcgggggttttataatgtttggaatacttaaggtagtaccgtgcccggttttaaaaataggggtataggcgtacgaagctttatatttagtttagaaagtattttctttaaatcgtataatataaagctaatacccgtaaaactactttatatattcttctctattatagaagtaaagaaagcttcgcggaaagtataaagaaattcgagtttatttacgtaattaatatatatatatatctaagccctcgatttagcggccgtatatttattttagcggcttaaagtaattaatattaaatagttggaggaagtgggaggagtataaaggtatataaagcgtaataatattattttattaataatagtgctcgaatttaattaagtaataacttttgtagttattaaagattaataattagtatttactcttcgtacggaacgctatataataatcgaagtatttaatttaatttaggtttaccggattaataatttaattattatcggtaattataatatattaagtaaataataaattatatttaatatattaattagtaaagtaatattatacggctaaaataataaagggtaaaatagcttagtcgagggtattaactccctagattattattatttatttacggttattaggctaaattagttttattttattaaagccgtccgaagttataattattatatttataaaaataatatttattataaacttaatctcgttaaaattataaatattattatttataataccgtacttaactttaatattccgtataaacgcaagcacttnnnnnnnnnnnnnnnnnnnnnnnnnnnnnnnnnnnnnnnnnnnnnnnnnnnnnnnnnnnnnnnnnnnnnnnnnnnnnnnnnnnnnnnnnnnnnnnnnnnnnnnnnnnnnnnnnnnnnnnnnnnnnnnnnnnnnnnnnnnnnnnnnnnnnnttaatattccgtataaacgtaaactactcggtaataaccttcggatccttgtatttagccctttagtagttgtatttacgcgtaaaacgcatataaagctataattagcgtttaacgaagttatatatctagcgttaactaataggaggcgcgtcgcgtacgcgcagcagttagttagctatatcttccacactacttaatctaggtgggaatgcgcgtgcagatagctcaagaacgtactaaactatcgtcttctcctccagatccgttaaattgcgtaagttggctggaatatcgcgtcgtgcaggcttactagcgcgccggcgatggagggtagtataaggcatagaatagagcctcgctgcagctttgaggcttagtttagggtcatttttaagggcttcgagtgcaagaataacttttgcttcaactagaatcgaagacatcttggtatggtagaggaaatcgatgttgcaggtagagagctatatcgcgtacgaaatcgatccactcgcttgtccgatccgctcgcttatcaaatacgttatgttcaagacagaaactggagatcgaagtagtcccgaaccaagaagctaagcgctgaggctgaacaaaaccagtgcggcacgcagcacattcacctcctgtcccaagccacaactcatcacgacgactcatagacaggcaagttgacgatgtgggttggagttgccgcccgccaatgagagctgctctggcagccacgaatttcctagcaacaagcgagcggccatgcaacccaaacaacttttgtcgacctcttcgacgtgccttcggtgcctgcatatcttcatagcgaggacatgacatgtgtttgatcaacagttcctgacgccatcctgcccctcgacgtcggtgtgcccatcccgtggattttcccgttgcttgtcgtgcggctcccgtgggacagggaacggggaaatccttcccacccgcgaagttctttaaacttcaaatacccctgaataaaaccgccaaggcactacccattcatcatggagccggtaactggcctactgttccgctaccgagattggcagcggctcaaccacccccacagagctgatgatcaaaagccaggccaacaaattctcatcgcgtcgaatgcttttcgtctttttcacgcaaacatctaaatggaaaagaccagcacgatggcgccacaccgactgaccagcgctctcctgacatcattgttggccacaatcctaaccgccgggacaacggacgctgcccttctcgacgttccttcaccaaagaactatgtcagacgggccctcgcccgcgctaccgtactaaacaatcacgtttacattgaaggcggccaaatcactcagtacgaggacggcttcagctccattcgcggccgagtggagaaccaggtcaactccaccctctcaattcccctgaacgaatcgtggaagtctgaatcagtcaccatcaaagcaaccccgaaaccttttgaaagtctggctagaaacagatggtacttgtggaccgatacaaagaatggggtattctatgcttggggtggctactggccgtttgggctcgagatggtgacggatgaagtctacaagttcaccgctgacagccgaggaggaggtgaatggggcgtggaaacgcttcctaatgggctgcgcttggatcaaatcagcccgggcgaagctggggctgtcaccagcaccggcacaatgggaatcgtcattggcggacaagccactccttggacgcagttgggaagggataacactcgccagctgtctggaatgataactttcgactttgaaagcaaggcgctcatgaatggtactcaaaagttcagtccatttggggacacgccagttgtcggagcgtctgccgagtttatttctggggttggggagaatgggattgtcgtagtcatgggaggacacgtgggacgaactgacaaggaggtaccacttggggagatggactttttcgacatgagaaatgtcacatttcttcgatccctgtgacgaaagtaaacctgcgctcgcaagttaccactggagatattcctccttcaccgagaatcggattttgcacagcagccattcagcagtcaatgcgcaaggggcgccacgagatgtaacgttgcatagatagctcatccctgaataagctggattcgaatctgttgcacgagacagtactgcgtgtggatcaatcggacgaaatcggactacggattggtgtacgaagacgcttacgttctcagcctgcccggattttgctctggacaaaacgtcccaacaccaccaggcaggccgcgccggatgtcttaccacacatgcgtcccggtgggcaaccgacaaggtcttgagcgtcggcggtcgtggcagagaggatgaaatacaaattcgagatgcgatccctcaggggctccttctgttcgatatgacagcgaccgaatggaagctggaatacgattccaacgccgccgcctatgaatcagcaaacgccatcaaggactggtataagaagcggtaaagaatatctcttcatctacataattcatgatggccagttgctaacacagaaccagaacttcttctgatgttcaatggtcttccgaaggcgtcgagcagctctttgcaacatctgccgaggccttattcaccagtggagactcgccagactcccagtcaggttcaaatacagattccccgtcgggcccaacaacaaccacgatgccagatatatcagcacctgccggcttgagtacgggagcaatggtgggaataatactagcggctgtgatctgtctggccgccatcattggtggttggcttttctggcgtcgacgacgagctggtagacacgacgcgctcactgaaacagatgacctgggcgagctgggagtggacggagctgttgatcgcaaggagctggcctcggagtcacatgtgcgagagatgccctctgatgcccaggttgaggagctgtctaccaaatttcaggacacaaaggtacctgttgcccattatcacgaggtctatgggggccatgattatgcggagctgccaacctaccaccggccaaggcccagggcattgcaaaacacgctgccgccggttgagttggatgcgggctatacagggagggagctgatgtaatagagcagatgagcgaggtcattgtacatattgttttgatgaataaacccggttgcttcgagactcaggggacaccgagaacgaagtgatatcacagcaatccggaatctcagtagcgaatcgctaggtagactgcatttgttcacttcagtcatctaacctctatcccccatacctcggtcttcccgcttcgttaggtacatgtccgatcacaatctacatgacatcgccaggaatcttttgcagcccttttctacttgtcagcaagcataatcttcaccagcatctcccagcgaggcaaacttacatccatcaacattctctggaacattctgtggctgagtgcacctcatcgcctcctcagacgattgggtcttgagctccttgcaaaccgcattggaacaacgggcatcgagcgcgcgctgcagagagtctcccttccagccaaagacgtaatcgccgtgttgggagtacccaagcctgtggggcaagtggtcagtcacggttggccccgcaacaaatcagggggctaattaacaagagaggtcacctacccgtcaccagtgctccacacaaacggctgcgacccatcctcgggccagaggctcttgtcgttgaacgcctgggtatcccacatgacctcatacatcaactgcggcagtctaaccgggtgcgagctcgggcaggggccggtgctctcgaacgatccagtctgggggtacgccacgtggctcttgtggtcaggcgcgtcgagattctttccgtcccagcaggtggggaacgtgatggtggttctgatgccgccgtcgcagaacttgttggggagggtagtgctgtcgcttcctgtgcagggggctccgccgcggtcgtacccagcgccgaggcagcggtggcagagctgcttttgcatgcccctgttctggcggaggccggcgtcgccgacgagcatgcggaagccgggcttgaaggcggtgacggttgtcttaccgtcgtacggtgggatgtagtagactgtcacgccgccgtctgttcgaaggccgacgttggggaactgcctcacgcgcttgtaggtgccgttgcgggccttgaagtagaggacggcggtccagtagttgctaaagtcctcgctgaaggtgcacgaggtgcaggtggagtttttgacgaggtcgaagccttgctcgaagggcatgtgggcgttgaaggagttaccaccgacgatttgatggacgtggggagactgttccaggcctgggttgacgagggggtcgaggcgggagacgacgagctgggagcagccgaaacgtatcatttgttgggcttgggcggctccttgaaggagtgccgctgctaggagggttgacttcatgatcttggtctgtttctcctgtgctcctgaggcggatggtggtaggaagaacgatgggagtttcaccagcaggaacaacaaaagatatcagcctccaaagacgctcaacccggaaaatcaaatgcaagaacagacaacaaggtaacctcgtcctaaatacacaagagtcccattccccggtttggggtaaaggacaaaccacatggcaaagccctccgtctacagccgccccaatgccgtctgctgatacaaaggcatgtccggataagcccgagccttgatatttgcgatgcaagggtaatctacgactcttgcttgggaggatcggcagatgaaaagccttgtactatggtgcgtatgttttgttggggtaagtcttggggaaggaaaagggggcaagtttcccctctttgctgatcccgccttggtaataagccagccgcaggttgctaatatggcagaataggagggtaaataacagtgatagtccacgctctcgatatgatatggtgcacatgagctacacttccttgccacattctagaattgttgccatgtggctaatctgcatctccgacacgaccaggatagcgttcggcctataagagacgggaacagagagacatgatttaaatcgattgccaggcacaccctcttttgcatgtggttttagtgttcgtgttgaccttcctgatcgacctatacccttactcagacgtcacaacattttgtgtctttcacgatgagataccttgccgttgtgctgtccactgtcgcaggcgtgcaagcagccagacaatgctcaaccaccacagggtacacccaccgggtactcgatgcccgttacgatggcccagatgtcgataagccaggcagcgaccttgcaaccatctcggtcagtctcagcagcagcacaacacctctttacgagtgtgtagcgcaatggccggattcatggaagggtttccacaatgtcacagagaagctgatttggagcgattgcatctggactggtgctggtagtggggcggacaagtcggtggcttttgcggtggattggaataagaaggtagtgtatctggctcatgtgtttgcctgcagtgatcgtgaggggttagtccattttctcgattctcgttttctctcagtgcttggatctgacggctttcgtctaaaaccaggaccgacggcctagcgactggaacgctccctctttccgtgcttgactgtgattacaccgaagagggcagcgcctattgcatccccaaggcgacatcttcaggcgctcgccctgacctcagaataagcactgtacttgctcccaaggccccagacgccaacaccgcctcctgctctgagatctctgagcaataccagtcatggacactggagaagtggcacagacagtttgtcctcactcctggcagctttgaacccaaggccggaaccgatactggaccaagcttcactctcaagagcttgggcgtgaatggcgtgacgtttacttgtgccactacatctgccccggttggtccctttcagggggagtgcaagtcggatgtcaccaaggcagccgcgactttcactttcgaccccaaactcaacattttgactgtcaagcaaaagtgggattgtggggattcgtaagttttccagacaaagacgaattttttgctcaagggctaacctcatcaatggcagtgccgcgctggagacggttggtgttggctacatgcagggtacttgtgacaggggcttcaacagtgatgtctttacttgctcgtccgagccagtcctgattggaactgaggcgttataaaaacagtgggaagacttggcgaacgattgagcttttctggttgttgttattcacgcatttaaatatctgagaaagggaaccctttatcctggtgtgtgaatctgtgactccatgaccacaatcgatttattaaaccacaaatccaaatgtacccaccactttgcgagccactctttccactccctcaaaccagcgctttggtggtggcccttcatcgactgctgtggctgtgtcctcggcagggtcaagtgcggataattttctctttcgaccacgactatccgcgtcgaccatttcgccaagggctgtatcaaagtcctggaggtcaaggtccaaatgtgatacaaatctgctgttattctcatctgaacggaatctgtcgagctccagatccagctccaaatcaaccactgtaccgtaatgggcccagcagttaaggtcttctgcatccttacaactgacagaaagctcgagcatttgggtgtatgtatgataaatggtcctagagtttgccaatattagatgagcattttccttctaggtaccgtaggcagccgatgctaccatcaaaacagactcaccccgtatccgggcctccaagaggccacaatccatccggctgaaacctttcaaaggcgaagctagcaattgacttcttgacggcacactcctcgatgagctgaaccaagactgccgtggaggcagattcctgacagaggatgccaagcttctggtgtctgtaccgctggatgactctagttgcagcgggcgcacgtgaacgaagggtgtcgatgaagctcttttaacatatgtatcacggaattagtttctgtatccgcccgttctcgaatagtaaagcgggaatttgtgtactgaccagccctttcaggcttccatgatcccagtctttggttgttttcctgaatttctcgacagatgtatacacgatacgcaaggcgcacaaaacaatagcgggattataagcttctcgcggatctgtgtcctcgggactaagcgtcttgttgatgaggtagaacaacctgaacgcaagatcttcaacccgatgtgccagtgcatacatcagttcgaggatgaggttcttgcccgtgataggcccgatgcccttcattctagacaatcgttcatagtgaatcaggtgagtgttccagttgaagagaagcccgagataaaaggcacaccgcgacgaggcaactatgaccatctgctgatggggcatttgcaaagacaggcctcaacgttatatcacaccttacgtggaaatggaaatacatacgtcaagttccgataaggcttgcatctcccgtccgggagccattccatctgcgaagacatccaacaaggtcgcagaaagtgagggctcaacatatgagtcaaaggcatcggcgtaatctggcgcgggacgttgtggatagatggttcatgcgaattgtgtggctagtcatggaacatggtgaataaaccttgttttcacctccgctgtcaatgtggcaaagaatgtggtcgtttgttaagaaccagctctcgagactcatgaacccgtcttggaaggtcactttgtcgatctccacacgaagtgaaaccagaagctcgtgggtcgcctctgtttgaacgcaatatttagcgactcaacctaccgtgaattctaagggctttaacgtatattataagcgagtcgtacatataagcgagtcgtacagtctccaccacgacgcgtcctccttacacctaacatcaattttttccacaacccaacatgcctcctacttcaaaggaagccaggatactcttagcccttgaggctctctaaaaggacgaaaaattaagcctccgagctatagctaagctttacaacgtaccacctatgactctctctaaccgacgcgccggccggcctgcacggcgcgatactacgcccggatcgaagaagcttactcaatccgaagaggaggttattgtttattatattattgagctatctacgcgagcttttccaccaaggttacgtggtgtagaagatatggccaaccaactactacgcgtacgcgacgcgccccctattggcaagctctgggtatataacttctttaaacgctagccacagctccgtatacgttttacgtgtaaatataattactagagagctaagtgcgaagatccgaaggttattaccgagtaatttacgctcgtacggaatactaaagctaagtatggtattataaataacgatatttataactttaacgagattaggtttataataaatattatttttataagtataataattataatctcggacggccttaataaagcaaaattggtttagcttagtaaccgcgagtgggtaatagtaatccagggagttaataccctcggctaagctatctcgccctttattattttaaccgtataatattactttactaattaatatattaaatataatttattatttacttaacgtattgtaattactaataataattaaattattaatccggtaagcttaaattaaattaaatatttcgattattatatagcgtcttatacgaaaagtaaataccggttattaatccttaataattacgaaagttattacttaattaaattcaaatattattattaataaaataatattattacgctctatatacttccatactccttccacctcctccaactactcgatattaattactttaggccgctaaaataggcgtacggccgctaaatcgagggcttcatatatatatatattaattacgtaagtaaactcgaatttctttataccttccgtaaagctttcttcgcctttataacggaaaaaaatatatagaatagctttataggtactagccttatactatataatttaaagagggtactttttaaattaaatataaagttttatacgttaatacccctatccttaaagccgggcacggtactcccttaagtattttaaatactataaaacctccgagaaactaatttatatttaacgcttattaaaattcgtattactaactattaaaataatttcccgactttaatattaagtactatagattaatttattaagggtacgatagttataatatattaagtagtggtttggggtacggctataggcctaaaagtataaataaggaagcggggctcttagaggacttaggggttcaggggttatatatataagcggtctacttctgatattctattttaaacaggacatcgacttttattcttttctttatattttatgctttatacgcgtgcaggcaattctggccctctgattaggctaatccggtgcttattatgtggcctgcgagcctatagtgtcttttctttatcctacgtaaagtgcggcctacgagcgagttactattacgtaggtatgtttattctaagatctattaagggtatatttatagtattataattattttatatatttttttattattttaaatagagatcgtgcccgggttaagtaaagtttagggtctaaactaaatttataagccttaggtattaaaggaagtgcgaagttatgaataataataaatatcgataactttattaaaccccgtgaagtttaataaaaacgatttttctccgtttaatcggataaaggttttttattatagattaaactttaaatcttttacttgcgagtaaaaagttaaatatatagtccggataggaccgggaaataaattaaaagtattaattaaaattaattcgttaataaactttatttttatattaattattaaagtttttctttatttttaattaaaaggaatccttttaatatattatttcacgataataaataatcgtaaggatttccgggttaatttaatttaaaatatcgggaatttaaaagtaaggaaataaaaatattttccctttaatttaaataaatataatttatatttatatattaaagttataaaggataaccgtttttatatttttaataatatatataaagaaaaaactatactattaacgtaaatataataataattatcgagtattaatatatttaataatattttacttattactttaattaactttcccggtaataattaaaagtattaaacttttatggctcgttccgtaataaaaataattatttcggcggttaagtccccagaattattattatttattttttccccgactatgaaccgcgcttactttaaaaatattaaaacccttcgcctcttttttaattaaagtagcccgattataaagcttaacgctcctaatatattaaataaacctcgtatttacttaaattttattacttaaaattatactatacctcccactcggtataccggatatcccgcttttttttttaggttcgtatattaattttaataacttaaatatttatattttatagaagtttaccccgattattattacttttaagggtcctttacgtttaattatttaaccccttattttatagtatttatatattttttttaatataaattccttaatccgaagaaaatcgattttaaaagtaattttaaaagaaaatattttataaaatatttaaagcgttttaaaaatacttataaagaatattatattatagaatttattttttacgtttataaatttaaattttaatataatttcgatataagaaaatagattaacgaatatataaacctatctatatttactaatatttagtttatcctaattattcgttttc

SEQ ID NO: 35 - DNA, 3084 bp, Pyrenophora tritici-repentis
atggcgtacaacaacaccaacccccaaggttacaacctgggagaaccgcacaccggctacgaccgcacccgcgatgaagaggaagtcggccagtcgctcttgcacgagaaccccactggtgcacattcggaccccttctacggcaacccggaagtccgcccacactcaacatacagcttgaccgagtcgtatgccaccgacaggccaacacaataccctggtcaagcccatgagggttccgtctactccgccactggcggctacgacccagctggcgacttcggcgctccccagcgggcaccttcgccataccagaggagcgagaccagctcgaccgaggcatggaggcagcgacagcagcctggcggaggagctgctggtggtctcaagcgtggcatgacccgtaaggttaagcttgtgcaaggttccgtcctcagtgccgactatccggtgccttcggccatccagaatgccatccaggcaaagtaccgcaatgacctcgagagcggtagcgaggagtttactcacatgcgatacacggccgcgacatgtgaccccaatgacttcactctcaagaacggatacaatctgcgtccggccatgtacaaccgccacactgagttgctcatcgccatcacctactacaacgaagacaaagttcttaccgcccgtaccctgcacggtgtcatgcaaaacatccgcgacattgtcaacttgaagaaatccgagttctggaacaagggtggtccggcttggcagaagattgtcgtgtgccttgttttcgacggtattgacccttgcgacaagggcacgctcgatttgctcgccactgtcggtatctaccaagatggtatcatgaagaaggatattgatggaaatgagactgttgctcacatttttgagtacaccacacaattgtcggttacccctaaccaacagctcatccgcccccacgatgacagcgccagcacgctccctcccgtccagatgattttctgcctgaagcaaaagaacagcaagaaaatcaactcgcacagatggctcttcactgccattggccgcatcttgaacccggaagtctgtattctgcttgatgccggtaccaagccaggccccaaatctctcctcgccctttgggaaggtttctacaacgacaaggaccttggtggtgcttgcggtgagattcacgctatgttgggcaagggctggaagaacctcctcaacccgctggttgccgcgcaaaacttcgagtataagatcagtaacattctcgacaagcccctggaatcttccttcggatacgtctctgtgttgcccggtgctttctccgcctaccgataccgcgctatcatgggtcgaccgctcgagcagtacttccacggtgaccatacccttgccaagattctcggaaagaagggtatcgagggcatgaacattttcaagaagaacatgttcttggccgaggaccgtattctgtgtttcgaacttgtcgccaaggctggctccaagtggcatctgacctacatcaaggcctccaagggagagactgacgtgcccgaagacgcggcagaactgatcggtcaacgtcgtcgttggttgaacggttcctttgctgccggtatctactccctgctccatttcggccgcatgtacaagagtggccacaacctcatccgcatgttcttcttccacgtccagatgctgtacaacaccttccaaacgattctcacctggttttccatggcctccttctggcttactaccgttgtcatcatgagtcttgtcggtaccaaaaccggagacagagacgcttggccattcggaaacactgctacgcccatcttcaacacggttgtcacttacatctacctcggcttcctcgtcctgcaattcattctggctttcggtaatcgtccaaagggttcgagatggtcttacctgatctcattctgtgtcttcggtctgatccaactttacatcgtcatcctgtccatctaccttgtcgtacaagctttcacgaatcctacatcgcagaagctcgataccacctcgccggaaaagtttgctcaatcgttcttctcatccgacggtgttggtatcattatcattgctcttggggcgacctttggtctctactacgttgcatcgttcctctacatggacccctggcacatgttcacctccttcccgcagtatctgctcatcatgtcgtcctacatcaacatccttaacgtctacgccttttccaactggcacgatgtttcttggggtaccaagggttccgacaaggctgatgcacttccctcagcgaagacggagaagggatcagacggcaagcacaacgtcattgaggaaccggatctgccccaggccgatattgacagccagttcgaggctactgtcaagcgtgctcttgctccttacgtcccacctgtcgagagcgacgagaagacgcttgaagactcgtacaagtctttccgtactcatctttgcacggcctggattggttccaacgctaccctcgctgttgtaattacccaggacaacttcgaccgcttcggtttctcgtcaagtgcctcaagccgaacagcgcatttcttccaggcccttctgtgggccactgcagcgcttgccttggtgcgtttcctgggatgtttgtggttccttggtcgtactggtctcttcttctgcgtcaggaagaggtaaacagccacgacatatcatccaattcagcaacggccacttttgcgtttctcaagccttgcttctatttctcaaacctcctcgtattacggcgttccttggttggtgtctcggacttcagcaatagcttcaagctgtgtagcctctgactcttgcttgttacaaaaagacacgtccgctcatgcgcagcagattgatgccatcgtcactgcttgcctgtattactccttgttcagtattgcatacagatgccgaatgtcttgggtttatttgaaaagggagagagagatataccgatgtccactttttgcacgattagctggtttgcaaatgtttttcgctagattgaatactaagtattttaaaattatgctcgtttca

SEQ ID NO: 36 - DNA, 2733 bp, Sclerotinia sclerotiorum
atggcttactctggcaacggaggctatgatgagcataagctccaagatcttccacccgggggtagttatcatcatcctcaagatgaagaggaaggagctttacctttactcgattctggtggacatggcggcccattcaatagtccttacgattcgcacgctcagggaggtctgcgggcgaatactcctcctgttagacctgtttccgcctacagtcttacggaaacgtatgcgaacgacccacagccatacagcagcgattatagttcctcccacacatacaatgagcaattagaagataacccatacccacgaactaattcaccattgtcccgagccgagacttcttccacggaggcatggagacaacgacaagctcctcaagctggtggactcaaacgttacgctacaagaaaggtcaagcttgtacagggaagcgtcttgagcgtcgaccatccagtacccagtgccatcaaaaatgctatccagcaaaaataccgaaatgacttagagggtggcagcgaagaattcacacatatgcgttataccgctgcaacttgcgatcctgacgagtttacactgaagaacggttacaatctaagacctgcaatgtacaatcgtcatactgagttgctcatcgccgtcacttactataacgaagacaagcagttgaccgcccgtacccttcacggtgttatgcaaaacatccgcgatatcgtcaatctcaaaaaatctgatttctggaatgtcggtggaccagcatggcaaaagatcgtcgtctgcctcgtcttcgatggtatcgacccttgcgacaaagatacgcttgatgttcttgccacaattggtatctaccaagatggtgtcatgaagaaggatgttgatggaaaggagactgttgctcatgtttttgaatacacaactcaactttcagttactgccagtcagcaacttatccgcccaaccgaaggtgatgccaactgtctcccgccagtgcaaatgatgttttgcttgaaagcaaagaacacgaaaaagatcaattctcatagatggttgttcaatgcatttggtcgccttctcaatcctgaagtctgtattcttctcgatgctggtaccaagccaggtcccaagtccttgttatcgttgtgggaaggtttctacaacgacaaagatcttggaggtgcttgtggtgagattcacgcaatgttgggcaagggcggaaaaaagcttctcaatccccttgttgcaggtcagaacttcgagtacaagatcagtaatattcttgataagccgttagaaagttcttttggatatgtcagtgtgttaccgggagctttctcagcatatcgattccgagctatcatgggacgaccccttgagcagtacttccacggagatcacactttgtctaagattcttggaaagaagggtatcgagggaatgaacattttcaaaaagaacatgttcttggccgaggacagaattctctgtttcgaacttgtagctaaggccggtagcaaatggcatttgacctatatcaaagcagctaaaggagagactgatgtacccgaaggagctgctgaatttattggtcaacgtagaagatggcttaacggttcttttgcggcaggaatgtattccatcatgcatttcggcagaatgtataagagtggtcacaaccttgtccgcatgttcttcttgcacattcaattcttatacaacgtcttctccaacttccttagttggttcatgttgtcttctttctggctcacaactactgttatcatggatcttgtcggtactcctactcccgcttcggacacaactgcacttcaccatggctggcctttcggtgatactgctaccccaatcatcaacacaatcttgaagtacctctacctgggattcctgctcgttcaatttattctagcgcttggtaacagacctaagggatccaaagtcacctatctcgtatcctttgtagttttcggtgttattaacctttatgtccttgtcttatccatgtatctggtcgttcgtgctttctcgtcaggagatagtattgacactagtaacacaaaagatttcttcgagagtttctttgggaatagctcgagttctggagctggtatcattattctcgctttggctgcaacatttggattgtactttgttgcatccttcatgtacatggatccatggcacatgttccattccttcggaccatacctcttgctcatgtcgtcttacatcaacattctcatggtgtacgctttcagtaattggcatgatgtttcttggggtaccaaaggatctgacaaggcagaagctctgccatccgcgaaaactacgaaagttgatggtaaagcggcagttattgaagaaatcgacagaccacaagaggatattgacagtcaatttgaggcgacagtcaagcgtgctcttagtccatttgttcctgtagtcgaagatgagagcaagactttggaggattcttacaaatctttcagaacgaagcttttgatctcatgggtcttttcgaatgctttattggctgttgccatcacgagtgacagtgttgacggctttggtttcggagatactgcttcagtaagaactgccaagtttttcgaggttctcctttactcgacagctttcttggcacttattcgattccttggatgttcttacttcttgttcaaatctggaatcatgtgctgctttatgagacgttag

SEQ ID NO: 37 - DNA, 3120 bp, Talaromyces stipitatus
atggcctaccaaggtggccatcctcactcaccaacctcaaattatggtgctgatgaggctcatcgaatgaacgagctgggacataccaaccaatacggtgaagacgatgcctctcgaagcttgttgaaccaaggtcccttcaacggtccttttgaagaccctctccacagccgttctgcatctccaatgcgccctgtttccagatacagtttgaccgagtcctatgctaccgagtcagcagctcctccttaccatgatgctggcgccgaaaaccctgctgcggcttttggcgtccctggccgtgtagcttccccatatgcacgcagtgagacttcttcaactgaggcctggcgtcagagacaagctcctggcggtgctggcactggtctgcgccgatatgctaccaggaaggtcaagcttgtacagggttccgtcctgagtgtcgactaccctgttcctagtgctattcagaatgccgttcaggccaagtatcgaaatgatctcgagggtggcagcgaagagttcactcacatgcgatacactgccgctacttgtgatcctaatgaattcaccctccacaacggttacaacttgcgaccggcgatgtataaccgtcataccgaactgttgatcgccatcacatactacaacgaagacaagcaattgacttctcgaaccctgcacggtgtcatgcaaaacattcgcgacattgtcaacttgaagaaatctgagttctggaacaagggtggtcccgcttggcagaagattgtcgtttgtctagtgtttgacggtatcgatccttgtgacaaggacacacttgatgttctcgctaccgttggtatctaccaggatggtgtcatgaaacgtgacgtcgacggaaaggaaaccgtagctcacattttcgaatatactacccagctttctgtcacacccagccaacagctcattcgtcccacggacgacggtcccagcactttgcctcctgtgcagatgattttctgcttgaagcagaagaacagcaagaaaatcaattctcaccgttggctttttaatgcgtttggacgtattttgaaccctgaaatttgcgtattgctcgatgccggtaccaaacccggccacaagtctattctcgccttgtgggaagcattctacaacgacaaagatctcggtggtgcctgtggtgaaattcacgccatgttgggtaaaggttggaagaatttggttaaccctctagtcgcagcccagaacttcgagtacaagatttcaaacattctcgacaagcccttggaatcctccttcggatacgtcagtgtgttgcccggtgctttctcagcttaccgattccgtgctatcatgggccgacctcttgaacagtacttccacggtgaccataccctttctaaacaattgggtaagaagggtattgagggcatgaacattttcaagaagaacatgttcttggctgaggatcgtatcttgtgcttcgaactggtggccaaggccggctccaaatggcacttgtcatatgtcaaggcttccaaggccgaaactgatgtgcctgaaggtgctgctgagtttatttctcagcgtcgtcgttggttgaacggttctttcgctgccggtatttacagtcttatgcacttcagccgtatctacaagagcggtcacaacatccttcgtatgcttgttcttcactttcaaatgctttacaatactttcaacactattttgacatggtttgctcttgcgtcttattggcttactacctctgttatcctggatctcgtcggtacgcctagcaactctaataacaacgaagccttccctttcggtaacaaagctacccctattatcaacacgcttgttaagtatggctatctcggtgtgttgcttcttcaattcattttggctcttggaaatcgtcccaaaggttcgaaacacacatatattatgtcattcatcttcttcggtatcgtgcagctttacgtcgtggtagactccatgtacttggtcgtccacgccttctcgggttctgcacctatggatttcgacactgatcacggagttggaggctttttgaagtctttcttctcgtcttctggtgcgggtatcattatcattgccttggctgccactttcggtctttacttcgtcgcttccttcatgtacatggacccatggcacatgttcacttcgttccccgcctatctcttggtcatgtcctctttcatcaatatcctcaacgtctacgcattcagcaattggcacgatgtttcttggggtaccaagggttccgataaggcagatgcattaccttcagtacaaacgcaaaaggaagcggacggaaagggagcagtcattgaagaagtcgacaagccccaggctgatattgacagtcaattcgaggccactgtcaagcgcgccctgacaccattcgtggcacctgttgaaaaagaagagcgcagcttggaggactcttacaagagtttccgtaccaagcttgtcagtttctggatcttcaccaacgctcttttgtctgtctgcatcactagcgatggtgttgaccagtttggatttactaacaaagccactactcgtaccacacactttttccaggcccttctgtgggccactgcagccgttgcactggtccgattcattggcgcatgctggttcctgggccgaactggtatcatgtgcatgtgtgcccgacgataaatattcatgaaactatgcaggggctgctgtatgcagctggctgtggaccagtggctccaatttggcgctgtttgtccttcccaaaaagaacgcatttctaatatccctcagcttttcttcctacggtcttttgatcttttccattctgaacatgtagtctattgtagattgatgtctgtttgcctgcctgtggctcattttattgccttttttttcctgtgtcttgatttgactcccatgtcctgtctgtttgctaaatatatttgatttgtttcttgttgcttttcgtttacatccatgatcgtgatgatatcgatattcagttgtattccttggcgagcaaagtacgtaggataagaataggaacacaggaactatatttgagaagcaattcatgaggat

SEQ ID NO: 38 - DNA, 2877 bp, Trichophyton verrucosum
atggctcaatatccacaggatcagatgcagaatcctgctgccggctttggggtacccggacgcgttccttctccctatacccgcagcgagacctcttccaccgaagcctggcgccagagacaggctcctcaacaaggcaacctccgacgttatgccaccaggaaggttaagcttgtccagggctctgtcctcagtattgactacccggtgcccagcgcgatccagaacgccgtccaagccaagtaccgcaacgacctcgagggcggcagcgaagagtttacccatatgagatatactgctgctacctgtgatcccaacgagttcactcttcacaatggctacaacctgcgtccagccatgtacaaccgccataccgagctgctcattgccattacctactacaacgaagacaaggtgctcactgctcgtaccctccacggtgtcatgcagaatatcagagacatcgtcaacttgaagaagtccgagttctggaataagggtggcccggcctggcaaaagattgttgtggctcttatcttcgacggtattgatccctgtgacaaggacactctcgacctccttgcgactgttggtgtttaccaggatggtgtcatgaagaaagatgttgacggaaaggagaccgttgctcacattttcgagtataccacacagctctctgtgactgcgaaccagcaactcatccgcccccatgatgacagtccgtccaccctcccacctgtgcagatgatgttctgcctgaagcaaaagaacagcaagaagatcaactcccacagatggctctttaacgcttttggccgcatccttaaccctgaagtctgtatcctgctcgatgcaggcaccaagccagggtcaaaatccttgcttgccctttgggaggccttttacaacgacaaggatcttggtggatcttgtggtgagattcacgctatgttgggtaaaggatggaagaacctcctcaatcctcttgttgccgcgcagaacttcgagtataagatcagtaacattcttgataagccgctagagagttcgtttggctacgtcagtgtgttgcctggtgctttctctgcctaccgattccgcgccatcatgggaagaccgctagaacagtacttccacggcgaccacactctgtccaaacagctcggtcccaagggtattgagggcatgaacatcttcaagaagaacatgtttttggctgaagatcgtattctctgtttcgaacttgtcgccaaagctggatctaagtggcatcttacatacgtcaaatcctccaagggtgaaaccgacgttcccgaaggagctcctgaattcatcggtcagcgtcgtcgatggctcaatggttcgttcgccgccagtatctacgctctcatgcactttggcagaatgtacaagagtgggcataacattcttcgcatgttcttcttccacattcaaatgctgtacaacactttcactgtcttcatgacctggtttgctctcgcttcgtactggcttactacagccgtcatcatggacctcgttggtaaccctggcccatccaatggcaacagagctttcccatttggcaacaaggtgacccctatcctgaacactctgttgaaatacgcgtaccttggctttttgctcctacagttcattcttgctctcggcaacagacccaagggttccaaacactcgtacatcacctcgttcgttcttttcggtgtcatccaattgtatatcatcattttgtccatgtacctggttgctcgagccttctctggcggtacctccttgtcgttcgaaaccgatcatggccccgttgagttcttgaaatatttcttcggctcgtccggccccggtatcattgtcatcgctctcgccgctacctttggactctacttcatcgcctcgttcatgtactgcgatccatggcacatgttcacctctttcccggcttatctgcttatcatgtcctcatacatcaacattctcatggtctacgctttcagcaactggcacgatgtgtcctggggtaccaagggatctgacaaggccgatgccctaccatccgtacagaccgtgaaggaggacggaaaatcagcaacgattgaagaagtcgacaaaccccaggcagacattgacagtcaattcgaaagcaccgtcaagcgcgctctgaccccatatgtcgaacccaaggtggatgagaaaaagacgctcgaggattcgtacaagagtttccgtacccgtttggtctcatcctggctcttctccaatgctatcctcgctgttgccattacaagcgataaactgactgctcttggttttacatcacaagccactgaacgtaccagtcgattcttccagtctctcctgtgggcaactgcggcgctgtctcttattcgattcatcggagcatgctggttccttggcaaatccgtttcccttttctttcaattcttttctatattttctgctttttctttttttttttccttttttttttttttttacttcctatgtcttctcttttcctcggttacttctcctatctcctttcctgtttttgcccagcttatgccaaattctattctaatgcccattcctgacctggccggggacgtgtcttgtattttagatgaatattctctgttatttatgtacctgaccatttcttccccatgtttcaatcctcccttctcgcgtggccactctgttcgtctgcacccgtggctgtctatctatcctctggaggctcctcaatcggaagtatggtcttcgatatcctccgggttccatgaaaatatgccaaattgcatccttcccccatactatttatcgaagcgtctttcatatatatccatatatatatcttaa

SEQ ID NO: 39 - DNA, 3429 bp, Tuber borchii
actccacccctaagcccttattatttttccccttctccacccctctggttaccaaaatttctacctggctacataaacacttagaccctcccagctaaaaaagtgtccctttaactcatatatcggccagtcctcagccatactacctcacctgttctccacccaccgggagaggctaggagctagagaaaaaggttcaacgacacgcactcttagcaaacaaacaccaggcattaccgcattttacacgtcgaaacaatggcatatcagggtcctccgccagggggcttccagccagaacaccatgacctccaagagtacccaccagcagttcaggacgacataacagatcacgaacgagtcccgttaacgggtggaatacaggagggtccgggtccgttccgtggcccgtttgacgaaaattcctcccgaacatctacacccgacgcattccgccagagaagtacttccggaccctactattctgaaatggcatccccaaacccctctacacctacgctttcagccccgtcggcttcgggcgctagtaggccttccagtgtggtttctatggatgagtggagaagacgacaggctccacaggggctcaggagatatgctacaaggaaggtgaagttgcagcatgggcaggtactctctctcgattatccagtgccttcggctgtgcagaatgctatacaaacgaaatacaaagctccggatgatgatgctgccgcgaatgagtttactcacatgagatgtttgttttcccccgtcccaccctactttttcctttttttcccttttctcttctcttctctgctctacttttgttacggagactatagtggctagctccgagacagttactaatttgggtacctcacacagacactgcggcaacatgtgatcctgacgactttacgctcaagaacggatacgatttacggccacgcatgtataaccgacacacagagctgctgattgccatcacttactacaacgaagacaaagtgctcacagccagaactcttcacggagtgatgcaaaatgtccgtgacattgttaacctgaaaaaatcagagttttggtggaaggggggaccggcttggcagaaaattgttgtttgtttggttttcgatggtatcgatccctgcgacaagaacacccttgatgtcttggccacggtgggcgtgtttcaggatggtgttatgaagaaggatgttgatggcaaagaaaccactgcccatatcgtaagtttgtttttgttttgtttatcttcatggcgagtaggtcgcattgtaccgttacccgatgggtgtgtgtgcgttaatgcaagcctcccgcgttcacgtaaccgaggatggattgggttgtctgttttgtggtgtcttaccgggtttccggttcctctagtcagggacgacgggctgagaaggcataaggaaaaatgcactttctcctccccttcctataatccattaattttctcgtttggattttcttctggattgagtgagagtttctccggctaatttttttcttcggcggatagtttgaatatactactcagttgtcagtgacttcccaccaacatcttgtcaggcctaccgacgatatggataactccgctttcccaccggtacaggtgatgttctgtcttaagcaacggaattccaaaaagatcaactcccatcgatggctgtttaatgcctttggaaggatcctaaatccggaagtttgcgtgcttattgacgccggtaccaaacccggtcctaagagtatccttgctctttgggaagccttctacaacgacaagaacctcggtggggcctgcggtgagattcacgccatgttgggtaaaaatgggcgaaacctcctcaacccccttgttgcggcacagaatttcgagtacaagatttcaaacattctggataaaccgctggagtcggcatttggctatgtcagtgtgttgcccggtgctttctcggcgtaccggttccgtgccatcatgggccgtccgttggagcagtactttcatggcgatcacacgctttcttctcgcttcgggaaaaagggtattgatgggatgaatattttcaagaagaacatgttcttggctgaggatcgtatcctttgcttcgagcttgttgctaaggcgggttcaaagtggcatttgacatatgttcggacgtcaaagggagagacggacgtgccagaaggagctgcggagttcatttctcagcgtcgtagatggctgaacggttccttcgctgctggtatctactcgctcatgcactttggtcgtatgtactccagctcgcacagcatcattcgtatgttctttttccacgtccaattggtctataacgtcttttcaacctttatgagttggttctcaatcgcttctttttggctcacaacatctgttatcatggaccttgtcggtgatccgagtgatgaggataagaaaaggggaaaacacgcttggccgtttggggatactgttacaccgatctttaacaacatgttaaagtatatttatcttgcgttcctgcttttgcagtttatcctcgccttgggtaatcggccgaagggatcccgtcacacctatcttttgtctttttacgtgttctccgtccttcagttttatgttctcctgctcgctttctaccttgttgtccgcgcctttacaaacccggagtcctggtcggatttgaaggcgaacacagtaggggagtttatcaagcagttctttacttcgaataccggtcttattattcttgccctggcttctacttatggtatttacattattgcttcgataatgtatctcgatccctggcacatggtacacagtttcttccagtacatcttgatggcctcgtcgtacaccaacattctcaatgtctatgctttttgcaattggcatgacgtttcttggggtaccaagggatctgataaagctgaggcgctgccctcagcgaagactaaggttgagggcaaatcgaaggttatcgatgagccggagaaaccgcaagcagatatcgatttagcgttcgaggagactgtgaaacgtgctctctcacccttcgtcgtcacagaggaggttgagaagaagtctctcgatgattcatacaagagtttcagaacccgattgatcactttttggatcttcagtaattgcacagtagttattctgtttacttcagcgaactttgactggttcggtgttgacgtaagctcaccacgaattcttatttcatgcaattttgacactaatatttatatcaatagtctacaaaacgaacagcatggttcttccgattcgtgctcctcgccactgccgccttgtccttctttaggtttgttggctgtgtctggttcttgggtcgtgcttctatcctttgctgtttcgctaggcgttga

SEQ ID NO: 40 - DNA, 2637 bp, Tuber melanosporum
atgtcatatcaaggcgggaatgcccaaccagggcacggtgatgaccatacccagcaataccctccctccacataccatatgccccctcctagagactacgactccgacgacgaagaacgagtcccccttaacacccagcaacaaccaggtggaccctttcaagcaccattcgacgacccgatgagccgctcaaccacccccggtggttctcaacgccccaacactgggtattctctttcagagagctatgctggagcaccaggagctggtacatacgatagtggaccaggttatcctaccggaaacgatccgggtcctccatacggagctcctcgcgtggctagcccttactctaggtctgatagttcttctaccgaagcctggcggcaaagacaagccccctccgggatgcggcgttatgccacaagaaaaatcaaacttcagcagggccaagttttggccattgactatccggtgccctccgcaattcaaaatgcaatccaatccaagtatcgggcacccgatgtcgagggcggtagtgaggagtttactcatatgagatacactgctgccacctgtgaccctgatgactttacgctccgaaacgggtacaacctgcggccggccatgtacaaccgacataccgagttgcttattgctatcacctactacaacgaagacaaacaattgactgcgcgtacacttcatggtgtcatgcaaaacgttcgtgacattgtaaaccttaaaaaatcagagttctggaacaaaggtgggcctgcctggcagaagattgttgtttgtctcgtcttcgatggtatcgacccgtgcgacaaagacactctcgatgtcctcgcaaccgttggcatctttcaggacggtgtcatgaagagggatgttgacggtaaagaaactaccgcacatattttcgaatacactacccaattatccgtaacagcttcacaacagttgattcgtcctcgtgatgatgacccatcgtgtctcccgcctgtgcagatgatgttctgcctaaagcagaagaattccaagaaaatcaattctcatagatggttgttcaatgcctttggccggctattgaacccggaggtttgtgtactgctggacgctggtaccaagccaggtgccaagagtattttggctctgtgggaggctttctacaatgacaaggacttgggcggtgcttgcggtgaaatccacgccatgttgggtaagggaggaaagaacttgttaaatccacttgtggctacccagaatttcgagtacaagatctcgaacattcttgacaaacctttggaagctgctttcggatacgtctctgtgttgcctggcgctttctcggcttaccgtttccgtgccattatgggccgtcccttggagcaatatttccatggtgatcacactctatccgctcgccttggaaagaagggtattgagggcatgaacattttcaagaagaacatgttcttggccgaggatcgtattttgtgtttcgagttggttgccaaagctgggtccaaatggcatttgacctacgtcaagacctcgaaagccgaaactgatgtgccggaaggtgcacctgagtttatctcccaacgtcgtcgttggttgaacggttctttcgctgccagtatttactccttgatgcatttcgggagaatgtactccagtacttgcttacaacgtcttctctgtaatcatgtcatggttcggtttggccaatttttggctcaccactaccgaactcgcatctttaacactatcttgaaatatctttatcttggctttctcctgctccaattcatcttggccttgggtaacagaccaaaaggttcacgttacacttatctcgtctccttcgttgtcttcggcttggtccaattctacatcatcattctctcgttctacctcgtcatccaggcgttctcgaactctgaaggttgggacgaactcaagtctgatagtctaagcggctttatcaagaacttcttcactgccaattctggtgtcattatcatcgctcttgcggcaacctttggtctttacttcgtggcctccatcatctatctcgacccttggcacatgattcacagtttccctcaatacttgctcactgtgtcctcatacatcaacatcctcaacgtttacgctttcagtaattggcacgacgtttcctggggtaccaagggttccgacaaggctgacgtgctgccatctgcaaagacgcaagttgctgaggatggtaaagcaaaggtcattgacgaacccgataagccgcaagcggatattgatcaagctttcgagacaaccgttaagcgtgctctaacaccttttgttcctgtgattgaagatgaaaagaagacgcttgatgattcttacaagtctttcagaaccaagctcgtcagttcctggattttcatgaatgctggtctcgctgttattatcacctcggacagttttgattcttttggcttctcgaaacaaaacgctgctgccaccagaactgccaactacttcaagggtttgctgtgggctaccgctgcgttgagttttgttcgattcataggatgttgttacttccttggaagagcgtccattctctgctgcttcgcgaggcgttaa

SEQ ID NO: 41 - DNA, 2715 bp, Uncinocarpus reesii
atggcctatcaaggcggcgccaactcgccaggaggctatggcgaccatcgtctgcaagacttgccgtcgaacggaagtcaatatcacctgccgcaggacgatgatgcttcacgctctctgctccatcagaatcaagggccctttagtggcccctttgacgatccccatcaccgcaacacctctccagccagacccgcctcccgctatagcttgaccgagtcctatgccaccgattctcagaacatgaaccagtacaataaccccatgtacggccagcacatggagaatcccgccgccggcttcggggttcccagtcgagtgccctcgccctacagccggagcgaaacctcctccacagaggcctggcgccagagacaggctccccaaggaaaccttcgtcgctatgctaccaggaaagttaagcttgtccagggctccgttctgagcgtcgactaccccgtccccagtgccattcagaatgccgtccaggcaaaataccgaaacgacctcgagggagggagcgaggaattcacccacatgagatacaccgcggcgacctgcgaccccaacgagttcactctacataacggctacaatctccgccctgccatgtacaaccgtcataccgaactcctgattgccatcacgtactacaatgaagacaagatgttgacctcccgcactctccatggagtcatgcaaaacatccgcgacatcgtcaatatcaaaaagtctgaattctggaacaaaggcggtcccgcttggcaaaagattgttgtcgctctcatcttcgatggaatcgacccttgtgacaaagacgtcttggacgttttggcaactattggtgtctatcaggacggcgtcatgaaacgagacgtggacggcaaggaaaccgtggcccatattttcgaatatactactcaactatctgtcaccgcgaaccaacaactcatccggcctcacgatgacggcccgtcaacgctcccacccgtccagatgatgttctgtttgaagcagaagaacagcaagaagatcaactctcacaggtggcttttcaatgcattcggcaggatcctcaaccccgaaatttgcattcttttggatgcaggtaccaaaccaggacccaaatccctgctcgcgctctgggaggccttttacaacgacaaagacctaggtggatcctgcggtgaaattcacgctatgttggggaaaggatggaagaaattgatcaacccccttgtcgctgcccagaactttgagtacaaaatcagtaacatcctcgataaacccttggagagttcttttggctatgttagtgtgctgcccggtgctttctccgcctatcggttccgagctatcatgggccgtcctcttgaacagtatttccacggtgatcacacgttatcgaagcagctcggtcccaagggtattgaaggcatgaacatcttcaagaaaaacatgttcttggccgaggatcgtattctttgcttcgaactcgtggccaaagccgggtccaaatggcatttgacctatgtcaaagcatcaaagggtgaaaccgacgttcccgagggcgctccagagtttatttcccagcgccgacgttggcttaacggttctttcgctgccagtatttactcgctcatgcatttcggcagaatgtacaagagcgggcataatatccttcgcatgttctttttccatatccagatgctttacaacacatttacggtttttctaacttggtttgcgctcgcttcttactggctcacgacttccgtcattatggatcttgttggcaaccctactcaggagggtcaaagagctttcccattcggaaacaaagccacccctatcgtcaacaccgtgttgaagtatctatacctcggttttctgctgctacaattcatcctcgctctcggtaacaggccaaaggggtctaaacactcgtatatcacgtcatttattctcttcggcctcgttcagttgtacattgtaattctatcgatgtacctggtcgtacgcgccttttcaggtgacgtagacttcgtcgttgataaaggcgtgggcgagtttttgaaatcttttttcagctctgatggtgctggtatcattatcatcgccctcgcggcaacattcggtctctatttcgtcgcctctttcatgtacatggacccatggcacatgttcacctccttcccggcctatctgctgattatgtcttcatatatcaatattctcatggtctatgcattcagcaactggcatgacgtttcatggggtaccaagggatcagacaaggcagatgcattgccctctgcacagaccaagaaggaagatggcggcaaggccgcggtcattgaggagatcgataaaccacaggcggatattgatagccagtttgaggcaaccgtgaagcgcgctctcactccatacattgaacccaaagttgacgagaagaagtccctggaggattcctacaagagtttccgtacccggttggtttcttcatggatattttccaacgctttgcttgctgttgccattaccagcgacaatgtgaacaagttcgggttttcgtcacaagcgacaaagcgaacagctcgtttcttccaagctcttttgtgggccaccgcttttcttgctttaattcgcttcatcggcgcttgttggttcctgggcaagtccggcatcatgtgctgtttcgccagacgatag

SEQ ID NO: 42 - DNA, 2923 bp, Verticillium albo-atrum
atggcttaccgcggcggcgggcctaacgactacgaaggtcacgatttgcaggaccttccacccgggagcggcaacggcagcagggacgaaggcgttgatgatgttggccaatccctcctccgcgaccctcatgcccgcggcacttccccctacgaacaccatctcggtgcccaagaaccaccagcccgtccggtctcggcctacagcttgacagaatcgtacgctccaggtgctggctcgcgaactcctgcccctccccccgacaattttggcgttggcacgggctacagccaagagcttgacccccagaacggtggcttcggctatggccggcccgcctcgaccgttgatacggacgagagctgggtccgccgtcagcagcctggtgcccagaccggcggtctcaagcgctacgcaaccaggaagatcaagcttcagcagggttccgtcctcagcattgactatcctgttcccagtgctatcaagaatgccgtgcagccaaaatatcgcgatgtcgagggcggcagcgaggagttcatgaagatgcgctacactgccgcgacctgtgatcctaacgacttcacgctgaagaacggttacgatctgcggccccgcatgtacaaccgacacaccgaggtcctcatcgctatcacgtactacaatgaagacaaaaacctgctgtctagaacgctgcatggtgtgatgcagaacattcgagacattgtcaacctgaaaaagtcaacattctggaacaagggtggccctgcctggcagaagattgtcgtctgtcttgttttcgacggtatcgagaaggctgacaagaatgttctcgacgtgctcgccacggtcggtatctaccaagacggagtcgtcaagaaggacgttgacggcaaggagaccatcgcgcatatctttgagtacaccagtcagctctcggttactccgaaccagcaactcatccgccccgtcgacgatggcccttcgactcttcccccggtccagttcatcttctgtctcaagggcaagaacagcaagaagatcaactcgcacagatggctcttcaatgcctttggtcgcatcctgaaccctgagatctgcatcctgctcgatgccggtactaaacccagtccgcgttcgcttctcgcgctgtgggagggattctacaacgacaaagatcttggcggtgcctgtggtgagattcacgccatgttgggcaagggtggcaagaagctgctgaaccctctggttgccgtccagaattttgagtacaagatttccaacattctggacaagcctcttgagagctctttcggctacgtttctgtcttgcctggtgcgttctctgcctatcgtttccgagccattatgggtcggcccttggagcagtatttccacggcgatcacactctgtccaagattcttggaaagaagggcatcgacggcatgaacattttcaagaagaacatgttcttggctgaggatcgaattctctgcttcgagctcgtcgccaaggcaggccagaaatggcatttgagctacatcaaggctgccaagggcgagaccgacgttcccgagggcgccgctgaattcatcagccagcgtcgtcgttggctcaacggttcattcgccgcctctctttactccctgatgcactttgggcgtatgtacaagagcggccacaacctcatccgcatgttctttttccacatccagctcatctacaacatcctgaacgtaatcttcacctggttcagtttggcctcgtattacctgaccacgtctatcatcatgaaccttgtcggcacaccgacggaggcgtctacagactcagcggcacacactgcctggcccttcggcgacagcgcaacgcccatcatcaactctattctccaatatctttacctggctttcctcgtcatccagtttgttctggctctgggtaaccgtcccaagggttccaagtttacctacattgcatcattcgttgtcttcggcttcatccagacctacatcctggtgctttcgggataccttgttgccagagccttcaacactcctattggcgatcaaatcagtctcgagtccggtaaggcttttgtcgacagtttcttcggaggcgacaacgcggctggtgttattcttgtcgcccttgtcacgatttacggcctcaactttattgcctcgttcatgtacctcgacccctggcacatgttccactcgttcccctactacctggttctgatgtcgacgtacatcaacattctcatggtgtacgcattcaacaactggcatgacgtgtcttggggtaccaagggatcagacaaggccgaggctctgccttctgctcacatcagcaagggtgagaagggcgaggaggcagttgttgaggaaatcgacaagccgcaggaggatatcgacagccaatttgagcagactgtgcgccgtgcccttgagcctttcaaggaggtcgaggaggtcgaaaagcgggatgtcgaggactcttacaagtctttccgtaccggtttggtcgtttcttggctcttctccaacgcggctctcattgtcttcatcactactgacgactttaacgcttttggtttctccaacgaccccaatggacgttccgcggccttcttctcctttctgctgtactccacggctgtgctggcgctggttcgtttcaccggtttcctctggttcttgggcaagaccggcatcatgtgctgcattgccaggcggtaagctgggtcttactcgccaaagcacaagcacaggctcgcctttgtggcagctctgtaccttacgattatggattctcaaggaaagtttgtacaagctgtgtggttcactagaaggactcggcggcgttttttgtgttgtaccaaagtggttttacagtaataaggcacaaaactattcccaa

SEQ ID NO: 43 - DNA, 8355 bp, Unknown
  Unclassified
  misc_feature (46)..(46): n is a, c, g, or t
  misc_feature (50)..(50): n is a, c, g, or t
  misc_feature (73)..(73): n is a, c, g, or t
  misc_feature (97)..(97): n is a, c, g, or t
  misc_feature (108)..(108): n is a, c, g, or t
  misc_feature (205)..(205): n is a, c, g, or t
  misc_feature (215)..(215): n is a, c, g, or t
  misc_feature (236)..(236): n is a, c, g, or t
  misc_feature (254)..(254): n is a, c, g, or t
tgcttttttgaaggttcctacccttagcccaaagtccggctttccncttnttttctttttttctttttggacnaggaccatggatcccccccccatncatcgggtccngagagaagatggtccaaatattcttaaactatcttgatcccttgtaacccaatgtccccaatcggcttcccaaaattggccaacaattccaatttcnaccccccacnagcgggagtaatggagcaacnatgcaaacccgaaccccnatgcaacggttccccaaaaagccacccctctgaacagtgattgacaaatcggtgcaaggcattgctcacggggtactcacctgaacaatcgacacggcataaatgttggtggatggcaagacaattaattcatcttcattgagctttatttgtttattcccagccattcacaaaaaccaaaagtccaaaattccaaaaatcagggcttggttttgcctccccattttggccctgaataacgggaaggttagttacatagtaaaagtaaaaccgtgttgaacaaaagtttcgaggatcgcaaccagacaaattggaccaggatctcttgacttcccgtctttcggctaagaatagactttttttggggcaacgaaattctggtacaacttttgatttctggcgggtttcagatatgtggggacattatcgggaatgataaatttttttttttttttttttggactgctctcaaactcatgtgataatatcacagacaataggtatcgcaagcgagcatcttgacttgactgctgagaagtgatcttgtcgctgcaattggtggaggcgactaacagacgaacagcctcgcaggatgcatgcatgaatacagcaagtcgctgcagaggtcatcacattatgatgtcctccacgcccgttttccttccttcagatacacccatccatccatatgcatatacatatacatatacatatgtgtcgtgatgtgacggtgccgcgcgcagtatgaatgattcgctgcctctaagtatgggacaagtaagtatgtactgtacatatacgtatgtctgtctgtctgtctgtctgtctgtctgtatgcagtccaactgtggacaaagccctcgcggcaacgttcaaagcggcgagacaagagaagaaggtgaaattaaactgagtagatggcagaatcgccgccatgtctccctttccttccggctagaggaggcagaggaaaggctgattgagcgagtggggggagcattatttatccaccctgagctgggctgggcctgggcggagagtaccattgagtagagttgtgaactgtcggtctatgctcgatggaagcaacgtacctggcttacctggctcacctggttggaaatccaaacggcgagtatatatccatatcccagatatgtgcgcatgttgaatggtggcgattaatcggatgtccatgtcattctcctttctcggcaaaatatatatctacctacttgtatggtaatgtgtatcccacccttaccaaacgcggctgaacaaagaaagttacggtaaatttcacgctagtacccagccagaagctgggtacggctcctgtgctctgtacagtccggccataccataccataccataccgtaccataccgtaccatatcacgttcatccacccgtttgcccccaagagaaatatcatcatcgccttttcgggcctgtagcttactttcttttttcctatttttttcttttctatttctatttctatttctatttctatttcgctgcttattattctcgcctgttggtcttgtccagcaagcctgggaatatcaagcgctcgtctgtggtttgtttttatccgttgccctgctttgtgtcccgctgcccccttagctccctgtggcttcgctgcccctaaaaaaacaatcatcttcttcttccgctgctctgttctcgctcgtctctcttctctcttctcttttctctgcctctcttcctcctctcgatccatccatctattctcccctctatccttctatccgcttcatcaacccagcctctcgttttgacggcggccacagctccctcatcatggcctatccaggctcgaactctccaggggggtacggcgatggccatcgactccatgacctcccatctggcagcgtgagaaaacactctttcctatgtatatgcatatgatatagatatagatataggtatacatttatatacatatataagagagcgtgtgtgtctgtgtgtgtgtctgttttgtgtgtgtgtatctgtctgtatatatatacacatcgatatatatatgcttttggctacgtattcaagcactggttccccctggtcgcgggccacggtaccagtggtttcaggatgatatcctctcaacacaggaaccaccccttgctaacttgccccttaaatcgctccagcaatataatcttcccgccgaacacgatgcctcccaatcgctcctccaccaaaaccaaggcccattcagcggcccctttgatgacccccaacaccaccaccgcggtggctctcctgtccgatccccctccagatacagcctgacagaatcctacgtaaccgaccatccccaagctcaagaccactacggcggccaaatggaaaatcccgccgctggctttggtgttcccggtcgggttccgtccccctatacccgcagtgagacctcctccacggaggcctggcgtcagcgacaggcgcccggcaatctgcgccgttatgccaccaggaaagtcaaacttgtccaaggctctgttctcagtgtcgattatcccgttcccagtgctattcagaatgccgtgcaggctaaataccgcaatgatctcgaaggtggtagtgaggaattcactcatatgcgatgtaggtttttgtccttgatttctttttctttttactcccctctgctttggtttatggtcgtctccttgctgatttgctgctgccatcttagacaccgccgctacctgtgatcccaacgagttcactctgcacaatgggtacaatctgcgcccggcgatgtataaccgtcataccgaactgctgattgctattacctattacaatgaagacaaaatgcttacttcgcgcaccctgcacggcgtaatgcaaaatatccgtgacattgtgaacctcaagaagtccgagttctggaacaaaggtggacctgcttggcagaaaatcgttgtctgtctggtcttcgatggaatcgacccttgcgacaaagacaccctcgacgtgctggccacaattggaatctaccaggatggcgtgatgaaaaaagatgtcgatggaaaggaaaccatcgcccacattgtcagtacatatatgatacccgtagcccaattttttgcaccttctactactgctacactgtactaacttcccgtctagtttgaatacaccacccaactctcagtcaccgcaaatcagcaactgatccgaccgcacgatgatggcccatcgacgcttccccctgtgcagatgatgttctgcttgaaacaaaagaacagtaagaaaatcaactctcacagatggctgttcaatgcctttggccgaatcctcaacccggaaatctgcatcttgctcgacgcgggtacgaagccgggtcataaatccctcctggcactgtgggaagccttctataacgacaaagatctgggcggctcgtgcggcgaaatccacgctatgttgggcaaaggctggaaaaacctcatcaaccctcttgttgcagcgcaaaacttcgaatacaaaatcagtaacatcctggataaacctctggaatcctccttcggctacgtcagcgtgttgcccggtgccttctctgcctaccgcttccgtgcaatcatgggcagacctctcgaacagtacttccacggtgaccatacactctccaaacaactcggtcccaagggtatcgagggcatgaacattttcaagaagaacatgttcttggccgaggatcggattctgtgtttcgaactcgtggccaaggccgggtccaaatggcatctgtcctacgtcaagtcgtccaagggcgagactgacgtgcccgagggagcccccgaattcatcggccagcgtcgtcggtggctcaacggctcgttcgcagctagtatctactcattgatgcattttggccgaatgtataagagcggccataaccttctgcgcatgttctttttccatattcagatgatctacaatacgtgcaccgttatcatgacttggtttgcgcttggtatgtgttgttcaacaatataagtctttgttcctccgaacaatgacatccctctttcaacttccactttcttcttgcgtctattgtctcccaacactaacatgttctagcttcatactggctcacaacttccgtcatcatggacctcgtcggaaaccctcccgctccagaatctggcagcacgcagagggcattcccattcggcaataccgccactccgattgtcaacactgttctgaagtacttgtatctggccttcctgctcttgcagtttattttggctttgggtaaccggcctaaagggtgagtttgcataatctcctagtcaactaaggggagcttcagaaatatccaattcgtggcattgttattttcattgcccttctccccggcgagattcccggcgctgagctccgatatatgcgttagatgatactgatagcgcccctcagatctaaacactcgtacatcacctccttcgtcgtattcggcattatccaattgtacatcattgtcttatccatgtacctcgtcgtccgcgccttcagcggtggcacactcgccttcacaacagacaaaggtatcggcgaattcctcaagtccttcttcagttccgaaggaccgggaatcatcatcatcgccctcgccgctaccttcggcctctatttcgtcgcctctttcatgtaccttgacccctggcacatgttcacctccttcccggcctacctcctgatcatgtcctcgtacatcaacatcctgatggtctacgccttcagcaactggcacgatgtgtcgtggggcacaaagggtgcggacaaagccgacgctctgccctctgcccaaacgcaaaaggaagacgacggcaaagctgctgtgatcgaggagatcgacaagccgcaggcggatatcgacagccagtttgaaagcactgtgaagcgtgcgctgacgccgtacgtggagccaaaggtgaaggaggggaagtcgctagatgattcgtataagagtttccgcacgcggttggtgacgctatggctgttttcgaatggcattcttgccgtggccattaccagcgaggatgtgaacaagtttggattcacggtaggccttactttccttttttcccccttcctctttttttttttttctttcgccttttggggaaaaaaaaaaataaaaaaataaaaacactttgctaacgtgttcctcccacaatccagtcccgagcaaccagccgaaccacgcatttcttccacgctctcctttgggcgaccgcagcgctctccctcatccgcttcaccggcgcatgctggttccttggccggactggaattatgtgctgcttcgcgagaagatagtcagtccatttggctctggattttctatatattttgtttggtgatgcaaaaatcttttgcttccctttttccttttctctttcgggtgacctttttgttgcgggcgacggcacgaaacccggaataatataagacaaggatgggggagaagagagcatgaagatcgaagatcgaaagtcgaaagtcgaaaattgaaaggagaagaaaggaaatgacaagaaactggcagctgccgcttggccaactgttggaaagtttttcttttgcatttctatgaatatgtcccgattttgtttttcttttcccattgcttgttgttcttttcgcttttttcgattcctttcctataataatggcaagatgtgtcctatttcctcctgcctggcctctcttttgtgtgtttctatatgcgtgagagcctctgaattccgaatctaatgttctgtttgttgtcttatttctctgatcgtccccgccccctggtgtttttgttgctgctgttcttgctgttactgctttttctgtttctgggtttttcccttgttgtgtaaatttactatatcctacctagatgactttttttttttttattttctttttcgctctccgcctcttctgcaaatgatgtagctaattggctgatatgattggaatgaattgaaggcatttacttttcgaatccatttattgacggctgtagcctgtagcctgtagccttgtactgcgtatgtacatgtatattatggagttcacccgccaaaccacagctcgggccgttgggcaatcagccgtgtcacgtgcactcggctcccctgcccgatgcatcagcgtcattcctcatcctatccccgtcttggaatcctcccaggcctcactccccatccgccaacctttgcacaacgccgttactctgcactctgactgcttgtccgtcggcccgcccgtcagccctcgttccgctccctttcggcccctttttgttttgcccccttcacggtcccaaaagaaatcttatcttatcacggcacaccaacaccactgtctgtgtactgtacatgtacatacacacacccagcccccgcctcgcatctcaacgacagcataaacaaccccaagcccagttccacttggcttctcttccccgtagtttgtgtcccgctctatctccctcgggcctccgtgcttggaccataaaccgtcggcctgcctgcggagactctccgtcgatcgaaagcctcgcccgctccccgccctcttcttccccctcccctcctctgcacctcgatttacctggtacggaccttcctgccgtcttcctgtcttcgaatacagcttcctctttgtctcccgtccagaccaagtcaggaagagacacgacctggtactagttctgtgtggggtctcagttggactgggaagcttccggacttggtgacggttacacctttcttgcgtcttgggctctccttttttttttttttttttttttttttttgctttaaaaaatttttccttttggttcttttacgttcacggcgcaaagtaaaagttatcaggaggacaaaaaggaggttgctttgtgcgggaatgcaagagtaggaaggggaaattacaagaacagaagagacgagagaagagcgattctgggcataacaagcttggcacttgtcattatctggtacccttgcatatatttgcacatttgcacatatacgctttttatttcggtgattgaccgaggggcgttcctctttcacgatgttgaagatattgtctatggtaggtcaaactttattccgttgttgttaattaatggttatcagctcctccccttttctccgcctaatggcgcctcctatattttaatagagatgccgaatacacaggcaatcagctgactctgtgctgcagaaaaagaagcaacaagcggaggctgctgctgctgggcagaccaagaatagggtcggaggtgcgaaagcacggattcaacatggtacgttccgccagcatcgcttccctcttgtgataaaatgcgaaacacttctccaatggaatgggctaactgtcagcttcgtccttctcacctttcacagatcttctccgggtcgggaaacaggaggaggaggagagccgcacgggtgcacgccccattaaattcgagtggaagaatggcgatgatccgtttcattttagtgtggtgatcgaaccggacgaggggatgtacaagggtggctcgttcaagttcaattttgacattcccgaacacgactacccgtttgaaccgcccagagtaaaatgcacccagcggatataccacccgaacatcgacccgcaaggaaatgtgtgtctgaacatactgcgtgatgggtggacagccgcgttggatgtccaggccgttgcatttggcttactggtgcgttatcctctcagaagggagagaaaaggggaaaaaagaaagaaaaaaaaacctggtgcatagaactaacgccagcatgccaaaacgaaacagcacatattcatccacaccacgtacgaagaccccttaatccaagaagtcgctgacgaccttcggctgaaccgtgagggcttccgacgcaacgttcggacagccatgcagggggggacggtccggaatacacaatacgatcgtgtcttgaagagctgagatgggtcgaaggggaggtgatctactataccatggatgcagtggtagtggtggtggtgg

SEQ ID NO: 44 - DNA, 2251 bp, Unknown
  Unclassified
cgcaaatcagcaactgatccgaccgcacgatgatggcccatcgacgcttccccctgtgcagatgatgttctgcttgaaacaaaagaacagtaagaaaatcaactctcacagatggctgttcaatgcctttggccgaatcctcaacccggaaatctgcatcttgctcgacgcgggtacgaagccgggtcataaatccctcctggcactgtgggaagccttctataacgacaaagatctgggcggctcgtgcggcgaaatccacgctatgttgggcaaaggctggaaaaacctcatcaaccctcttgttgcagcgcaaaacttcgaatacaaaatcagtaacatcctggataaacctctggaatcctccttcggctacgtcagcgtgttgcccggtgccttctctgcctaccgcttccgtgcaatcatgggcagacctctcgaacagtacttccacggtgaccatacactctccaaacaactcggtcccaagggtatcgagggcatgaacattttcaagaagaacatgttcttggccgaggatcggattctgtgtttcgaactcgtggccaaggccgggtccaaatggcatctgtcctacgtcaagtcgtccaagggcgagactgacgtgcccgagggagcccccgaattcatcggccagcgtcgtcggtggctcaacggctcgttcgcagctagtatctactcattgatgcattttggccgaatgtataagagcggccataaccttctgcgcatgttctttttccatattcagatgatctacaatacgtgcaccgttatcatgacttggtttgcgcttgcttcatactggctcacaacttccgtcatcatggacctcgtcggaaaccctcccgctccagaatctggcagcacgcagagggcattcccattcggcaataccgccactccgattgtcaacactgttctgaagtacttgtatctggccttcctgctcttgcagtttattttggctttgggtaaccggcctaaaggatctaaacactcgtacatcacctccttcgtcgtattcggcattatccaattgtacatcattgtcttatccatgtacctcgtcgtccgcgccttcagcggtggcacactcgccttcacaacagacaaaagtatcggcgaattcctcaagtccttcttcagttccgaaggaccgggaatcatcatcatcgccctcgccgctaccttcggcctatatttcgtcgcttctttcatgtaccttgacccttggcacatgttcacctccttcccggcctacctcctgatcatgtcctcgtacatcaacatcctgatggtctacgccttcagcaactggcacgatgtgtcgtggggcacaaagggtgcggacaaagccgacgctctgccctctgcccaaacgcaaaaggaagacgacggcaaagctgctgtgatcgaggagatcgacaagccgcaggcggatatcgacagccagtttgaaagcactgtgaagcgtgcgctgacgccgtacgtggagccaaaggtgaaggaggggaagtcgctagatgattcgtataagagtttccgcacgcggttggtgacgctatggctgttttcgaatggcattcttgccgtggccattaccagcgaggatgtgaacaagtttggattcacgtcccgagcaaccagccgaaccacgcatttcttccaggctctcctttgggcgaccgcagcgctctccctcatccgcttcaccggcgcatgctggttccttggccggactggaattatgtgctgcttcgcgagaagatagtcagtccatttggctctggattttctatatattttgtttggtgatgcaaaaatcttttgcttccctttttccttttctctttcgggtgacctttttgttgcgggcgacggcacgaaacccggaataatataagacaaggatgggggagaagagagcatgaagatcgaagatcgaaagtcgaaagtcgaaaattgaaaggagaagaaaggaaatgacaagaaactggcagctgccgcttggccaactgttggaaagtttttcttttgcatttctatgaatatgtcccgattttgtttttcttttcccattgcttgttgttcttttcgcttttttcgattcctttcctataataatggcaagatgtgtcctatttcctcctgcctggcctctcttttgtgtgtttctatatgcgtgagagcctctgaattccgaatctaatgttctgtttgttgtctt

SEQ ID NO: 45 - DNA, 2751 bp, Aspergillus oryzae
atggcctaccaaccgcctggtaaagataatggtgctcagtcaccaaactacaacgatagcggtcatcgactggaagacctgccccatggcgccacttatgaagaagaagcttcaacaggactgctttcccaccaacagggcggtcctttcggtggtcctttcgacgaccctcatcagcgtggcacctcgcctgttcgacctacgtcgggatacagcttgactgaaacatacgctccggacgcgggttttcatgacccttacagcacgacgggctcggtttactccggcaactcggcagaaaaccccgcggctgcctttggcgtcccgggtcgtgtagcttctccctacgctcgcagtgaaacatcctccacagaagcatggcgccagcgccaggctccaggaggtggtggcggtggtggcctccgtcgttacgctaccagaaaggtcaagctagttcagggttccgtcctcagtgtcgattaccccgtccccagtgctatccagaatgccatccaagccaagtaccgtaatgacctggagggtggcagcgaggagtttacccacatgcgatacaccgctgcgacatgtgatcccaatgacttcaccctgcacaatggttacaatctgcgtcccgccatgtataacagacacaccgagttgttgattgcgattacctattataacgaagataagacccttaccgctcgtaccttgcacggtgtgatgcagaacattcgcgacattgtgaacctcaagaagtccgagttctggaacaaaggtggacccgcctggcagaaaattgttgtcgctctggtctttgacggtatcgatccttgtgataaggacactttggatgtcctcgccaccatcggtatctatcaggacggtgtcatgaagcgtgacgtcgacggcaaggagaccgtggctcatattttcgaatacacgacccaattgtccgtgacaccgaaccagcaactcatccggcccactgatgatggcccgaccaccttgcccccggtgcagatgatgttctgcttaaagcagaagaacagcaagaagatcaactcacacagatggctgttcaatgccttcggtcgtattttgaatccagaggtttgcatccttctggatgccggtactaagcctggccagaagtccctcctggcgttgtgggagggcttctataacgacaaggatctgggaggtgcttgtggtgaaattcacgcaatgttgggtaaaggctggaagaatctgatcaaccccctcgtcgcggcccagaacttcgagtacaagatcagtaatatcctcgataaacccttggagagttctttcggttatgtcagtgtgttgcctggtgctttctccgcctatcgtttccgtgccatcatgggtcgacccctcgaacaatatttccatggtgatcacactctctcaaaacagctgggtaagaagggtattgagggcatgaacatcttcaagaagaacatgttcttggccgaagatcgtatcctttgtttcgaactggtcgccaaggctggctccaaatggcacttgtcctacatcaaagcctcgaagggtgaaactgacgtgccggaaggtgttgctgaattcatttcccagcgtcgtcgttggttgaacggttcttttgcggccggtctctattcgctcatgcatttcggtcggatgtacaagagtggacataacatcatccgtatgttcttcttgcacattcagatgttgtacaacgttttcaacactatccttacatggttctccctggcatcttactggttgaccaccaccgtcatcatggacttggtcggaacgcccagtgagagcaacggtaacaaaggattccccttcggtaaatcggcgacccctattatcaacacaattgtgaagtatgtctacctcggattgttgctcttgcagttcattctcgctctcggtaaccgccccaagggatcccgcttctcgtacctgacatctttcgtcgtattcggtatcattcaaatctacgttgtcgtcgacgctctgtacttggtggttcgtgcattcacaaacagtgatgcgatagatttcgtcaccgatcaaggtgttggcgagttcctcaagtcgttcttctcgtcttccggcgccggtatcattatcatcgccctggctgctactttcggtctctacttcgtcgcttcgttcatgtacctggacccttggcatatgttcacctcgttccccgcctacatgttcgttcagtcatcttacatcaacgttctcaacgtgtacgcgttcagcaactggcacgatgtctcgtggggtaccaagggttctgataaggccgatgcgctcccttctgcaacgactacgaaggaggatggcggcaaggaagctgtcattgaggaaatcgacaagccccaggctgatattgacagccaatttgaagccactgtcaagcgcgctctcaccccctacgtcccccctgtggagaaggatgagaagtccttggatgattcctacaagagtttccgtacccgtcttgtgacgttgtggatcttcagtaatgccttcttggctgtatgcattaccagtgacggtatggacaagtttggattcacgaacaccgctaccgaccgtacgtcgcgtttcttccaggctctcctgtggtccaacgctgctgtcgcacttgtccgtttcattggtgcctgttggttcctgggtaagacgggtctcatgtgctgcttcgctcgtcggtag

SEQ ID NO: 46 - DNA, 2744 bp, Unknown
  Unclassified
cagggcgaccagcacgacgatgcgcaagctcccttcctctccgaaaaccctatgccttacgacaacgaccgcttgggcaccgatacgcctccagtccgccctgtctcggcgtatagcttgaccgaatcctatgctcctggtgctggcacgacgcgagctggtgtcgctgtcaaccctaccccgccacctcacgggggttatggcggcggcggcgttagcagtggtgtcgatcagggctacaactacggtggtgactatgcgacggatccggcctacaggatgtccgccatcgatgaggacgatagctggctccgtcgtcagcagcccaacgctgctcccaccggcggcctgaagcgttatgccaccagaaaggtcaagcttgtccagggttccgttttgagtcttgactatcccgttcctagtgctattaggaacgctgttcagcccaagtaccgcgatgaggagggcaacaacgaggagttcttcaagatgcgttacactgccgccacttgcgatcccaacgactttacgctcaagaacggttacgatttgcgccctcgcatgtacaacagacataccgagcttctcatcgccattacgtactacaacgaagacaaggtcctgctctccagaacgctgcactccgtcatgaccaacatccgcgatatcgtaaacctgaagaagtcttcgttctggaaccgcggaggaccggcgtggcagaagattgtcgtttgcttggttttcgacggtcttgataagacagacaagaatgttctcgacgttctggccaccatcggtgtttatcaggatggtgtcatcaagaaggacgttgacggcaaggagactgttgcacacattttcgagtacacaagtcagctttccgtcacaccaaatcaggcgctcatccggcccgtggatgacggcccgcagacactgccccctgtgcagttcattttctgcctgaagcagaagaacaccaagaagatcaactcgcatcgttggctgttcaatgcctttggccgtatcctcaaccccgaagtatgcattctgttggatgccggtaccaagcccagccccaggtcgctgttggctctttgggagggtttctacaacgataaggatcttggcggtgcttgcggtgaaattcacgccatgttgggcaagggcggcaaaaagctgctcaaccccttggtcgccgtccagaacttcgagtacaagatttccaacattctcgacaagccgctggaaagtgcttttggttacgtttctgtgttgccaggtgccttctcggcctaccgtttcagagccatcatgggccggccgctggagcaatacttccacggtgatcacaccctgtccaagcttttgggcaagaagggtattgagggtatgaacattttcaagaagaacatgttcttggccgaagatcgtattctctgcttcgaactggtcgccaaggctggccagaaatggcatctgagctacatcaaggctgccaagggcgagaccgatgtgcccgaaggtgcgcccgagttcatctctcagcgtcgtcgttggctcaacggttcgttcgccgccagtttgtactcgctcatgcatttcggaagaatgtacaagagcggtcacaacatcgtccgcatgttcttcttccacgtccagctcatctacaatatcgcaaacgtcatcttcacatggttctctctcgcttcctactggctcaccaccactgtcatcatggatcttgttggtaccccggttacggcttctagctcttcggcagaacatcacggttggcccttcggtgacacggtaacgcccttcttcaacgcggttctcaagtatatctacctggcattcgttatcttgcagttcatccttgcattgggtaatcggccgaagggttccaagtggacatacattacctcgttcttcgtcttctcgctcattcagtcctatatcttggttttgtccggttatcttgttgcccgcgcgttctccgtaccgctcgaccaacaattacagctggacaacgctaaggacgcaatggcttcgttattcggcggctcaggatcagcaggtgtcattttggtggccttggttaccatctacggcctttacttcttggcctcctttatgtacctcgacccctggcacatgttccactcgttcccttactacatgctcctcatgtcgacctacatcaacatcctcatgatttacgccttcaacaactggcacgacgtctcgtggggtaccaagggttcggataaggccgaggcactgccgtccgccaacgtcagcaagggcgagaaggatgaggccgtggtggaagagattgagaagccacaggaggatatcgaccaacagttcgaggctactgtcaggcgcgctcttgctccgtacaaggaagacgagacgccggagcctaaggatctcgaggactcgtacaagtctttcagaaccatgcttgtcgtgtcttggctgttttccaactgcctcctcgcggttgttatcaccagtgataactttaacacatttggcatcggggtaagcattgctgttcaccttattgtgactttgaaccacttactaatatatattgatagcaaaccgcatccgcgagaactgcgtggttcttcaagttccttctgttcgctactggtgcgctctctgtcatccgctttattggcttctgttggttccttggcaggaccggtattatgtgctgctttgcccgtcgctaa

SEQ ID NO: 47 - DNA, 2736 bp, Aspergillus fumigatus
atggcctaccaaggctctggttctcattcgccgcctcactacgacgataacggtcaccgacttcaggatctgcctcatggttcgtacgaagaagaggcgtcgagaggattgctatcccaccagcagggtcccttcacagggccgtttgatgaccctcagcagcatggttcatctactaccagacccgtttctggatacagtttgagcgagacctatgcccccgaagccgcatatcatgatccctatactcaaccgagccctggctcggtctactcggctcaatctgcggagaatccggcggcggcttttggtgtccctggacgtgtcgcgtccccctatgctcgaagtgacacttcatccacagaggcatggcgccagagacaagctcctggaggcggccccggtgggttgcggcgttatgctacaagaaaggtcaagttggtgcagggttccgtcctgagtgtcgattatcctgttccgagcgcgatccagaatgctattcaggccaagtacagaaatgatctcgagggtggaagtgaggaatttacgcacatgcgatacaccgcggccacctgtgatcccaatgaatttacactgcacaatggttacaatcttcgacctgcgatgtacaacagacataccgaacttctcattgcgatcacctattataacgaagacaagacactcacttcacgtacactgcacggtgtcatgcagaacattcgcgacattgtgaatctgaaaaagtccgagttctggaacaagggtggtcctgcctggcagaagattgtggtctgcctggtttttgatggtatcgacccttgcgacaaggacactttggatgttcttgcgacaatcggtgtctaccaagacggcgtcatgaagcgtgacgtcgatggaaaagagactgtggctcacatttttgaatatacgactcaactgtctgtgactccgaatcagcagctgatccgccccaccgacgacggtcccagtacacttcttccgtccaagatgatgttctgtttgaagcagaagaacagcaagaagatcaactcccacagatggctcttcaatgcatttggtcgcattctcaaccccgaggtctgtattcttcttgacgccggtacaaagcctggcccgaagtcacttctgtcgctttgggaagccttctataacgataaagatttgggtggtgcttgcggtgagattcacgccatgttgggtaagggttggaagaacctgatcaacccgctcgttgccgctcagaacttcgaatataagattagtaacatcctggacaagcccttggagagttcatttggttatgtcagcgtcttgcctggtgccttctcagcttaccgattccgcgcaattatgggccgccctctcgagcagtatttccatggtgaccacactctttcaaagcaactgggcaagaagggtatcgagggaatgaacattttcaagaagaacatgttcttggccgaagatcgtattctttgttttgagttggttgctaaagctggttcaaaatggcacctgacctatgtcaaggcctccaaggctgaaaccgacgtgccagaaggcgctcccgaattcatttcgcagcgtcgtcgttggctgaacggttcgtttgctgccggtatttattcgctcatgcactttggtcggatgtacaagagtggacacaacattgtccgcatgttttttctgcacatccaaatgttgtacaatatcttctctacggttctgacatggttttccttggcttcttactggcttactaccaccgtcatcatggacttggtcggcacgccgagcgacaataacggtaacaaggctttcccgttcggcaagactgcaactcccattatcaataccatagtgaaatatgtctacttgggattcctactattgcaattcatcctcgcgctgggtaaccgtccaaaaggatcgaagttctcatacctcgcgtctttcgtggttttcggcatcattcaggtctacgtggttattgatgcactgtacctggtggtgcgtgccttcagtggaagtgctcctatggatttcactacggaccaaggcgttggcgagtttctgaaatcgttcttttcatccagcggcgccggtatcattatcattgctctcgctgctacattcggtctctactttgtggcatcttttatgtatcttgacccctggcacatgttcacgtccttccctgcctacatgtgtgtccaatcgtcatacatcaatattctgaacgtctacgctttcagcaattggcacgacgtctcgtggggtaccaagggttcagacaaggcagacgctctaccttccgccaagaccaccaaggatgagggcaaagaggttgtcatcgaggaaatcgacaagcctcaggctgatatcgacagtcagttcgaggcaacggtcaagcgtgccctaacaccctatgtgccaccagtcgagaaggaggaaaagactctggaagactcgtacaaaagcttccgaacgagactggtcacgttttggatctttagcaacgccttcttggccgtttgcatcaccagtgacggtgtggataaattcggcttcacgaattctgctaccgaccggacgcagcgtttcttccaggctttgctgtggtccaacgctgtcgttgccctgttccgtttcatcggagcctgctggttcctgggcaagacaggtttgatgtgctgctttgcccggcgttag

SEQ ID NO: 48 - DNA, 909 bp, Unknown
  Unclassified
tttgaatatacgactcaactgtctgtgactccgaatcagcagctgatccgccccaccgacgacggtcccagtacacttcctccggtccagatgatgttctgtttgaagcagaagaacagcaagaagatcaactcccacagatggctcttcaatgcatttggtcgcattctcaaccccgaggtctgtattcttcttgacgccggtacaaagcctggcccgaagtcacttctgtcgctttgggaagccttctataacgataaagatttgggtggtgcttgcggtgagattcacgccatgttgggtaagggttggaagaacctgatcaacccgctcgttgccgctcagaacttcgaatataagattagtaacatcctggacaagcccttggagagttcatttggttatgtcagcgtcttgcctggtgccttctcagcttaccgattccgcgcaattatgggccgccctctcgagcagtatttccatggtgaccacactctttcaaagcaactgggcaagaagggtatcgagggaatgaacattttcaagaagaacatgttcttggccgaagatcgtattctttgttttgagttggttgctaaagctggttcaaaatggcacctgacctatgtcaaggcctccaaggctgaaaccgacgtgccagaaggcgctcccgaattcatttcgcagcgtcgtcgttggctgaacggttcgtttgctgccggtatttattcgctcatgcactttggtcggatgtacaagagtggacacaacattgtccgcatgttttttctgcacatccaaatgttgtacaatatcttctctacggttctgacatggttttccttgggtaagttaatatttattctatcaaagcgcgttccacccccaactggaccaagttctgactga

SEQ ID NO: 49 - DNA, 2727 bp, Penicillium chrysogenum
atgtcttttcctcaccgaggaacatctcctcattcgcctcattcgggcaactcctctcattcaccccaggcgagcgaggccagcgggtatggtccacgagagtttgttcagcagcaagcgtacggctacgaggaaaaacccgagaacatcgacagccagcaatctttgctctaccgaaaccaaccaagcccattcaacgcctccttcgatgacccctatgcctcgaccgattccctccgtcgctacacactacatgatcccggagtcaccatctttcccgatggtccatatcaggagtctgcgggaggactcaatcgtcgctctggtattccatctattcaatcacctatgtccgaaacaccatcagaagcctggcagaaccgacaggcacctgggtcagggttgcggcgttatgctacgcgaaagattaagctggtccagggctctgtgctgagtgtcgactacccggtaccaagtgccattcagaacgccatccagaaggagtaccgggaatcagaggaggggttcccggaagaattcacacatctgcgctataccgcggctacctgtgatcctgatgagttcaccctacgcaacggatacaatctacgaccggccatgtacaaccgacacaccgaacttctgattgccatcacctattacaacgaagataaagttctgacggcacggacgctccacggtgtcatgcaaaacattcgggatatcgtcaatttgaagaagtcagaattctggaacaaaggtggcccggcctggcaaaagatcgtgtgctcgttggtttttgatggtattgatccttgcgataagaataccctcgatttgttggccacaatcggtatctaccaagatggcatcatgaagcgttccgtcgatggccgggaaaccgtcgcacacattttcgaatacaccacccaactctccgtcacctccaaccaacaactggtccgcccccagggcaacgagtcgtcaaaccttcctcctgttcaaatgattttctgtcttaaacagaagaacagtaagaagattaactcccaccgctggcttttcaacggtttcagtcgaatcctcaaccccgaagtcgtgattcttattgatgccggaactaagccgggaaagaaatcgctccttgcattgtgggagtccttctacaacgataagaacttgggtggatcttgcggcgagattcacgcaatgttaggaaaagggtggaagaacttgatgaaccccctcgtcgccgcacagaacttcgagtacaagatctccaacattcttgataaaccgctagagagtgccttcgggtatgttagcgtgttacccggtgccttctccgcgtaccgctatcgcgccattatgggtcgccccttagagcagtacttccacggtgatcatacactctcaaagcagttgggtaagaagggtattgagggcatgaatatctttaagaagaatatgttccttgctgaggaccgtatcttgtgtttcgagcttgtggccaaggctggattcaaatggcatctaacctacgtgaaggcgtcaaagggtgaaaccgatgtaccagaaggtgctgccgagtttatcagtcagcgacgtcgttggttgaacggttcgttcgccgccagtttatatgcaatgatgcatttcgggcggatttacaagagtggccataacatcctgcggctgtttttcctgcatatccagatgacatacaacttcatgggtcttgtcatgacctggttctctctcgcctcgttctggctgactactactgtcattatggatcttgtcggaactcctagtcaatctaactattataagggatggccttttggtaatgaagcctcgccgatcgtgaacaacttcctgaagtatgggtacatattcttcttgatgctgcagttcattctggcgctaggcaatcgaccgaaaggttcccgtctcgcatacacgctttcattcatctacttcagtatccttcagagttacatcattgttctgtcgttctaccttgtcaagaacgccttcactggaggtacacttgatttctctatggaccaaggtgttggccacttcctcaagtctttcttcagttcttccggggccggtatcgtcctgatcgctttggtttcgacttatggcatctacttcctcgcaagtttcttgtacatggatccctggcatatgttcacgtcctcctgggcctactttgctggcatgacctgttcgatcaatatcctgatggtctacgctttctgcaactggcatgacgtttcctggggtactaagggttctgacaagggcgattcgctccccgtcgctgagaccaagaaggatgacgccaagtcgaacttcattgaagaagtcgataagccgcaggccgatatcgatagtcagtttgaatcgacggtgaagagagcgctggagccatatgtggagcctgaagataatgatgaaccaagcatggacgatggctataaggctttccgtaccaacctggtgttgatttggattttcagcaacctgattcttgcactgtgtatcaccagtgaaggcgttaaacgtctctgtctcacaaacacctctaccgtccgtacttccaaatacttcgccgctattctgtggacgactgccggtctgtcgattttccgctttattggatccctttggttcttgggcaagtctggtatcttgtgctgcgtctctcgtcgttag

SEQ ID NO: 50 - DNA, 3109 bp, Penicillium chrysogenum
atgtcttttcctcaccgaggaacatctcctcattcgcctcattcgggcaactcctctcattcaccccaggcgagcgaggccagcgggtatggtccacgagaggtgagtgacaagccacccggaacggggaaatagaagggaccccagcaagacagcaacggatcctaacacagtttgttcagcagcaagcgtacggctacgaggaaaaacccgagaacatcgacagccagcaatctttgctctaccgaaaccaaccaagcccattcaacgcctccttcgatgacccctatgcctcgaccgattccctccgtcgctacacactacatgatcccggagtcaccatctttcccgatggtccatatcaggagtctgcgggaggactcaatcgtcgctctggtattccatctattcaatcacctatgtccgaaacaccatcagaagcctggcagaaccgacaggcacctgggtcagggttgcggcgttatgctacgcgaaagattaagctggtccagggctctgtgctgagtgtcgactacccggtaccaagtgccattcagaacgccatccagaaggagtaccgggaatcagaggaggggttcccggaagaattcacacatctgcgctgtagggcttcatgtgaaatattggcgatgcgactggggctaatcgaatgcagataccgcggctacctgtgatcctgatgagttcaccctacgcaacggatacaatctacgaccggccatgtacaaccgacacaccgaacttctgattgccatcacctattacaacgaagataaagttctgacggcacggacgctccacggtgtcatgcaaaacattcgggatatcgtcaatttgaagaagtcagaattctggaacaaaggtggcccggcctggcaaaagatcgtgtgctcgttggtttttgatggtattgatccttgcgataagaataccctcgatttgttggccacaatcggtatctaccaagatggcatcatgaagcgttccgtcgatggccgggaaaccgtcgcacacattgtgagttcccataatcctctcgattcgcctgggcggaatctactgtccctccatcctggtgtttttatagtccaccaaaatccactaacaagccctagttcgaatacaccacccaactctccgtcacctccaaccaacaactggtccgcccccagggcaacgagtcgtcaaaccttcctcctgttcaaatgattttctgtcttaaacagaagaacagtaagaagattaactcccaccgctggcttttcaacggtttcagtcgaatcctcaaccccgaagtcgtgattcttattgatgccggaactaagccgggaaagaaatcgctccttgcattgtgggagtccttctacaacgataagaacttgggtggatcttgcggcgagattcacgcaatgttaggaaaagggtggaagaacttgatgaaccccctcgtcgccgcacagaacttcgagtacaagatctccaacattcttgataaaccgctagagagtgccttcgggtatgttagcgtgttacccggtgccttctccgcgtaccgctatcgcgccattatgggtcgccccttagagcagtacttccacggtgatcatacactctcaaagcagttgggtaagaagggtattgagggcatgaatatctttaagaagaatatgttccttgctgaggaccgtatcttgtgtttcgagcttgtggccaaggctggattcaaatggcatctaacctacgtgaaggcgtcaaagggtgaaaccgatgtaccagaaggtgctgccgagtttatcagtcagcgacgtcgttggttgaacggttcgttcgccgccagtttatatgcaatgatgcatttcgggcggatttacaagagtggccataacatcctgcggctgtttttcctgcatatccagatgacatacaacttcatgggtcttgtcatgacctggttctctctcggtatgtcccgaatccaatgtttctttgtgactttatactaattcgttactacctagcctcgttctggctgactactactgtcattatggatcttgtcggaactcctagtcaatctaactattataagggatggccttttggtaatgaagcctcgccgatcgtgaacaacttcctgaagtatgggtacatattcttcttgatgctgcagttcattctggcgctaggcaatcgaccgaaagggtgagtcaagatccaaccgaatccccttatagtctcaatctgacatttcaaacagttcccgtctcgcatacacgctttcattcatctacttcagtatccttcagagttacatcattgttctgtcgttctaccttgtcaagaacgccttcactggaggtacacttgatttctctatggaccaaggtgttggccacttcctcaagtctttcttcagttcttccggggccggtatcgtcctgatcgctttggtttcgacttatggcatctacttcctcgcaagtttcttgtacatggatccctggcatatgttcacgtcctcctgggcctactttgctggcatgacctgttcgatcaatatcctgatggtctacgctttctgcaactggcatgacgtttcctggggtactaagggttctgacaagggcgattcgctccccgtcgctgagaccaagaaggatgacgccaagtcgaacttcattgaagaagtcgataagccgcaggccgatatcgatagtcagtttgaatcgacggtgaagagagcgctggagccatatgtggagcctgaagataatgatgaaccaagcatggacgatggctataaggctttccgtaccaacctggtgttgatttggattttcagcaacctgattcttgcactgtgtatcaccagtgaaggcgttaaacgtctctgtctcacagtatgtaccttgtctaagatatagggtggcacgaactaacatatgcacagaacacctctaccgtccgtacttccaaatacttcgccgctattctgtggacgactgccggtctgtcgattttccgctttattggatccctttggttcttgggcaagtctggtatcttgtgctgcgtctctcgtcgttag

SEQ ID NO: 51 - DNA, 1040 bp, Malassezia restricta
ggggatgcgatagagatcgtcggatccgtgtggtggaattaagatcgagtgaccgctgccgtaaaagcggtagaaatggacaagggcatacagcgaggcagcaaacgagccattcaaccagcggcggcgctgcgaaataagctcagcgggctgctccggcacatccgtctcagctttgctgggcttgatgtacgtcaatgtccagcgttccccacgcttggcgacgagctcgaagcacagaatgcggtcctcggccaaaaacatatttttctggaaaatgttcatctcgcccgcgccgcgccgttgcgcgagggtatgatcgccgtgaaagtactggtccaacggccggccgagcaccgcttggaatcggtacgcactaaaggcgccaggcagcacgctcacgtagccaaacagcgactcgagcggtttgtcgaggatattactgattttgtactcaaagttctgagccgccaccaaggggttgagcagcttgatgccgtgtttgatcatagcatgaatttcgccgcacgcaccacccaagttgggtcggtgatagaatgcctgccatatatggtatagggcgaggtggccgggcttcgtaccgacgtcgaccaagacgaccatgtcgggctggagcatgcggccgagcgcatggaatacccagcggtggctgttgatctttttcgcgttgcgctgcttgaagcaaaagatcatctggacaggcacgaggttgtcgtgcgacgtgggcgaaggctggacgagttgcggcgtcgagtcgacagacacttgcgtcgtgtattcgaacaagtgcgcgaccgtttccttgtcatttacctgacgcttcatgacgccgtcctggtacacacccatggtggcgagcacatcgagtgcttccttgtcgcatgggtcaatcccgtcaaagacaagcgagacgaccacgcgttgccagccagggtgaccgtcgtccctgtgtgggtaccttttggaccacttgcggcacatgtcccgtatgttgagcatgacactgtgcatcgttcgcg

SEQ ID NO: 52 - DNA, 1040 bp, Malassezia restricta; identical to SEQ ID NO: 51

SEQ ID NO: 53 - DNA, 885 bp, Unknown
  Unclassified
aagatcaactcccatcgttggttattccaggcctttggccgtgtattggaccccaatatctgtgtgcttctggacgctggaacgaagcctggacgggactccatctatcagctatggaaggcattcgacgtcgagcccatgtgcggaggagcttgtggtgagatcaaagtcatgctgtcgcatggcaagaaattgctcaacccgttagtggctgggcaaaacttcgaatacaagctcagcaacatcctagataagccgctggaatcagcttttggtttcatttccgtcttgcctggtgctttttctgcgtacagatacgtcgcgttacagaacgacaagaacggccaaggtccactggagcgctacttcctgggtgaaaagatgcatggcgccaatgcgggtatcttcacagccaacatgtacctggccgaggatcgaattctgtgtttcgagattgtgaccaaacgcaattgccgttggctcctgcaatatgtaaagtcatcaactggagagaccgatgtgcctgaccgaatggcggaattcattctacagcggcgcagatggctgaacggaagtttctttgctgccgtttatgcgatcgcccatttctaccagatctggcggagcgaccacagcttcatgcgcaagttcatgttgttggttgagttcatctaccagactatcaacatgatctttgcgtggttcaatattgtatgtgctgtcttctcctcgccggaatggacaaatgctaatgtgaatcgcagggcaacttcttcttggtctttcacattctcaccacctaccttggtgacgccgaacttctggggactacgggtaaagtccttggtgtggtcttcgagtggctctatcttgcgaccctggtga

SEQ ID NO: 54 - DNA, 2891 bp, Unknown
  Unclassified
atggagtccagaatcagcaaccggttatcgagttccgccacaaggacggtacgagccttcagaaatcgatggtcatgccaggccagggacaccgggatcgagttacggaaatgcgaggcgaccgcttccctcggcaccagcgcctttacactacaatagcccaagtcgcgcagcgagtcattatccacggtaccatggaggttatgcggacgacgtgacagttagcatgggaccggacgacgatcgtacagatatctttggccccgaaaccgatctcagcgaaacgcgccacctcaacgacgcatacgggtttcggtcatcccagatcaccctcagcgaagatccccacggcacccacgcgcgttcccggtacgacgacgaagacgatgtgagcaccacttattcctccaacacgggcaccagcgcttcaggtgtcgacaagttcgagcattacggtcccattccggaggaaggcaagcacgagcggcgcggcgtgcgaccaccacagatgtcgaggaaggaagtccagctcatcaacggcgaactcgttctcgagtgcaagattccgactatattgtattcgtttttgcccaggagagacgaagtggagtttacgcacatgcggtacacagccgtcacttgtgaccctgatgactttgttgccaggggttacaagttgcgccagaatatcggtcgtaccgccagggagacggagctgttcatctgcgtgaccatgtacaacgaggacgagttcggattcacacggactatgcacgcagtcatgaagaacatttcgcatttttgttcccgaaacaagagtaggacgtggggagcggatgggtggcagaagattgtggtctgtgtggtttcggatggacgagagatcattcacccccggaccttggacgccctcgcagccatgggcgtttaccagcacggtatcgccaagaactttgtcaaccagaaggcggtgcaggcccacgtttacgagtacacgacacaagtgtctctggacagcgacctcaagttcaagggcgccgagaagggcatcgtgccctgccagatgattttttgcttgaaggagaagaaccaaaagaaactcaactcgcatagatggttcttcaacgcctttggcaaagccttgaacccgaatgtgtgtatcctcctagacgtcggcacccgccccggcggcacaagtctctaccatctctggaaagccttcgacacggattccaacgtggcgggggcctgcggggaaatcaaagcgatgaaggggcggtttggcgggaatttgctcaaccctctggtggctagtcagaactttgagtacaagatgagcaatattctggacaaaccgttggagtcggtgtttgggtacatcacggtgttgccgggcgccttgtcggcgtatcggtaccatgcgctgcagaacgatgagacgggccatgggccgttgagtcagtatttcaagggcgagacgctccatgggcagcacgcggatgtgtttacggcgaacatgtacttggccgaggaccgaattctgtgttgggagttggtggccaagaggggtgagaggtgggtgttgaagtatgtgaaggggtgtacgggtgagacggatgtgcctggtgagttgccccccttttttgctgtgtgataagttatactaacgagttgtagacaccgtcccggaattcgtctcgcaacgtcgtcgttggctcaacggtgccttcttcgccgccgtctactccctcgtccactttcgacaaatctggaaaaccgaccacacctttatgcgcaaagcccttctccacgtcgaattcctctaccacctcctgcaactcctcttcacctacttctccctggccaacttctacctcgccttctactttatcgccggcggtctcgccgatccccacgtcgacccttttaactcggacggccacgtcgcgcgcatcatcttcaacatcctccgctacgtctgcgtcctgctgatctgcacacaattcatcttgtccctcggcaaccgtccgcagggtgccaaaagaatgtatctcgcatccatgatcatctacgccgtcatcatggtgtacaccaccttcgccaccatcttcatcgtcgtgcgacaaatccaaccctctcaaaaatccgacgacaagcccgacctcgaactcggcaacaacgtcttcaccaacctgatcgtctccgtggctagtaccctcgggctctacttcgtcatgtcctttctctatctcgacccctggcacatgttcacctcggccatccagtactttgtcctgctgccttcctacatctgcacgctccagatctacgccttttgcaacacccacgacgtcacatggggcaccaaaggcgacaacgtgatgcgcaccgatctcggaggcgccattggcaagggaagcaccgtcgaactggaaatgccttcggaccaactcgacatcgactcgggatacgacgaatgtctacgtaatctccgcgatcgcgtcatggtccctgccgttcccgtgtccgaggaccagctgcagcaggattactacaagtcggtgcgcacgtacatggtggtgtcgtggatggtggccaacgcgacgctggccatggcggtctcggaagcgtatggcgattcggaaattggggataatttttacttgcggtttatcctgtgggcggtggcggccctggcgctgtttagagcgttggggtcgacgacgtttgcggcgattaatctggtgagtgctctcgtggagggcagggtcaggctgaggttgaatatgaaagggtttaggtggattaaggagaagtggggggatgcggatgtgaagggcaagtttgaggggttgggggatcgggcgagggggttggcgaggcggtgatgt

SEQ ID NO: 55 - DNA, 6464 bp, Artificial Sequence
  Synthetic Construct
cggcaggatatattcaattgtaaatggctccatggcgatcgctctagaggatctgcgatctagtaacatagatgacaccgcgcgcgataatttatcctagtttgcgcgctatattttgttttctatcgcgtattaaatgtataattgcgggactctaatcataaaaacccatctcataaataacgtcatgcattacatgttaattattacatgcttaacgtaattcaacagaaattatatgataatcatcgcaagaccggcaacaggattcaatcttaagaaactttattgccaaatgtttgaacgatctgcttcggatcctagaacgcgtgatctcagatctcggtgacgggcaggaccggacggggcggtaccggcaggctgaagtccagctgccagaaacccacgtcatgccagttcccgtgcttgaagccggccgcccgcagcatgccgcggggggcatatccgagcgcctcgtgcatgcgcacgctcgggtcgttgggcagcccgatgacagcgaccacgctcttgaagccctgtgcctccagggacttcagcaggtgggtgtagagcgtggagcccagtcccgtccgctggtggcggggggagacgtacacggtcgactcggccgtccagtcgtaggcgttgcgtgccttccaggggcccgcgtaggcgatgccggcgacctcgccgtccacctcggcgacgagccagggatagcgctcccgcagacggacgaggtcgtccgtccactcctgcggttcctgcggctcggtacggaagttgaccgtgcttgtctcgatgtagtggttgacgatggtgcagaccgccggcatgtccgcctcggtggcacggcggatgtcggccgggcgtcgttctgggtccatggttatagagagagagatagatttatagagagagactggtgatttcagcgtgtcctctccaaatgaaatgaacttccttatatagaggaagggtcttgcgaaggatagtgggattgtgcgtcatcccttacgtcagtggagatgtcacatcaatccacttgctttgaagacgtggttggaacgtcttctttttccacgatgctcctcgtgggtgggggtccatctttgggaccactgtcggcagaggcatcttgaatgatagcctttcctttatcgcaatgatggcatttgtaggagccaccttccttttctactgtcctttcgatgaagtgacagatagctgggcaatggaatccgaggaggtttcccgaaattatcctttgttgaaaagtctcaatagccctttggtcttctgagactgtatctttgacatttttggagtagaccagagtgtcgtgctccaccatgttgacgaagattttcttcttgtcattgagtcgtaaaagactctgtatgaactgttcgccagtcttcacggcgagttctgttagatcctcgatttgaatcttagactccatgcatggccttagattcagtaggaactacctttttagagactccaatctctattacttgccttggtttatgaagcaagccttgaatcgtccatactggaatagtacttctgatcttgagaaatatgtctttctctgtgttcttgatgcaattagtcctgaatcttttgactgcatctttaaccttcttgggaaggtatttgatctcctggagattgttactcgggtagatcgtcttgatgagacctgctgcgtaggaacgcggccgctgtacagggcccgggcatatggcgcgccggtacccaacctctcgagctgccatattgggtttttcactacccacctcttcattaaatgtatcttcaacctctcaactcctttcaccaccagacgaatcttctttagcaaaatcaaaatgaccttatgaaaatttagcacgtccacctccagattcaaaggctgtgaatccccaacttcggaaattgttcatctccacattcaagaataatgagttcctcaatttgttttaactgattagccgatattaagcgagttagactccatggaaataaaatcaccctaataaatagcaacgcttttgaacgtctctaggttccaagcgtgctaaggagcgccagtaacttcaatccaagttgtgcgaaaacgtatgaaatggaactgagaccagcgttcaacatcgatgaaaatttgttttaacaatgagaactgcaaatcctccatagtcttctaacatttcaacattcgaaatctcgaaaagaaattggcttgatatgatttatttagggtgttaattttatgtattataataatgcacaaattgatattttatgcatcacatttaatatttttaaagtatataatatcaaatcattttatgaaaataaaaataccaaataatacataaattgatagttcaagtatttcattaaaaattttcaaaatataaatatcatattgaaacattttataaaagaatagataccaaatatgacatcatcccctgttgagagtaaccaaacactgttttcatccagcccatgagaagtatttggcccaaaagcaaaagtttcagtacaatgaattatgaatcccaaaaaaaccccaagtggtccaggtccaagccagtctagggctgaggaaagaaatggaaaaattgaaaagtaattccagggtctgattcaattttattaaatttagtttgattttggtttcggttcataaatttaaaaataattttaaaatgttatataaaactgttttttaaaaataaattaatcaataatctaaaacgataaaaatggcgatttgaattaagctcatattttgaaaaaaaaataaaaattatctcatccagaactgattaaaaccgaaccgatgaatcctagaagccaagccaagtgtgcagagtaagaatagaacatcaacattttgctttaagcttttcgttgcttgcactctaagaagcataaaacgcaagcaaaacttgacactagtgtgagtgtgagtgcccatcattcatcaaccctgaaaatcgcccttcccctaatcagttctaacctcactttctaacactttcactgcagcactcaaaaacattcgccgaatctttactataaactcccagtgttggtttctccactccaaacccaaaccacgaccaccacattttgcttcgtatctttgatatctagatctcccgggagctcatttctctattacttcagccataacaaaagaactcttttctcttcttattaaaccaaaaccatggatgagtaaacggaatccgaagattctgaagatttttctgtatatgttacttctcaactctctctttctcatcatctacttcgtttttcactcatcgtcgttttcagccaaaaccatggagtccagaatcagcaaccggttatcgagttccgccacaaggacggtacgagccttcagaaatcgatgtcatgccaggccagggacaccgggatcgagttacggaaatgcgaggcgaccgcttccctcggcaccagcgcctttacactacaatagcccaagtcgcgcagcgagtcattatccacggtaccatggaggttatgcggacgacgtgacagttagcatgggaccggacgacgatcgtacagatatctttggccccgaaaccgatctcagcgaaacgcgccacctcaacgacgcatacgggtttcggtcatcccagatcaccctcagcgaagatccccacggcacccacgcgcgttcccggtacgacgacgaagacgatgtgagcaccacttattcctccaacacgggcaccagcgcttcaggtgtcgacaagttcgagcattacggtcccattccggaggaaggcaagcacgagcggcgcggcgtgcgaccaccacagatgtcgaggaaggaagtccagctcatcaacggcgaactcgttctcgagtgcaagattccgactatattgtattcgtttttgcccaggagagacgaagtggagtttacgcacatgcggtacacagccgtcacttgtgaccctgatgactttgttgccaggggttacaagttgcgccagaatatcggtcgtaccgccagggagacggagctgttcatctgcgtgaccatgtacaacgaggacgagttcggattcacacggactatgcacgcagtcatgaagaacatttcgcatttttgttcccgaaacaagagtaggacgtggggagcggatgggtggcagaagattgtggtctgtgtggtttcggatggacgagagatcattcacccccggaccttggacgccctcgcagccatgggcgtttaccagcacggtatcgccaagaactttgtcaaccagaaggcggtgcaggcccacgtttacgagtacacgacacaagtgtctctggacagcgacctcaagttcaagggcgccgagaagggcatcgtgccctgccagatgattttttgcttgaaggagaagaaccaaaagaaactcaactcgcatagatggttcttcaacgcctttggcaaagccttgaacccgaatgtgtgtatcctcctagacgtcggcacccgccccggcggcacaagtctctaccatctctggaaagccttcgacacggattccaacgtggcgggggcctgcggggaaatcaaagcgatgaaggggcggtttggcgggaatttgctcaaccctctggtggctagtcagaactttgagtacaagatgagcaatattctggacaaaccgttggagtcggtgtttgggtacatcacggtgttgccgggcgccttgtcggcgtatcggtaccatgcgctgcagaacgatgagacgggccatgggccgttgagtcagtatttcaagggcgagacgctccatgggcagcacgcggatgtgtttacggcgaacatgtacttggccgaggaccgaattctgtgttgggagttggtggccaagaggggtgagaggtgggtgttgaagtatgtgaaggggtgtacgggtgagacggatgtgcctgacaccgtcccggaattcgtctcgcaacgtcgtcgttggctcaacggtgccttcttcgccgccgtctactccctcgtccactttcgacaaatctggaaaaccgaccacacctttatgcgcaaagcccttctccacgtcgaattcctctaccacctcctgcaactcctcttcacctacttctccctggccaacttctacctcgccttctactttatcgccggcggtctcgccgatccccacgtcgacccttttaactcggacggccacgtcgcgcgcatcatcttcaacatcctccgctacgtctgcgtcctgctgatctgcacacaattcatcttgtccctcggcaaccgtccgcagggtgccaaaagaatgtatctcgcatccatgatcatctacgccgtcatcatggtgtacaccaccttcgccaccatcttcatcgtcgtgcgacaaatccaaccctctcaaaaatccgacgacaagcccgacctcgaactcggcaacaacgtcttcaccaacctgatcgtctccgtggctagtaccctcgggctctacttcgtcatgtcctttctctatctcgacccctggcacatgttcacctcggccatccagtactttgtcctgctgccttcctacatctgcacgctccagatctacgccttttgcaacacccacgacgtcacatggggcaccaaaggcgacaacgtgatgcgcaccgatctcggaggcgccattggcaagggaagcaccgtcgaactggaaatgccttcggaccaactcgacatcgactcgggatacgacgaatgtctacgtaatctccgcgatcgcgtcatggtccctgccgttcccgtgtccgaggaccagctgcagcaggattactacaagtcggtgcgcacgtacatggtggtgtcgtggatggtggccaacgcgacgctggccatggcggtctcggaagcgtatggcgattcggaaattggggataatttttacttgcggtttatcctgtgggcggtggcggccctggcgctgtttagagcgttggggtcgacgacgtttgcggcgattaatctggtgagtgctctcgtggagggcagggtcaggctgaggttgaatatgaaagggtttaggtggattaaggagaagtggggggatgcggatgtgaagggcaagtttgaggggttgggggatcgggcgagggggttggcgaggcggtgagctagcaagcttggacacgctgaaatcaccagtctctctctacaaatctatctctctctattttctccataataatgtgtgagtagttcccagataagggaattagggttcctatagggtttcgctcatgtgttgagcatataagaaacccttagtatgtatttgtatttgtaaaatacttctatcaataaaatttctaattcctaaaaccaaaatccagtactaaaatccagatcatgcatggtacagcggccgcgttct

SEQ ID NO: 56 - DNA, 5606 bp, Artificial Sequence
  Synthetic Construct
cggcaggatatattcaattgtaaatggctccatggcgatcgctctagaggatctgcgatctagtaacatagatgacaccgcgcgcgataatttatcctagtttgcgcgctatattttgttttctatcgcgtattaaatgtataattgcgggactctaatcataaaaacccatctcataaataacgtcatgcattacatgttaattattacatgcttaacgtaattcaacagaaattatatgataatcatcgcaagaccggcaacaggattcaatcttaagaaactttattgccaaatgtttgaacgatctgcttcggatcctagaacgcgtgatctcagatctcggtgacgggcaggaccggacggggcggtaccggcaggctgaagtccagctgccagaaacccacgtcatgccagttcccgtgcttgaagccggccgcccgcagcatgccgcggggggcatatccgagcgcctcgtgcatgcgcacgctcgggtcgttgggcagcccgatgacagcgaccacgctcttgaagccctgtgcctccagggacttcagcaggtgggtgtagagcgtggagcccagtcccgtccgctggtggcggggggagacgtacacggtcgactcggccgtccagtcgtaggcgttgcgtgccttccaggggcccgcgtaggcgatgccggcgacctcgccgtccacctcggcgacgagccagggatagcgctcccgcagacggacgaggtcgtccgtccactcctgcggttcctgcggctcggtacggaagttgaccgtgcttgtctcgatgtagtggttgacgatggtgcagaccgccggcatgtccgcctcggtggcacggcggatgtcggccgggcgtcgttctgggtccatggttatagagagagagatagatttatagagagagactggtgatttcagcgtgtcctctccaaatgaaatgaacttccttatatagaggaagggtcttgcgaaggatagtgggattgtgcgtcatcccttacgtcagtggagatgtcacatcaatccacttgctttgaagacgtggttggaacgtcttctttttccacgatgctcctcgtgggtgggggtccatctttgggaccactgtcggcagaggcatcttgaatgatagcctttcctttatcgcaatgatggcatttgtaggagccaccttccttttctactgtcctttcgatgaagtgacagatagctgggcaatggaatccgaggaggtttcccgaaattatcctttgttgaaaagtctcaatagccctttggtcttctgagactgtatctttgacatttttggagtagaccagagtgtcgtgctccaccatgttgacgaagattttcttcttgtcattgagtcgtaaaagactctgtatgaactgttcgccagtcttcacggcgagttctgttagatcctcgatttgaatcttagactccatgcatggccttagattcagtaggaactacctttttagagactccaatctctattacttgccttggtttatgaagcaagccttgaatcgtccatactggaatagtacttctgatcttgagaaatatgtctttctctgtgttcttgatgcaattagtcctgaatcttttgactgcatctttaaccttcttgggaaggtatttgatctcctggagattgttactcgggtagatcgtcttgatgagacctgctgcgtaggaacgcggccgctgtacagggcccgggcatatggcgcgccatatgcaccatacatggagtcaaaaattcagatcgaggatctaacagaactcgccgtgaagactggcgaacagttcatacagagtcttttacgactcaatgacaagaagaaaatcttcgtcaacatggtggagcacgacactctcgtctactccaagaatatcaaagatacagtctcagaagaccaaagggctattgagacttttcaacaaagggtaatatcgggaaacctcctcggattccattgcccagctatctgtcacttcatcaaaaggacagtagaaaaggaaggtggcacctacaaatgccatcattgcgataaaggaaaggctatcgttcaagatgcctctgccgacagtggtcccaaagatggacccccacccacgaggagcatcgtggaaaaagaagacgttccaaccacgtcttcaaagcaagtggattgatgtgatatctccactgacgtaagggatgacgcacaatcccactatccttcgcaagacccttcctctatataaggaagttcatttcatttggagaggactcgagctcatttctctattacttcagccataacaaaagaactcttttctcttcttattaaaccaaaaccatggatgagtaaacggaatccgaagattctgaagatttttctgtatatgttacttctcaactctctctttctcatcatctacttcgtttttcactcatcgtcgttttcagccaaaaccatggagtccagaatcagcaaccggttatcgagttccgccacaaggacggtacgagccttcagaaatcgatgtcatgccaggccagggacaccgggatcgagttacggaaatgcgaggcgaccgcttccctcggcaccagcgcctttacactacaatagcccaagtcgcgcagcgagtcattatccacggtaccatggaggttatgcggacgacgtgacagttagcatgggaccggacgacgatcgtacagatatctttggccccgaaaccgatctcagcgaaacgcgccacctcaacgacgcatacgggtttcggtcatcccagatcaccctcagcgaagatccccacggcacccacgcgcgttcccggtacgacgacgaagacgatgtgagcaccacttattcctccaacacgggcaccagcgcttcaggtgtcgacaagttcgagcattacggtcccattccggaggaaggcaagcacgagcggcgcggcgtgcgaccaccacagatgtcgaggaaggaagtccagctcatcaacggcgaactcgttctcgagtgcaagattccgactatattgtattcgtttttgcccaggagagacgaagtggagtttacgcacatgcggtacacagccgtcacttgtgaccctgatgactttgttgccaggggttacaagttgcgccagaatatcggtcgtaccgccagggagacggagctgttcatctgcgtgaccatgtacaacgaggacgagttcggattcacacggactatgcacgcagtcatgaagaacatttcgcatttttgttcccgaaacaagagtaggacgtggggagcggatgggtggcagaagattgtggtctgtgtggtttcggatggacgagagatcattcacccccggaccttggacgccctcgcagccatgggcgtttaccagcacggtatcgccaagaactttgtcaaccagaaggcggtgcaggcccacgtttacgagtacacgacacaagtgtctctggacagcgacctcaagttcaagggcgccgagaagggcatcgtgccctgccagatgattttttgcttgaaggagaagaaccaaaagaaactcaactcgcatagatggttcttcaacgcctttggcaaagccttgaacccgaatgtgtgtatcctcctagacgtcggcacccgccccggcggcacaagtctctaccatctctggaaagccttcgacacggattccaacgtggcgggggcctgcggggaaatcaaagcgatgaaggggcggtttggcgggaatttgctcaaccctctggtggctagtcagaactttgagtacaagatgagcaatattctggacaaaccgttggagtcggtgtttgggtacatcacggtgttgccgggcgccttgtcggcgtatcggtaccatgcgctgcagaacgatgagacgggccatgggccgttgagtcagtatttcaagggcgagacgctccatgggcagcacgcggatgtgtttacggcgaacatgtacttggccgaggaccgaattctgtgttgggagttggtggccaagaggggtgagaggtgggtgttgaagtatgtgaaggggtgtacgggtgagacggatgtgcctgacaccgtcccggaattcgtctcgcaacgtcgtcgttggctcaacggtgccttcttcgccgccgtctactccctcgtccactttcgacaaatctggaaaaccgaccacacctttatgcgcaaagcccttctccacgtcgaattcctctaccacctcctgcaactcctcttcacctacttctccctggccaacttctacctcgccttctactttatcgccggcggtctcgccgatccccacgtcgacccttttaactcggacggccacgtcgcgcgcatcatcttcaacatcctccgctacgtctgcgtcctgctgatctgcacacaattcatcttgtccctcggcaaccgtccgcagggtgccaaaagaatgtatctcgcatccatgatcatctacgccgtcatcatggtgtacaccaccttcgccaccatcttcatcgtcgtgcgacaaatccaaccctctcaaaaatccgacgacaagcccgacctcgaactcggcaacaacgtcttcaccaacctgatcgtctccgtggctagtaccctcgggctctacttcgtcatgtcctttctctatctcgacccctggcacatgttcacctcggccatccagtactttgtcctgctgccttcctacatctgcacgctccagatctacgccttttgcaacacccacgacgtcacatggggcaccaaaggcgacaacgtgatgcgcaccgatctcggaggcgccattggcaagggaagcaccgtcgaactggaaatgccttcggaccaactcgacatcgactcgggatacgacgaatgtctacgtaatctccgcgatcgcgtcatggtccctgccgttcccgtgtccgaggaccagctgcagcaggattactacaagtcggtgcgcacgtacatggtggtgtcgtggatggtggccaacgcgacgctggccatggcggtctcggaagcgtatggcgattcggaaattggggataatttttacttgcggtttatcctgtgggcggtggcggccctggcgctgtttagagcgttggggtcgacgacgtttgcggcgattaatctggtgagtgctctcgtggagggcagggtcaggctgaggttgaatatgaaagggtttaggtggattaaggagaagtggggggatgcggatgtgaagggcaagtttgaggggttgggggatcgggcgagggggttggcgaggcggtgagctagcaagcttggacacgctgaaatcaccagtctctctctacaaatctatctctctctattttctccataataatgtgtgagtagttcccagataagggaattagggttcctatagggtttcgctcatgtgttgagcatataagaaacccttagtatgtatttgtatttgtaaaatacttctatcaataaaatttctaattcctaaaaccaaaatccagtactaaaatccagatcatgcatggtacagcggccaattccggggtacggtcgacggccgagtact

SEQ ID NO: 57 - DNA, 5490 bp, Artificial Sequence
  Synthetic Construct
cggcaggatatattcaattgtaaatggctccatggcgatcgctctagaggatctgcgatctagtaacatagatgacaccgcgcgcgataatttatcctagtttgcgcgctatattttgttttctatcgcgtattaaatgtataattgcgggactctaatcataaaaacccatctcataaataacgtcatgcattacatgttaattattacatgcttaacgtaattcaacagaaattatatgataatcatcgcaagaccggcaacaggattcaatcttaagaaactttattgccaaatgtttgaacgatctgcttcggatcctagaacgcgtgatctcagatctcggtgacgggcaggaccggacggggcggtaccggcaggctgaagtccagctgccagaaacccacgtcatgccagttcccgtgcttgaagccggccgcccgcagcatgccgcggggggcatatccgagcgcctcgtgcatgcgcacgctcgggtcgttgggcagcccgatgacagcgaccacgctcttgaagccctgtgcctccagggacttcagcaggtgggtgtagagcgtggagcccagtcccgtccgctggtggcggggggagacgtacacggtcgactcggccgtccagtcgtaggcgttgcgtgccttccaggggcccgcgtaggcgatgccggcgacctcgccgtccacctcggcgacgagccagggatagcgctcccgcagacggacgaggtcgtccgtccactcctgcggttcctgcggctcggtacggaagttgaccgtgcttgtctcgatgtagtggttgacgatggtgcagaccgccggcatgtccgcctcggtggcacggcggatgtcggccgggcgtcgttctgggtccatggttatagagagagagatagatttatagagagagactggtgatttcagcgtgtcctctccaaatgaaatgaacttccttatatagaggaagggtcttgcgaaggatagtgggattgtgcgtcatcccttacgtcagtggagatgtcacatcaatccacttgctttgaagacgtggttggaacgtcttctttttccacgatgctcctcgtgggtgggggtccatctttgggaccactgtcggcagaggcatcttgaatgatagcctttcctttatcgcaatgatggcatttgtaggagccaccttccttttctactgtcctttcgatgaagtgacagatagctgggcaatggaatccgaggaggtttcccgaaattatcctttgttgaaaagtctcaatagccctttggtcttctgagactgtatctttgacatttttggagtagaccagagtgtcgtgctccaccatgttgacgaagattttcttcttgtcattgagtcgtaaaagactctgtatgaactgttcgccagtcttcacggcgagttctgttagatcctcgatttgaatcttagactccatgcatggccttagattcagtaggaactacctttttagagactccaatctctattacttgccttggtttatgaagcaagccttgaatcgtccatactggaatagtacttctgatcttgagaaatatgtctttctctgtgttcttgatgcaattagtcctgaatcttttgactgcatctttaaccttcttgggaaggtatttgatctcctggagattgttactcgggtagatcgtcttgatgagacctgctgcgtaggaacgcggccgctgtacagggcccgggcatatggcgcgccatatgcaccatacatggagtcaaaaattcagatcgaggatctaacagaactcgccgtgaagactggcgaacagttcatacagagtcttttacgactcaatgacaagaagaaaatcttcgtcaacatggtggagcacgacactctcgtctactccaagaatatcaaagatacagtctcagaagaccaaagggctattgagacttttcaacaaagggtaatatcgggaaacctcctcggattccattgcccagctatctgtcacttcatcaaaaggacagtagaaaaggaaggtggcacctacaaatgccatcattgcgataaaggaaaggctatcgttcaagatgcctctgccgacagtggtcccaaagatggacccccacccacgaggagcatcgtggaaaaagaagacgttccaaccacgtcttcaaagcaagtggattgatgtgatatctccactgacgtaagggatgacgcacaatcccactatccttcgcaagacccttcctctatataaggaagttcatttcatttggagaggactcgagctcatttctctattacttcagccataacaaaagaactcttttctcttcttattaaaccaaaaccatggagtccagaatcagcaaccggttatcgagttccgccacaaggacggtacgagccttcagaaatcgatgtcatgccaggccagggacaccgggatcgagttacggaaatgcgaggcgaccgcttccctcggcaccagcgcctttacactacaatagcccaagtcgcgcagcgagtcattatccacggtaccatggaggttatgcggacgacgtgacagttagcatgggaccggacgacgatcgtacagatatctttggccccgaaaccgatctcagcgaaacgcgccacctcaacgacgcatacgggtttcggtcatcccagatcaccctcagcgaagatccccacggcacccacgcgcgttcccggtacgacgacgaagacgatgtgagcaccacttattcctccaacacgggcaccagcgcttcaggtgtcgacaagttcgagcattacggtcccattccggaggaaggcaagcacgagcggcgcggcgtgcgaccaccacagatgtcgaggaaggaagtccagctcatcaacggcgaactcgttctcgagtgcaagattccgactatattgtattcgtttttgcccaggagagacgaagtggagtttacgcacatgcggtacacagccgtcacttgtgaccctgatgactttgttgccaggggttacaagttgcgccagaatatcggtcgtaccgccagggagacggagctgttcatctgcgtgaccatgtacaacgaggacgagttcggattcacacggactatgcacgcagtcatgaagaacatttcgcatttttgttcccgaaacaagagtaggacgtggggagcggatgggtggcagaagattgtggtctgtgtggtttcggatggacgagagatcattcacccccggaccttggacgccctcgcagccatgggcgtttaccagcacggtatcgccaagaactttgtcaaccagaaggcggtgcaggcccacgtttacgagtacacgacacaagtgtctctggacagcgacctcaagttcaagggcgccgagaagggcatcgtgccctgccagatgattttttgcttgaaggagaagaaccaaaagaaactcaactcgcatagatggttcttcaacgcctttggcaaagccttgaacccgaatgtgtgtatcctcctagacgtcggcacccgccccggcggcacaagtctctaccatctctggaaagccttcgacacggattccaacgtggcgggggcctgcggggaaatcaaagcgatgaaggggcggtttggcgggaatttgctcaaccctctggtggctagtcagaactttgagtacaagatgagcaatattctggacaaaccgttggagtcggtgtttgggtacatcacggtgttgccgggcgccttgtcggcgtatcggtaccatgcgctgcagaacgatgagacgggccatgggccgttgagtcagtatttcaagggcgagacgctccatgggcagcacgcggatgtgtttacggcgaacatgtacttggccgaggaccgaattctgtgttgggagttggtggccaagaggggtgagaggtgggtgttgaagtatgtgaaggggtgtacgggtgagacggatgtgcctgacaccgtcccggaattcgtctcgcaacgtcgtcgttggctcaacggtgccttcttcgccgccgtctactccctcgtccactttcgacaaatctggaaaaccgaccacacctttatgcgcaaagcccttctccacgtcgaattcctctaccacctcctgcaactcctcttcacctacttctccctggccaacttctacctcgccttctactttatcgccggcggtctcgccgatccccacgtcgacccttttaactcggacggccacgtcgcgcgcatcatcttcaacatcctccgctacgtctgcgtcctgctgatctgcacacaattcatcttgtccctcggcaaccgtccgcagggtgccaaaagaatgtatctcgcatccatgatcatctacgccgtcatcatggtgtacaccaccttcgccaccatcttcatcgtcgtgcgacaaatccaaccctctcaaaaatccgacgacaagcccgacctcgaactcggcaacaacgtcttcaccaacctgatcgtctccgtggctagtaccctcgggctctacttcgtcatgtcctttctctatctcgacccctggcacatgttcacctcggccatccagtactttgtcctgctgccttcctacatctgcacgctccagatctacgccttttgcaacacccacgacgtcacatggggcaccaaaggcgacaacgtgatgcgcaccgatctcggaggcgccattggcaagggaagcaccgtcgaactggaaatgccttcggaccaactcgacatcgactcgggatacgacgaatgtctacgtaatctccgcgatcgcgtcatggtccctgccgttcccgtgtccgaggaccagctgcagcaggattactacaagtcggtgcgcacgtacatggtggtgtcgtggatggtggccaacgcgacgctggccatggcggtctcggaagcgtatggcgattcggaaattggggataatttttacttgcggtttatcctgtgggcggtggcggccctggcgctgtttagagcgttggggtcgacgacgtttgcggcgattaatctggtgagtgctctcgtggagggcagggtcaggctgaggttgaatatgaaagggtttaggtggattaaggagaagtggggggatgcggatgtgaagggcaagtttgaggggttgggggatcgggcgagggggttggcgaggcggtgagctagcaagcttggacacgctgaaatcaccagtctctctctacaaatctatctctctctattttctccataataatgtgtgagtagttcccagataagggaattagggttcctatagggtttcgctcatgtgttgagcatataagaaacccttagtatgtatttgtatttgtaaaatacttctatcaataaaatttctaattcctaaaaccaaaatccagtactaaaatccagatcatgcatggtacagcggccaattccggggtacggtcgacggccgagtactgg

SEQ ID NO: 58 - DNA, 6464 bp, Artificial Sequence; identical to SEQ ID NO: 55
  Synthetic Construct

SEQ ID NO: 59 - DNA, 2959 bp, Unknown
  Unclassified
gaccactctcgccgctccctgcttctgctcctggccctgactccgacgtcctggccacttctttcaccccgcccggccacaggctctcgcactcgcacacgcactctagagctcagagtcagcgtcagcttttcccaggaatgtcctatcccaaccccaactcggaagccggtagtggcggcggcagtataacttcctggcagaaacgtcaggcagggggattgcgtcggtggcccactcgcagagttgatttgatcaaggggagggtcttgagcgtcgactatccggttccgagtgcgatcttgaactcagtcgagccgcagtatcgtgactcggcgagcagttcggaggaatttacccatctgcgatgtatgtgatgtctttgatcaacaagatggggaattgacagggtctgactgatgatggaaatgtttagatacggctgctacctgcgacccggacgacttcacgctccgcaatgggtacaatctccgcgcctccatgtacaatcggtatacggagttgcttattgccatcacatactataatgaagacaaggtcctcacggcacggacgcttcacggagtcatgcaaaatatccgggatattgtcaacttgaagaaaacacagttctggaataagggagggccggcatggcagaagatcgtggtctgcctggtgttcgatggaatcagtccgtgcgataaggagaccctggacgtgctggcgacggtggggatctaccaagacggaattatgaaacatgatatcgatgggaaagagacaacggcgcatattgtgagacggcaccgaaacccttgatgaagcgcctccagctaacttgcccagttcgaatacaccacgcagctatcaatcacgccttcactccaactcgtgcgcccccagcgtgatgacccaacgaacctgcctccagtgcagatgatcttttgtctgaaacagaagaacagcaagaagatcaattctcaccgctggctcttcaacgctttcggccgtatcctgaacccggaggtctgtgtccttattgatgccggcacaaaaccaggtcataaatccctcctggctctctgggaagccttttataacaacaagaaccttggcggcgcctgcggcgaaatccatgccctactcgggcctcgctgggagaagctcgcgaatccactggttgcagctcaaaatttcgagtataaaatctcaaacatcctcgataaaccgcttgaaagtatgtttgggtatgtgagcgtcttgcccggcgcgttttccgcctatcgttacagggctattatgggaaggccgctggaacagtactttcatggagaccatacgccaccaaagagattgggaaagaccgccattgaagggatgaatatttttaagaagaatatgtttctggccgaggatcgcatcttgtgctttgagcttgtcgccgaggcagggcagaaatggacattgagttatgtgaaggcgtcgaaaggagagacagatgttccagagggtacgtaccgtcctttcagagctaataaaatactaattatgttgtgcacagcaccacccgagttcctaagtcaacgacgcagatggctcaatggatcgtttgcagcgagcttgtactcggtgatgcactttgcacgtatctacaagagcgggcataacatggtcagactcttctttttgcacgttcaattgttatacaatgtttgtcagctcatcatgacgtggttctcactcggtatgccgctcctctcttcgttggtatctgtatattgacaactgctagcgtcgtactggctcactacctcggtcatcatggatattgtcgggacacccagcgcaacgaacaaatacaaaggttggccgtttggaaatgaagtctcgcctattttcaacaatgttgtcaaagtcctgtatctcgtctttctcatgcaccagttcttccttgccttgggcaatcgtccaaaggggtatgttttctaacatcgtttacctgtaagattgggttaacaaatatagctcgcaattcgcctacatcctgtccttcctatacttctctctcgtgcaaatatatatcctcatcctctctttctaccttgtcgcccaagccttttccggtggcaacatcgacctcgacttcgaccatggcgtcggcggcttcttcgcctcatttttcacctccaccaccggcctggtcctagtcgcccttgcctcaacctacggtacctattttatcggcagtatcctctactgcgatccgtggcatctgatcacctcttcctgggcatatttcattggcatgccgagcacaatcaacatcctcaacgtctacgcgttctgtaactggcacgatgtttcttggggaacgaaaggatccgacaacgcagctgcatcgctcccatccgcgcaaacaaagaaagctcccggtggtggagatggtgacgcaaaggggaccttcgtcgaagagctcgacaagccgcaagctgacatcgataccgagttcgaattcacggtccgccgcgcgcttgccgagtacaaggaacctgagcctgataaaacggtctccctggacgacagctacaagacgttccgcacgaacctggtgcttacttgggcgttgagtaactcgttgctggcgctgttgattaataacgccggggttagtacgttgtgtttgacggtgagtcccgcctcccttcttcaaacctcacccggtcctttccgggattagctccttcactacggtttacggttgagcatggttttggtatgtggtggagtctggctgactgtgtttttcttgcagacgacatcaacggtccggacggcgtggtactttaagtgtctgctctgggcaacgtcaggactgtcgatcttcaggttcgctggggcgctgtatttcctggcgaagacgggggtgctgtgttgctttgtgagaagatgatgctta

SEQ ID NO: 60 - DNA, 15531 bp, Unknown
  Unclassified
aaattacttgccagttaccactgattatctgttttcaaggtaattcatgatattgttggtaaattttttttaaaaagattgctcttgaatacttggttattattatctgtagcaccaatcagaagctacaacgtcaccttggaggttattaatcaatttgagcacctgcttgacaaattgaacatttgctgctatatatgtgctaatgcagtaatctgaatttatttggaataatcaatggcaagttatactagactgaacaccaggtagtattggaggaggatcaaaactattgaagtgatattattgtgaacaatttcacaatttaatatcacttcaatacttccatagtccaagtacgattaactgtttcatggaatttaatgacattattatacttttcgtggaatttactgaagattctttgacaatttggggtttggatatacttattaatgttaaatttgtaatttgtggccttggaaaaactagtttgatttgtactaagaatcacttttgctatttgtcatgtcacctgaaaatttcttgattgttaacacctaagcttgcacattgcataatcttaacttgcagaatatataaaaccacaactttagtataatttacttcaaattaaagtttactttgtttgcctctctagttttgatttttatcttgtttcttagtggttcggattcattaaataaaatacagtgactttatcttaagtaagaaatgaaaatattaatttcttttgctattgggcgttggtctagtggcctcaaaaagggtttgatagataagaaaaaatagccacttcattacttgatggtatcataaaaaaatagtttagcttttctctctctctctctctctctcttttttggagaaagggttagtaaagcttagttttttttaaaggattagtaaagctttctgggatcactaacttagattagataccacgaattgtgaacaacttgtccctttagtcaccatttatatctgaggaagctagggatgatttcgttgcacactcaagtcactctaaagtctaaaccgaggtttccttgtttcacctatatacttgtttgctttcaggatttttctctgttcttagtcttgcagattccaggctcggtctaatcgccaatttggcaatctttgtatgctctacaattccgtgctggcatatgccaactccaggtacgaattatgtaaatttcagagacttcattctgttctctctgttcaacacttggtttagtttcaaaacttcaaaaggagcataatctagtgataggagagaatcccacaaattccattgctaaaaccaaagttacttgttcgctctgtctctgtaatgctttcagtaatatatattggtcctgcatacaacaaatcataagaatctaaattgctgttgcttttgaagttggcattcccaatatcctttgttgtgttggaacagttcacatcaggctgtagaccaagttggatcagcttgaacgaatcaagcacttgttacattctgtctgttgttgaagcaaaaggcccccacgaagaaacatcgatcatatgcaccaagggtataacagaggaggtcgaatcccatgtcttgtggtggctgcaggcctgtagccaagcggatccgtccgcctgccagcaaaatgcatctgacggatgctacgaaaagagagacgatgttgcagaggtaacaagagacgctcgaaaacccggcgggtgtggtgagattctgccactaatcatggacaaatcacggacaaatcgagcatctatcacaaaccagctttaaacttttgagagttaattttactttgggcgacgctaatgggcggccagcgatcaccccccatccccctatacgtcctctcccccttccttctccccttcttttcttcctactacaccataaattttaaaataataaaaaaaacaaagttagaaaattttatgtataaaaatactatatataaaaaatatttgaattcaaatttaaatttaaattggatatataaactttttacttataaactttgggtctaaagtaactttaggtatatagaaatactatatataaaaaaatttaaatttaaatttaaattcaaatttgaatcgggtatataaacttttgacttataaactttgggactataaactttaggtgtatacaaatactatatataaaaaaattgaattcaaattcaaattaatatttgaatttaaattcaaatttgaatcgggtatataaacttttgacttataaactttgggtctataaactttaggtgtataaactttagatgtataaaaatactatatagaaaaaatatttgaattcaaatttaaatttgaatcggatatataaacttttgacttataaactttggatctgtaatatttaagtgtataaactttagatgtgtaaactttaggtgtgtaaacttttggtgcataaattttctaaaatatgaaagtaatgcggtgtcaaaaaaggaaagtggagggaggggggattgatcgcccggagcgcttgatcgctcgttaggattctcgttttactttgggccactttttattaccgatgtttcgctttggaccaccttaggaccaatgttttcactttggaccggatatttttacctttgtttcacattggaccaccctcactcttttatccatctacatccaacttgtaatatgtcgaagaaatagtcttacatatagctgtggcagttcattgacgagtaggagacggcgtaatcgagatcgttcatatgcttgagaagagagttgggtggtccaaagtgaaacaaatgtaagtttacccagtccaaagtaaaaatattgcttaaatggtggtccaaagtgaaacataggtaacaaaaggtggcccgaagtgaaatttactcaacttttgaataccttttctattgtacataaaaaagagttgtggtgattaagtgtttcttatttggtactggtatagtatatctcctaaccagaatcagcaccaatctttaacctcgcattgctaacatttgggctttggctgactggaaaaatgtttttgcgtctcatttgtactatcaaaagatatagaggatcacatcaggaataaaaggaaaatcgaaagtatgatttggctgcaagtccattaacataaggatttcaagaattaggtggagtcgcaattgtttaaatctttgctgataaattgaagttcacaaagaagaaactgtttctgtctaccaatttttactcttatattcagtcctctcattttcctgtactaaccatgattaacacgcctgaaacaattgagactatcaattggttctttcaagtttttgcaaactgttgtctcaaatattcaatgaggcaaattatgatggtgcaatgaacattggtttctaaagtatgtaaagaatatgctcatgataatctttgcattgtgtacttgtgttgtgaactattgcaaaaagtacatctttatatcactaaaagaattttaaggttgctgttgcataaagagattgagtactctgtgttgacttgctgatagaatttatctaccatttaaatccttaagatgaattgatctctcacttttctccttttttttgtagggtacatggcggagctaaacactatgcaaacggtggtttattttgctgtgtcttaaacatagtagtgatatctagcaactagcaagggactactacaatctttcagtatccaagcacatagttaaacaaaaacttacagatagcaacacaaactaaaagaattgaattgggaagggaataccatagacatctatggagtattaatatagaacacacaaacaagagtttaattaggtgcttaactataagcaagaaagggacatgtggtggaattctattatgagataactgatgcatagtacttgtaacaccatgcgccttaatttagtatttttgaaaaataattaaaagtcaggaaaatttaacttttcaagctgttgcacggatgaacaaggaccatggtattccagacatacatatatagacacacattaggtcctgttcttttctccaacaagagttggatgaaaattaagattttcgtggtacgcgtttcaaactgctaaacggtgcgtttcgtgcgaaaactttctatataaaagttgctctaaaatatcatattaatctatttttcaagtttgtaataattaaaactcaatcaatcatacgttaataccacctcgttttgtgtaaaaaacttaatcttcatcttcatcttcattttcagaagaaaagaagagttagcgatagcgacgctcctaattcttacggtgctaacggttgacggtcgttaagtgtaaactttaaccatcaactgctatataaaagaatataaaatatatcatcaaacttacttgtaggggtttactactaaccattatcactcgtattggtaaatatgagtatgcaggtgatttctaaatgaaaacacacccgtcttgcgacgaaatgcatctccgaccaatcgtacacgagcgctaggattggagggtccacatgacagtcaaaaccgatataaaatgggcttatccacgatgcactaatatagggacccgccagtcggcctcctagccgaagaagcagctcggaagtggggcccacagtttggccaaactaggggctcagccgaatcttcactgccacctcccatcctgaccttccttatgtaggctccagatgcactcctagtggtggttatgttggtaaccttcatagcacactataaaaggacaagaaactctcatttccaatacaagacttaagtggagtataactcacatccatattttaaggcatcaccttagtatgtggaattaggtagaaagtgatgggaagctctggaagaaatgcccccaaatatcggagttctctttgggaagttcagaaggagtgtcaggtttgttgacattcttccactcgagttccggagaagcattggagttgtcagccttcttctgttgcttgacctcagcgaatgcttgttttaataaagtaagtatttgagatctccatatagtatttaattatttgcttgagtgagatatagttacatcgttacgggttcgtcgcttagttcaattattatgtgctctagtattaggactctgagtaaagaatgaagtttctgcgcgaggctagagtaattatcaataacttaggcgcggtgtctaggttagtggtttcctttatttgttgtgtgctccatgcaaagtgaggtatgcggcaggtggtgacaaccttgtccatcttttatatccctccatgtttacgtacattgactcagtttgtcaaaccaggagagtgctagtgctcaaagcaattgatagagttttacctttaactcaagtatagtacattaacccgtaagaatcttctttagccttagcctaccattaggtgctgtccttggatagaatcctattattagatatgcacacaatccctatgatttgatacctttggaatactctaagttgaagtgctacagcggtatctgtgcgcttccgatttttattttactatatcaaatactaacaagcatttctgacgctgttgccatggaacggttgctatatcatcttcaaacctgattcatcctcatatcttttctttgttgtccttcctttctcttcttacctagcacggagcacctttctattcaaaacctttatgctccaaggaccgagttctgtgagccacctttttcttcaaacatatctgttcatctggtatgaactccgtcctagcttaagagccatggttcgggaataatccttctcaggatgtgaaagcgaaaatccctaccatcatttgcgtgagtttgagcaattgtgcttatgcctgacaataacggacatgacataagaaaccttaaagtggaaattgtttcacttctctcttacagagggggcgaagcaatggtatactcataccatgagaaaactgcatattgatgggacaaattaaaaagcatattatgccttgctttcttcctgttaacccgtgtagtctctctacgtggaggttcacgcgaaagaatccattggtgcagcctatgctcgtttctccttgttaactcaagacgacacagacttttctttaccgatcatgtgttgttacaacacttccactcgggtttagacaagatgtctgccatgtatctcgatacttctgctgtaggttcgtgcgcacacaaaacgatgtctgtggacaccccgagtattataccatccagtgtccaacgcgaacaccacatactattggagaagtgggatccatacacgcataaatagccactcatcctcaatgtgtccatgatcgcggttgacaaccttctgttataataactggaatgccaagtagtgaacacaagagataatcataagatagcttgccagtctactccgtcatatgtccgtcaaccactcgaaggtggcgaccaaaagcataccccagtgactcgatccaaggcactatccccgattatctcaagcgatcaaaacccgttactcatgcttagctagtccgtaggaatgcgactagcctcacactttcatcgcaagcaattaataaacatagcaagtaccataatagggttaaagtgcagcaggtacatgacacataatagggtccaagatcccaacatacaacacataaatatagcagcagaagtctcaattagagttcataggcaaaagataaaatcggtggtgccacaaccccactagggcaaaccaaccgggcaagagccaagctgcaagagatcactcattgccctcgccaccctcagcagagcaatgaccacacaagaagcataactcataaccggaatcctctcctgaaattgcagacaccgggttaagtacaagattgtactcgcaagtcttacccaaaattatatatacataagggagagagaagtatgcaagctttctagcctatagtgggtctctaggttcaacgtttgcataaagctaattttattgagaaattaatgagtaaaataagtaaggacaagtaactctagcatcattttaatttatggacagcaagtatataattctgaaatatataagcaaatgagcccaaacggcgctctcatcatcaaccatggactaccaaagtccataccaacatggcacaacatgccaacaccaccatcaaacataatcccatccataataatccacatttgattctaacataagtgactaacacatcaagcattgttcataaccgaggacgcggctattcgaatagattatactctgatcaaaggtgtacaactggacccacacgaaatgaacaaatatcaaatgctacacaccccgtcgagtgcggtacataagtgattcaagctcattacatgccctttcttagccccaccccaaccacctatactacgctggggttcccgacgactcagtcacgtgcgtgcatgatgtgaccaaggcgggcgcgccacgcgggaggcacccccggccaaacctaggcacccgagaacctccaaaggctacctgcctcacgactctccaacgtagtataaatgatcacagtagaactagtaagaacaagccggtcccaaataaggcatgtggtaagtacatagggtgcttgattagatgtcaaaatgttcggtccttaacgacctagatggggctacttgcatcaggggaaaccaacctcccatcatcgccctatcacccgtccaagtccaacatatttcatcaaccattatttagtgtaagtgctcaagttttatgcccaataatgcaagttgtctatataccactattaagcactgtctatccctatagttctattagcactaagcatggctaagcattaatgaataagacatcccaagtaatcccaaccagtggtaatagggtataagacaacgatatcacaagaactaaatgcattaataggttctacccatacaccataaaccgacaatattaatatctaggcaatacatgcatatatatatatatatatatatatatatatatatatatacatatagattgcaaccaaatcatttttagagaaagcataggttctatatgcttaggtgcttgccttgctgctgcgtggaaacacactcaacctcagagtcttgctccacatactccgaattctccgaatctatcgataagaggcaaatatgcaaataagattcgaataaacatgcatatgcaacatgctctacagaacacggggtaaacacagtggacatgtcacattttcaagaagaacatgggtgaaaagaatgaccctatttgctgccatgattctggagatataaaagtgacgagccacaaatgctgaaaatggtcctatgccaaaactgaatataaactatgggtcatttggtgatccccacatattctagcaaattttcatgggtgaaacttgctccatacaaaagagtataatttactggtgataggaatagtattcgattatttaatttggagtttgaacaagatagtaggtatatatgaaacctagagagtgagaaaaagaaaactgctgcctgcagcccttgtgcccaagatttgattcgaaagtttactttacaaatgctcagtgattgaggaaaatgaagaaggcatgatttagctcagctattggttttgtaaatacaatttttacaaggtgctggttagtctatgagggattaagtcgtaacatgaagtttctagctggcctaagaacttatgatgctgaaaggtagcaacttgcttccaatggcaactcataaaggtccaaaggttgctgttacactccatgcatgcatatactttaaaatgcaggtggtcaggtactgtggttgcgaaggttggagcacaaacagccatagcacaagaacaaatcgatgaagaagaaaaaaaatggtgatagcaacctgagtaaactgagggggatgggggttgtaatggtcggagtggagagaaacgagttgcaactgttctatgctctaaaatcttgcatcaatgacctgtggagagaggtagggaggctcaacacaatggcactcacaagagggacacaatggatgggaaggaaactcaccaagtggaggaaaaacatggttgttgttttgttgctgcaaccagcagcaagctccacctattttcttcccgatctccctcacgaacccatgcatgtgcaagatatttggatggatgggaggcttggatacttgagattgctgtggtgtgacatgcagggatggatctcaagtgtttggaggagatttgatggaaagaagtgaactgggagctcagcttgcaagaaagaaaagaacaagcaagggagaaagaaaaaaggaagaagatgaaagggtttcttgctagtcttatggacctgaggtgggtggacgacctggaggtgggatggggcttggtggagagcctaggtcagtgaaaggtggggccaagttgagctgggtcatgggacagataaaggaaggttagaaccttacatacacattgaaaatagtgagttttcaagaattttccttctctccttcttgggtaactagtttgtcctagctaaaagagagtcaaaaatgtgtgttctggcatggagatagattgagttacgtagtttccatttttcaaagtttcactcaaaaatttgaaatattttaattctggcaaaaaggtgaaatggggtatgctgagaactaaattgaattttaatgaggtcaaaactgagtgtaaaaattctagaaaaattatattaactcataataaataatctagtatttgaataaattataaaacctatatccttcagttcaactttaggcacatttagaagttgcttcattttgccaattaggtttctattaactaagtgtgactatatttgactgatatatttgaggtagtaaaaagaatgataaaattatgaaaccttcatagtggtcatcttaggttgtctaagtgacatgaggatcttcatggattttatgttgcttagatttgttatataaagtctctatgtttatttaacatgtatcaaccaattatgaacgacataaaaatcattacaaacaagtacacaagcacacaatcacttgttactaattctactagccaattgcgaagcatggtcaggtagattatccaaagagcgaaagattaacaactatactacaacgtttcttaactaccgcttgaccatttaatttggttatatacatagaggcttggacaaagcttagaagctaaaagaagacaccaaacaccagaccaaacactagagcttcatggattatctagtattcagtcagtttggtctctagaaacattgttccccttgtggaagggaaaacaaaaattagtctagctactcctcgaaactgttggtagattttattagcaccaaaacactctctgaacgatggatgagtcattaaaaaaagtttttgtttatctagcaaaaggttgtagggtcattagtctacctataatgatcactaaagtttcttaataactcaaaccaacagtttgggaaaatggtttcaatttctacccatgttttttatacacaaattaaccgcatgaggttttgaacccaaatagctttaaaacttccaacttttactaaggacataccccgatttccacttaagttgattaattaaaacttcaggatggtacaatgtcagaaggtagggacctcttggatcatatcatagagaacacttccttcgttcattgcgaaaccatcctggaaatcgaggatacacatgaggaaccatcgatggccgaatcagagaatacaacctccacatcccatgtttcgatcgttgaatccttaccggaacctcaggaaccgaaggtagaaaaaattcagcctttggaatccctgttcttatttgagggtgatctttttgaagattatggacacacctcaaacaattcctgccaaaagagaccaccagtcccacgtacttatcctgcactactcgaggagaatctcttcaaagagatggtgcaggaattaactaccatcatgagtgatgagtgattaaggtaggtggagctttcttctgaagtaactcagattagctcctcgtccttaaatattccatgtctcatgagagaggccatggtgcaaaatctttataatcccactattcatgcaaatattatgtttgcaacctttgcattaaattgcttaggagacgaactgttggctccaagagacagaacttcccggagcccatttggtcctattatcgaaggttatgagattctgcgcagggtgctgatctgacacaatgatgtcgaggctattctagacttccatgtttttgaagtccctgacttccacttctcataggtcatcccatagagaaacttctccttgatgctccgcataccggagtcctcaacatcaaacttgggaaaatggcattttctgtcctgatctttcgatcaaaaaattctttggcagaactcattcccgattccaagccaattgaggaagtgttggctatctcttcatttgagttccccgaatccctcctaaaagatgatgccagtgcattcgtcaaggaggaggacgatcctagagaggtgatcgagttacccaaaaccgatctgccttcacaacctttggttgagccctttaagccttctctatgcctacttgcacgatggtacggaatcgcccgttatcataagcgacaagctttccgatgacaagacctccaagctcacagccgtgttagaaaagcatcgctatgttctaagctactcacttcaagaccataagcggattagtacaatgctctgtactcatcgtattcttctagatccttcttgtgcgccctcttgagagctgcaacgaggactaaataattccacgagggatgtcgtgaaactccaacatgtcgggataatttatcccatcccatatagtgagtgaaagtgtatctaggctcctattgattttgatgattgattacaatgcgattagagaggactaacatttttattcaagcaaatgtgaaggttgttatgtcctcaacatgttgtaatgtgatgcataccccgtgaatgcgacatcacgatgtaatacggcaatgatcaaatggtatattgtatcttgtaccttgcattgtgtcgttggaaagctgtactattaaggggaatgatgcatagacatataaggagtgatgcgggtgctcaaaatctaattttcttggaagcatttctcttattggagtgttctgtaaatttttggatgttccaaaaataattttcggaagttccgaaaatacacagaacaatttttggcgttctggaaattttcggaagctctgaaaatgcgttgacttcgattatttctaagatctggaatttttggaagttccaaaaatgtttgtcgaaagttccaaaaatcacttttattgcacaccaacgggcagatttgtgatgtgggtataaatacccacctcccctcacttgtgagggctgctggttccatttgcaatcatttgtgcccttggcttgctctctcttgttagaataaatgggcagcccataataaatgttaaggataataataccaccctgggaattaaatgaggagtatctcaacttaaatagggagttattggaggctccctgttgaccggttgaggtggggattggaaagccacacgcgcgcgcgcgccgggccgggggcgtgggcgaggcgggcgtgcgtgcattgcattgcgttgcgcctctctgtatccttttgcaacggaccaaccccgagattgcctccgtaacgggcaggcgattcaatacccattgatctcgcgtcgttactacggcaacgggcggatatctctcctgcgctataaggaaagaggcaacccgatcagatctgctcggttactttgcacgctactgttctgcttccccgcttctgattgcttgcgcgcacgagagatcggagcgagcagggcctccggaaccacaccttcgcctgagatttgcaccgggtaggcgggtcatcaggtttttggggagtgcttccgcacgactgctcctcgtcttcgaccgtacgtccgtaccatgtctgccgccgctgccgaacctagagatggcgcgccgggagctggatctggcgctgcgaacgacaacaccaatggaggcatttctgcctcacaatccagcggagggacattcacagggtataaccttctacccttactgttatttcggtttttgatatctttattagtcgcaattctattgcgttcgatgtatgatgatgatgcttattatatcctaagcatgcttctggttatgtttgattttatcactagatcacctcacattgttcatgccatgattattgtcttaatattttggattaaaatatgctgatatatgactatatttccaacaatccaaaaacctgatgggtcattttcgttagttggctttactactgtacgaaaccacatgcttttgatggttctaattataagaggtggaaagcacatgcacctctgtggttgacagcgatgcaatgtttctatgtttcatggggcaaatgaagtgaaccacctctctctcctgaggaagaggttaagttcgaggcttcggattgcctgttctgtggagcattgattagtgtactcgctgacaatatagtggacgtgtatatgcacatgccttcagggaaggacatgtgggatgtacttgaggccaagttcggagtttgcgacgccggcagtgagctgtatgttatggagcagttctatgactacaagatggtcgatgaccgttctgtagtagaacaagctcatgagatttagatgctggctaaagaacttgagaacaacaactgtgagttgccggacaagtttgtggagggtagcattattgccaaatggccaccttcttggtcgaactttgctacttctctaaagcacaagagaaaagagttcagtgtttctgatctcattggctctttgggtgttgaagagaaggcgagggcaaaggacaaccggggcaaaatggttgagggaggttctagtgccaatatggtatagaagaagaaccctcatgcatttcacaacaacaagaaagtcaagcctgatgtcaaacccaaggctacaaccaattttaagaagaaaggcaagggaaaggcaaagggagactgctttgtgtgtggcaagtctggacattgggccaaggactgtcctgagcgcaaagacaggaagtctgccaacatggtcattgtcgacgtttgatgtcgcgattctggtatttgcatagtatggggatcgttggtaccagggtatacacgagacgagactgaggtaaaagagatggagacgaggatttttatacaggtttgggcccctgaattgtcaggtaataaccctacatcctgttggccgaagctggtattgctcttattcaccataatcacaccagtacaatatttggggtaacctatctaactgttgtcgccatggcggtctgaaggactgactcgtagtcgacaacagggtagtccttctcctcgagttcgtgcccagtgagatcagagacagcgcaatgtctctcttatcagtatccggagaaaccgtaggggactagccgtgtctatctctgaagtcgatatccggcgtcttgtttaggcgtatgttggcttgtatgtggatcttgtgtcttgatctattgttccgtgtatgttgattgtggtgggtgttgattgtgatcgtgtcctctctcctcctagggggccttgtatttatacccatgggtgtccccttgtccaagtagaactagggaaaccaatatggatacaatccgagtagtccttgtcgttcccatgtagaactctggttgtctttccttatccggaactcctcctatatctgcaggttgtttccgtataggacatggtatgtggtgggtcctgctgagatttagtcaactactattaggtatgtggtatccatagccctgacagtcattagcgagggcggaggaacatcggggtacggtaaattattacctacagttctctctgtttttcattcacctgattggtgggttgatactggtgctaatattcatgtatgtgctgatatttccctattttcttcttatcaggtcgggagaagttcctccttgttgatggtaaacgggtcacttgcggctgttcatggtgttggtacggtcgatctgaagtttacttcgggaaagaccgtgcagctgaagaacgtgcaacatgtccctttaataaagaagaatctagttagcgtctctactatgtagagaaggttttagacttgtgtttgaatccaattaatatgtcctatctaaatttgcaacttttattggaaaaggttatgacagcagaggcttgttccgctttcctttggctgacatgtgttataataata

SEQ ID NO: 61 - DNA, 1501 bp, Unknown
  Unclassified
tatactctgatcaaaggtgtacaactggacccacacgaaatgaacaaatatcaaatgctacacaccccgtcgagtgcggtacataagtgattcaagctcattacatgccctttcttagccccaccccaaccacctatactacgctggggttcccgacgactcagtcacgtgcgtgcatgatgtgaccaaggcgggcgcgccacgcgggaggcacccccggccaaacctaggcacccgagaacctccaaaggctacctgcctcacgactctccaacgtagtataaatgatcacagtagaactagtaagaacaagccggtcccaaataaggcatgtggtaagtacatagggtgcttgattagatgtcaaaatgttcggtccttaacgacctagatggggctacttgcatcaggggaaaccaacctcccatcatcgccctatcacccgtccaagtccaacatatttcatcaaccattatttagtgtaagtgctcaagttttatgcccaataatgcaagttgtctatataccactattaagcactgtctatccctatagttctattagcactaagcatggctaagcattaatgaataagacatcccaagtaatcccaaccagtggtaatagggtataagacaacgatatcacaagaactaaatgcattaataggttctacccatacaccataaaccgacaatattaatatctaggcaatacatgcatatatatatatatatatatatatatatatatatatatacatatagattgcaaccaaatcatttttagagaaagcataggttctatatgcttaggtgcttgccttgctgctgcgtggaaacacactcaacctcagagtcttgctccacatactccgaattctccgaatctatcgataagaggcaaatatgcaaataagattcgaataaacatgcatatgcaacatgctctacagaacacggggtaaacacagtggacatgtcacattttcaagaagaacatgggtgaaaagaatgaccctatttgctgccatgattctggagatataaaagtgacgagccacaaatgctgaaaatggtcctatgccaaaactgaatataaactatgggtcatttggtgatccccacatattctagcaaattttcatgggtgaaacttgctccatacaaaagagtataatttactggtgataggaatagtattcgattatttaatttggagtttgaacaagatagtaggtatatatgaaacctagagagtgagaaaaagaaaactgctgcctgcagcccttgtgcccaagatttgattcgaaagtttactttacaaatgctcagtgattgaggaaaatgaagaaggcatgatttagctcagctattggttttgtaaatacaatttttacaaggtgctggttagtctatgagggattaagtcgtaacatgaagtttctagctggcctaagaacttatgatgctgaaaggtagcaacttgcttccaatggcaa

SEQ ID NO: 62 - DNA, 1501 bp, Unknown
  Unclassified
cattttcagcatttgtggctcgtcacttttatatctccagaatcatggcagcaaatagggtcattcttttcacccatgttcttcttgaaaatgtgacatgtccactgtgtttaccccgtgttctgtagagcatgttgcatatgcatgtttattcgaatcttatttgcatatttgcctcttatcgatagattcggagaattcggagtatgtggagcaagactctgaggttgagtgtgtttccacgcagcagcaaggcaagcacctaagcatatagaacctatgctttctctaaaaatgatttggttgcaatctatatgtatatatatatatatatatatatatatatatatatatatgcatgtattgcctagatattaatattgtcggtttatggtgtatgggtagaacctattaatgcatttagttcttgtgatatcgttgtcttataccctattaccactggttgggattacttgggatgtcttattcattaatgcttagccatgcttagtgctaatagaactatagggatagacagtgcttaatagtggtatatagacaacttgcattattgggcataaaacttgagcacttacactaaataatggttgatgaaatatgttggacttggacgggtgatagggcgatgatgggaggttggtttcccctgatgcaagtagccccatctaggtcgttaaggaccgaacattttgacatctaatcaagcaccctatgtacttaccacatgccttatttgggaccggcttgttcttactagttctactgtgatcatttatactacgttggagagtcgtgaggcaggtagcctttggaggttctcgggtgcctaggtttggccgggggtgcctcccgcgtggcgcgcccgccttggtcacatcatgcacgcacgtgactgagtcgtcgggaaccccagcgtagtataggtggttggggtggggctaagaaagggcatgtaatgagcttgaatcacttatgtaccgcactcgacggggtgtgtagcatttgatatttgttcatttcgtgtgggtccagttgtacacctttgatcagagtataatctattcgaatagccgcgtcctcggttatgaacaatgcttgatgtgttagtcacttatgttagaatcaaatgtggattattatggatgggattatgtttgatggtggtgttggcatgttgtgccatgttggtatggactttggtagtccatggttgatgatgagagcgccgtttgggctcatttgcttatatatttcagaattatatacttgctgtccataaattaaaatgatgctagagttacttgtccttacttattttactcattaatttctcaataaaattagctttatgcaaacgttgaacctagagacccactataggctagaaagcttgcatacttctctctcccttatgtatatataattttgggtaagacttgcgagtacaatcttgtacttaacccggtgtctgcaatttcag

SEQ ID NO: 63 - DNA, 83943 bp, Mus musculus
  misc_feature (4860)..(5004): n is a, c, g, or t
  misc_feature (21150)..(21169): n is a, c, g, or t
  misc_feature (22247)..(22266): n is a, c, g, or t
  misc_feature (25696)..(25715): n is a, c, g, or t
  misc_feature (26732)..(26751): n is a, c, g, or t
  misc_feature (27894)..(27913): n is a, c, g, or t
  misc_feature (33042)..(33061): n is a, c, g, or t
  misc_feature (34250)..(34269): n is a, c, g, or t
  misc_feature (35850)..(40949): n is a, c, g, or t
  misc_feature (71256)..(71275): n is a, c, g, or t
caacaacaaaaaaccccagcactcaccgaacaaagacaagacctgatatctacaccaagaaacacctcaaatataattccagatgcctagatcccactgcaaaaacacaaacatgaacaaccaagacaatacactttctccagaagccagcagcccaattccaacaggctctgagtaaagcaattcagctggagcatcagccaaggacttcaaaatagcaattgtgaatatatgtagcaagtccttaatgaggatctgaataaatgccttaatgaagaccatgaaaacacagttgagtgaaataatgaaaataatttacagaaatagaatttaacaaagaaatgaaatcgctaaagaaaacacaggttggaataaagatggaagaaaaaaagtcaacacaatccctagaggcaagcctcgtgaacagaccagaggaaacagaagagagactttcaagtcttgaagataaggtagacgtagtggatagctcagtcaaagaaaatgttaattctaaaagtattcagacacaaaagatccaggaaatagaggaaactttgaaaagaccaaatctacaaaaatttatagagaggaagacaacaaaatccaggtcaaaggcacagaaaatatttaaaacaaaattgtagaaggaaattactccaatctaaagaaggaggttcctatcagggtacaggaagcgtgcagagcccctaaacaggaccagaaaagaaattccctgtgatgcataataatcaagatgctaaatatacagaataaagaaagtatactaaaagctgccagtgaaaaagaccaagtcatctttaactgcaggcccatggtgctttcagtggagattctgaaagccaggagagtctggatggatgctctacaagctctaagggacaacagatgccagctcagactcccacacccagcaaaactgttaaccacaattggcagagaaagaaaaacacttaatgaaaacaaattaatgtctaccaatccagctctacagaagaagtcaaaaggaaaacttcagtatgaagaggttttcatccaataggacacaagaaataatcccagagcagttcatcaaaggggagaaggatacatgcaacaaaataatagaaatcaacaaatattgctcattaataactcttagtatgaatggtctcagtcccacaatagaaagacatagagaacagattggattagaaaacaggatccatctctctcttgcaacaaagaagcacacctcaccatcaaaagcagacagcaacttagggtaaaaggatagaaatatattacaattaaatgaacccacgaagcaagccaggtatatagctgttttaatatttgaaaaaataggcttcaagccaaaattaaccagaatatataagaggacaccaaatattcattaagggaaaaattcatgaagatgatgttactattcaaaacatttatacaccaaacacaaaggcacacaagttcataaaagaaatgctactacagatgacatcacaaatcaactctacggcagtgatagtgggtgacttcaatgccctgctctagccaacagccaggtcatcctgagaaaatgctggagttacataacactataaaccaaatggacgtgacaggcatctacagaacatttcacccaaacaataaagaataccctttctcctcagtagctcatggcattttctccaaaattgggcacatattaggacacaaggcaaatcttaacagattcaggaaaattgaaataactcctgcagcctacatgacccccacggaggaaggttgagtattacagtagggacagcagaaagcgtccaaacccatgcaagctgagtaactgactgctgaatgaaaactgggtcaagacagaaaccaagaagtaaattaggaacttttagaattgaatgaaaataatagcacaaatgaaaacattattttttaaataataagaaaaaagagtttctcagtttggcatttgttaccattcaaattgagtttgggttgaaatttgtcttttgctttgttgctgtttccaaggttatgcaaagtaatataatgtaccctttgccataggaaatttaaaactgtctcagagggaaatcaattttcaaacatcttttagttgctttgcatacatgttataattgaatgtatgttttctgcattcttttacatatttggttaagtatgatctactataatttactatatgttagtgcttggcattagtgaacagcagtcctttaaaaaaaaaaagaataactttacctcatttgggggctggagcgatggttcagcaggtaagagcactggctgctctcccagaagacctaggctagactctcagaacacacatggctgctcacaaacttctataactccagttctcgaagattcaacacccccggcctccacaggcactgggcaagtatgtggtgcacagacatatgcaggcaagacaaccacatatgcataataataacttaaaatatttattttacttttaagtatgtacattcatgtacatacttaattgtgcttaacatgctttaattatgtgtgtgtgtgtgtgtgtgtgtgtgtgtgtgtgtgtgtaccgaggcccgaaggtgctggatcccgaggctggagttacagctgactgtgagcttcttgctgtggatgctgagaactgagctccagccctgtgcatgaatagagtaatatgtgctcttaactcctgagtcatctctccatacccatttcttttaaaatactctataattctgtatgtcaacaaactcactcaggctgggaaatgaagagcggccatgtgcagccgcactttctaccgcctcagtcaggctggccttgctctggttcacataaaatgattttttttttccaagtgaaccatattttggcattagatggagaagattctttagatttttaaaatcatgttcttttcattgtgtgacctattttggttttgcatgcttatatgtattattttactgttgtgtttctcgatgaatatattttcttatttggaaggaactataaaaataaaagcacgtttattttaggaaaaatgaccaggggatattaggcatttctttaaaattccaactttttttttgttttttaaaggaatttgactttcagtatcataggattgagctaagcactcactcaacatctgacgacagctccaagactcagtaatggcttcaaatcaaaggattatacaattcagtctctaatattaaagccatataacatcatgtggactgttcatatgttccatttgctttaatacagggatcctatcacgctcttctcatcagaggcattctcaattattaaaacgagggcaagactggttttaatgtagtgtgtgtgtgagtgtctgtgtgagtgtgtgtgtgctgtgtgtgtgtgtgactgcgtgtgtgagtgtgtgtgtgctgtgtgtgtgtgagtgtgtgtgtgctgtgtgtgtgtgagtgtgtgtgtgctgtgtgtgtgtgagtgggtatgtgctgtgtgtgtgtgagtgtctgtgtgagtgtgtgtgtgctgtgtgtgtgtgagtgtctgtgtgagtgggtgtgtgctgtgtgtgtgaatgtgtgtgtgctgtgtgtgtgtgagtgtgtgtgtgctgtgtgagtgtgtgtgtgctgtgtgtgtgtgagtgggtgtgtgctgtgtgtgtgtgagtgtgtgtgagtgggtgtgtgctgtgtgtgtgtgagtggtgtgcatgcctgttgaccctgtgtgtgtggaggttgatgtaaagtattgtcctctatcacagtctacctcatttttgagacagggtcttcttttcttgatcctcaggttggagaagcctttttgttagattagctggtggtgagctccagggaccctttggtattcacaccagcgtgtgagtaatgtctctttttgccttatttagcttttacatgtgtgatgaggatctgagaccatgactccacacatgtataggtagacttttgcccacagagccatcaccaaggccccactcttttttttttaaattagatgttttctttatttacatttcaaatgctatcccctttcctagtttccaaaaaaatcttctatcccctccaccctccctccgatccccaacccacccactctcacttcctggccctggcattcccctgtactggggtatagaatcttcacaatacctaaggcctgtcctcccattgatggcagactaggccatcttctgctacatatgcagctagagacacaagctctggggggtactggttagttcttattgttgttcctcctatagggctgcagactccttcagctccttgggtactttctctagctccttcattaggtaccctgtgttccatccaatagatgactgtgagcatccagtcctgtatttgccaggcactggcatagcctcacaggagacagctatatcagggtccaaggtattatattttaaacaaaatgcataacacaacatgggaacagttttccttttgtactaaatactgccggatattgttaaaatgtatttctgttttcactttccatactcttgtataaccagttcattttaaggaagtcaaaagtttacagtcagtgtagagaggggcatctacactcccttggatttgggctatggccttcctcacaccatcttccttagggcaacaaaagacagcactgtgcatccattgtcacagtcaagcctcctgacccactcttactcttgtgttacctaccacccagctttgccctcagtgtgtctgcacctttgtttccatccctgctgctaccatcctagtgcannnnnnnnnnnnnnnnnnnnnnnnnnnnnnnnnnnnnnnnnnnnnnnnnnnnnnnnnnnnnnnnnnnnnnnnnnnnnnnnnnnnnnnnnnnnnnnnnnnnnnnnnnnnnnnnnnnnnnnnnnnnnnnnnnnnnnnnnnnnnnnnngtgtctaacacacacacacacacacacacacacacacacacagaagctttaacagctagggacaaatctcaaaaacatgttgctttcaccacggaacttccttcttacgctctgtgatccattgtatttccatccccagacacaataaactcacgttcacctcagaatgtggtttcctttgaaacctttatctagaaccctctgccttctgatttcttcttactgctcagcttctggcgtacataatggctctttccaaagccttcctgtgaccccattccaatcacttttatcctttctgctgtttgctatgatcgtcagactacaattcggtaaattcataacatagtttgaagattttaaatttagattagtatttcagagagtttttttgtttgtttgtttggttggttggtttttgtttgtttgttttttctgagtttttacaaaattaaacgaagccattttgttacagactcagggatagaaaggctcaaatggcatttgtatactgagatatttacaagttgagtcacaggcacaccgcaatgctgaacatatgactcacactttacatcttctgtgcagttagtgtttagatgttacagcattgtgccaaaggcaaacgagctgtttataggattaaggacctcagggattgctccatcctggttttcctcccgagtttactatctttaaccaggtccgtcttgtttggaaagacaggtctgtcttcctgtgtcctattctttttaaatgaacctaagtttcttctgtagtatacacagttcctaatgtcaagttgtatctgccaagcttcaggcctctctctttgcttagcctcttgcttgtgatcattagcctgggccttctttccgttcttggaatttaagctcttggcttccccgccccttaccatccccagatccctgtttatactgtgctctcactggaatgcacgctttgcaaaggcagggatcacttccaagatactcaccattgtgtcttcagagggctaacctagcatctggcagcacagagttattgaataaatatttgttcaatggatgaatcaagatgataagtaagactggttgcacagtatgatccagagtcaagactgaatttatatattgaaaccacacaggaaatgatgaagacaaatctagtgtggggttagttgtagaaatgtggatggaatagtttggaacaatgtcagatgtaaggcacaacatatacatagtcatttttataagtagaattcaaccttgtcccaatttcaagagtgtctatcctacctggaaccagaagacagatgtctagacagcttttggaaaatagccctacagctatatttgtataccataaaatgacatatttataactgcattcattataatagttccacagtaaaatatatgggtaaaaatgaaatgttcatagaggttggctatgcacattgagatatacccattcaatggaatagcatgcagtgtagagagtgagtgagctttctaaatgctgagataggagattttgtatttttactaaataaaaagcaacatgtataactctctctctctctctctctctctctctctctctctctcgtgtgtgtgataatacttctttgtatgtaaaagaacagggtataaaattctcctgtatatatgtgtatagcttttgtgtttaagcatggtaaaaatgtaaactgaaatataaaattccataagtcaaagtttctatcatttgtctctccacagaatgaaggctgtgatgaagactggttaggaaaagctaggaagttcatatagcaactgactgcatcaaagaagttctatgagtttttcaatgattttcaatgcaaatttattttaaatatctttatttttgtatttgaaatacaaattcccaaacacgaggggcaagggcgacacacttcttctttttgagatacagcttctatttgaagcttttcaggtgacaacattaatctttaaaagtcaatagatgtagatccttttcttatggatttacaatgcacaaggtggagatattttcaactaaggatgaagctaccgttatctggaaagagcacagagcagggaactctgctgctctcttctgtatgtgctttacagtaaggacagaggatgtctgccactgggtaactcacaaggacaaagagagcagctgtcctacagatagctgaaccgctagcctaatgagaaccattgctaacaagtaagggtctcaaggacaggaatgaaattccccaccccgtcttggtcccatcactggaaagtaatcaataacttcgaaaggaatttaaactgatacaatttcctgcctgactgtaacctgctcagtgacattcctcagagagtcattttataccttggctccaacattgcgaacactccctcccctgcacattgtaaagagactgggcattctgtagtgtgcactgagaactgactgcataacctccatttctctatggaacgtcaactcgtaagaattctgaatctgctcattactaatgtccccgcccccggatggtgggatatcactaagaacatcatcataccttctgtcctttcctattcctccctgggagaaaaatcatgggatgttctgaactctctggctttaaatagatacagttatagaacagcacaccctcctctgctttgaaagcctagtgctttaatatttcatgaatcgaagacaactgtgtatgtttgaaatatggggtgctgttgactctgccctctgtaagcacaatgggaaagggaagaacaatcacatccaaatgattcaattttgggtctctgtctctatttggtctacctgcaccacctggtggtagtgtatgttaagtgcgaagttgtgtgtgtgtctctctctctgtgtgtgtgtgtgtgtgtgtgtgtgtgtgtgtgtgttttgcaggtacaaggaaaagagaattttaatgtatgtattcttaaatattcatttagggtggtgatacgatggctccatactaagtgtaagatacagacagtcacagtcttgctcagtacaggataggcacaagctcaggctggaaagcaaaaggactctcttgtatccattagctattggccttattattcctggaattatcagttattttttatgctattgctctcaggaaggcacaagtcaaatactaaggtgaaaccatttttctaaaagaatgatagttttgcaaattatgtgtcctttgcttctgtgtgtcatcctttgaaataaatcacaagacaggatgttaaaacggcagcacaccctagcctgattagacgtggccattgatttgatacctgaagcagcagctgagccatggggaagtaagggatggagccaaggccacactgtttgttagaatcccagtccggtaagaaactaggtcttctcagcctaaagactcacacccaattgtgcaagatctgtgaaaagatgtgtccttgcctagggatacctgctttcaggccctgagccttgggttgctctagtgctctgaatttgaaggactaaaaacataccctcacttaccaacctcctccgtgccaatgtattgtaaagatcatctaacatttaagaagcccttatatatgttgtagggacatatgtttttcacagactgtacagcttctgtgtttaaaaggtctaacattttcctttctctttgtaacggcttgggaatcagaggtctgtttccacagcgtgaatgcccacttgtggatttaagccgaagccgtgtccacagctcccccttacgaccactcaacagtgtacaagcctccttctaattctgctgttttagacaacgaacagctcactggttaagttttaattgcttccaatgaggtcagcaaaggtatttattgaaaatctctgaataaaaggctccacgcactcacacaagcgcacgcgctcacacacggagaaaatccttttgcctgttgatttatggaaacaattatgattctgctgggggatttctcagctgagaaatagtttgtagctacagtagagaggctcaagttgcacgaggcagacagcagacacggaactcttgtgtacccagctgttccaaacagaacaagtaagttactgttatttgtctttaaaacaatgctcttttctgaaagattttctctttctgtggttattgtcctggggtggggtcaggggggaaagacttttgagctgtgaaaatatctacagaaattgtgctgtagtacggacggatggaaggagactcttgaggttctccagggcaatcctgacacttaacttgaaaaatctgggtagtttaagggaaaataattataaagcacaaatgtaaaagcatagactaatgaattccagggaattcaacttcaactttgtcgatagaggctgtaaaacttgatttaactcaatagctgtgagtacacagtgtttcctgacaagatagcaactggaatgaatggtgtggttttcttgtggtgtctcctcactaacgcatagcgcttctgaatctatgtgcagagtggcagagatgctcacgtcctctgtgggagctgttttaaacgtgctttcaacatttaactacactgacatgttagactatctaactactgaaatttatacatacaattttttttatctccctctcctctccccctccccattcctaatctctctcttcgagcagaagtcaaggagcaaccgcactgcagcaactggccttgtcacgacctgtttctataaggatatacctatcagctgtgttcctgaaggaggaatcgtgttattggtatcagaagctaaaagataaggttaacagtttggaaagagcgacgactttttctctcatcaatctccagttcacaaataggaggaggcccatgacctaggagtagcaatcaacgcaagattcaattctcattatgttattcatgaacacccggggcactacactataatgcgcaaatggatactgacacggatcctgccaactctgctctacaggtcatgcttccacctcgtctgtctagtgggcactatatctctagcttgcaatgacatgagtccggagcaaacggctacgagtgtgaactgttccagccccgagcgacacaccagaagttatgactacatggaaggaggggatataagggtgagaagactgttctgtcgcacccagtggtacctgaggattgacaaacgaggcaaagtgaaagggacccaggagatgaagaacagctacagtaagtgatgcctttatcacagccctgcttagctctttaaggtttgtctaaggttcactttccagtgctgtattctcctttcctatgggggcaaaaaaaaaaatcagtgtcatatatcaagtcctaatttttctaccttgggatttctgcactaactccctaaaatatctctggtaatagggcaagtgtcctcaccttatggttggaactgatatagttggaaaatactctgtggcttaaatccaaactactggttagtaagaaaccatgtcagtgagcacgcatgctcatgtgtgattgtttccctagcaaagctcagcagcggtgtgcatagagctctcagtaggtgttcaccaaactaccagccaggagtttaaggagcagaggatgtatctgtctttattagtggtgttgcttttgaaaggactctgccatggtactaaccggttaagaatctacttcctgagcaccaaaaactgtgtgcttctaaaacagaagggagtcggtgatgccctggaacatctttaaaagtctaatgagtttgttttagattccttaactccccacccacaggtaacagaccttttttagcagtttctttatcaagagtctgtcatgttaagtctcttgctaatttaagaggaacataaccttgaggaagcagagctgagttggaaggcaggttgggtcggggaccttcacctggagcaccccactttccttagacccagttgtttttttaccttaaaatgccagggcttgggttttcatttgatggttacagttagtaactaatctcagtagtattaaatgcaatggcataaaacacacactcaacatttaccttaggtatttaaaacccacacgtggaaataggtttcttagcactaataacacatgggtggcgttgacactgtatgtttgatagtacgtgtggcagtatagtttgagaaggatacatggagacaatagtgtagctgggtgtctgtgacagggccaccccaagtagttcctatctattcctgaaatatctttttggctctaaactcactgaccaaaaaataagagtttggtgactctttccaaaatgaaaatgagggaccttcatttcagccataactcatacaaactgagcaaggaaacatgccttctggaggactgattccatgggacccagctcagcagtggccactggaggaggatttgctgaccgtcccttctatgtggccttttcatttgatttgaaaatcatcgagccttattgtagataacagaatcatgggggcagtgacagcatgtgtcccgtccctgtctgttaatgactttggggcactttagtgttcccaatcttcaactggtaaacatggatgcatttttcaaaatctttctccttctcacagtctaattggttctgaggcagggaacgtaccacacaatgtaaagcctcaatactcattacctagttgtcaccccaacagtgaggcaaaagtgcctgctctctctccagactaaccatgcagtcagggctagttgcaaattttataacaaggttattatcatagctcaattgcagacttctttttatttaacgactaatccctttggatgctttccactaactcataaaaaaaggtaaaaaaaaaatgggtgggaacagtcagtgaaaatgagtactatgattatttgagattaaagtagttacaattggaacatgtaaatatatgtgaattttattttgtgttaaattcctggagctcatgaatttcaggtatttgtacacatttacaaactggtaaaatcactttacaatttgaaacatggtgtagtgctaaacctgagaagtcttaaagcctgtttagcaaaccccctttctcatgaagcaaactctatagtaataagaaagacaaaagtctttcccaaaatcatggtgttgaactatcagagtgccttgtacttagaaagacttgacattgtttatgcaaataccaaatacgtttcttacaagtcttttaatagtctaaatttatatactttcttggcataattcaatctcgaggagagagtaagacctcatgagaatctctcagataaactataaaatagttaccattgtcctgccatcctactgaaaagacaagataaggtttctcccaagttagacagatgtgatgggacttttgtgtgtagaaaatccaagagtcagaagaataaaggagaataatgtattaggagaaaaatctgataattgttgcctgttagttgagacagacttgctcagtttaagaatgaacataagcagatagacgtatgtgaggctggagctactgagtcagggaatccaggtccaaatagtgtgctcagaagaacttgttcactgtaaccaagcagcatgagaaatgcaatcacaaaagctcagggtggtttcctgagctttcagagtcttcagagttagctcagtgatccgaaggaggaggtccccctcttgctgtcactagaatgacagctaatagtgactggactcaaatgaatagaaatcattcagaaagaaataaaactcaacatcaacccccagacttccttctcatggctctgatgccttccacttttaagcaggtccttaaacttctttggaagccctttaactttaactttggaagtccttaaactttccttttggaagcattggttttcattttcttctcgttagccactcccatggcttttgtttgagtgaaaggcaatttgacctgaaggtatggatgagtcttggcaggctgcttgcttccccagggaagcatggaaccctggggtcatacacatgctaggcacgcctgctacccaccgaagcacatacggacctcctgggaatatgctttataaaacactggtagatatgggaagccttgtagaaacaggtgaaagatttgggtgtgtaatgtgctcccgaggtattgggctgggctgggtggatttagagcagagaggaagagaggggagtggtgggctggtgttagtgttagtgcctcaaatcttcaggggaattgaaatttcacttcaggtaccgtggtgtttggagccctcgctttagtctcctccatcaagtttagatcagaataagtaaattgtatagcaaaaagaaagcaaacaaaccaagtcctccaaacagttcaccaaggatttggaaattcaggagccaaaagtagaccacagtttccactctttaggacagtcagaggggaaccattctcctctctcccctctctggtgcccttcattttcattcagctctacagatgaaactggactgtaacaacaagaagagaagcaggagaagttcatatacaaagagagcattggtaggctgcatcgtggaggccagggaatgaatggtcaatgcttcaagcacttctgttgtaaggactgtcccttggagacaaggctagagctagaggctggatttagataattattggagcagccagctcatcagcagaccgaggcaatcagtccacacctgacaagaatagcgctgctgtttagctgggagctgaggtgccgagtgagagatggcagcagtaagagacagatgtgggatggaaggcccagtgccttaggatcactctcctgctttgtttgtattcagtgactacaatattgtgttcccaacaatagttaacaccatccattcttctggagaagtcctggatgaccagagcctctaattctggaggaagctcatctgcccttttgagcaatattagtcacgtagtaagaaagggttatttgttctgagagtgggccaatggcttggcaacatcctcttttggattggtaggctgtgatgggatgtggcctcccagttggcagaacacaaataaacacagcattgttggatttgactttggccacagaatctccagcaactcaactgtcaacaattctttggatgggtttctgtctgcactagtctctatagtaccccccaagtacacacaacatcttagaatgccgggagtgcaagcatgcttgtgtcccaaagagttcttagtaatttttgtgaaagaacaacacacagtgtcaaaataaacaaaattataaatgtataacctgcttaaaaaaaaaagacaaggatcacgtcacacttgtgcaccctggggcacatgtgcaaaacaaaatcctagacatgattgacaagctggaatcttctagaactggtcagagggattccttactaaagggattccaagtctttaaaatatgaaggatgaatacattactgggggcagatttagaaatgttgactactctatggaaactctgatattaatttttccatattatcatctttatttagttatggcaagtatatgaaactcactgactgctactcacctcactagttcaagtatgttctcttaacatttcttcacttaaaataaccagttgttcatatttatttttcatagttttaattctttgtgtctgtgctgatgtctagtggagggcacgggtgttacaaacccctccaggcagagttgcaggaaggttgtgaattgcccgataccggttttaaaaatcgaactcaggtctctgcaagagcagtccatgctcttatccaaagaaccatctctccagctccacagtgaccatctctacgttactgtcatttctgcactggtccagatcagatggtctttttcctatagctaagccatgtaagatctctgcagcctgtgggttaggaaaaccaaaggccagagtgacctgagggagcagagggaggaggatgttagacatgtgaaggagctgctcgctctagatttgtttcttcttctatttctcaatcttggctggatattgtattcagctgggacctgtaaaaattactgatgccagatcccatccacaaagactcattaagttgatctaggatgcagtctgggcatcaggaattttaaaagctctctagatgattctgagatgcttccaaggctgagaactactatactgtgggaatcacattagagtactggatggattgtagctcaattgaatcagaatctcagcaggagggaggagactggaagtcagtattccttatggttttccagctagagatgaatgtatggctagggttgcaaactgttacttaggggcagggtagaggtggtgggtggggtatgggatgcagactgagacatctcagggatgcttgtacacattttagagcccttgcattttagagggcttcaaagttactccacccccaacccacaccaatggactggagtaactacgcctctctgatttatgaatctaggacttcttttaggccacttggactaatctcaatggcatcaacatgtgctgaacaggcctagacacgcatgtaaggacagtcccatggcatgatataagaaggttgcttaattggataacgcagctgcatcgtgacaggtgctggagcagggggccaaggaaggaggtacagacatcagtgtctgtctgcttctgtgaactcacagacacttctaaattaggctttcatttctcatagccatgctactaaattcaaaggaaagagaccgaaaagacagtggctaatctaaaaaacccagcgtggacagaactgcaggtccccaaaggatgtttccagtctagtggaaaggagtggaagctagatgcttgtcctctttgcaaggctgggattatacataacacgaaggctgcactttggttactttttgttttgttttgtttttagactaaatagttttggtagcatggaaacatctgtagcatcagtatggaacaacacagtatctctacatttaaatttcacatatggcacagaacacatatcgaaaaaaagtctgggcaatagctaatcttcctatactccaagcaggttgaaaataaaaacccttttctatgcgcatgctctgaaaagctgtgttagaggtcattggacagctgatgaagagatggctcagtagttctgagcaggcactgctttctgcaggggacctgacctgaattcagttctcagcacccacgtcaggtacctccagctccaggcactccaacagcctcttggattgttaggcacctgcactgatgagcacttatctcctttaccacattcacataattaaaaacaaaaggtcactgaatatgtaattcttgacaaagcttcatctctgcatttgtagacctaccctaggtagtgaaataattcaatacttttaaataccacgcttcaactttcttaagtggaatattttttcattttccattatatttctcattttatgtttgtttttgaattttggatgcaattatggatatgttgacagaaatatttgagacgaaactcagaatcaactcagtctgcatattttccttaaggcagtgtttccaaattgtatttcttagaacactggtgtcccttgagatattaatggtgtttcctcaagctgtttctctggcttgctaagtgggaactactcagttaataacgctgaattagtctcttgcagcagaactctctgagcctatgttatactatggtcagccccaacttcaaggcaatgttctatggaggttcccacgctgacatgatgacaggacactcctctgtcccccacccatctccctgctcctactctttcttggtagaacatttaaatttcattaattttcaacttgagagcaagctgggatccatctttggagtagtcaagaactaaaccaacctattactcagctgtttgtctgaaacaaagaagtcacacactgccctgaactgccccgtgatttcagaagcccggggcccagcagttctgcggatactgaagcttgcttgtcagtctgcaccaagacagtgttctgcatactgatgaaggtctaaatccagaggtttccagtggggtttaagcctggttggaagttctgtctgagtgctaggcagcactagggggactgttttcctgataggaaatgatgtctgcagctatgcctggacaaccaccaaactacagaagtgtttctcatgcagtcactgaaaatgcttcaggactgcaaggtgattgaaaaactcccaccacacggacacatgtactcatgtgaaagcaacagacttttattttacttatcaaaaaagtggttcaagcaaaagctgtttatttctattttatcaagtaacaagtttcattaactgaccaaaaggtatttagaaacctgaattataggctcttgtaggaaaactagcagaggaccactcatctgaggcttctaaagggtaaagggctagaggctcacctatcctctccacaccttaggtgttttgctggctctttctctgtgtgtagctggcactcatactggagtgctctcagcctcctttttatctccctctggtccagggtgctgcatttagtcagtggaagaaggcagaaagatttgcagtcgttaaatatatttttcatttaactgattacatatttaaaatcaggtaaaaatacgttgttaaatcatcaagaaaattgatgtgaacagtaactaaaagcctttctaaaataaaagaaaaacacatctcatttttttcttattttctatccttcagaagtaaaattattccccacaaacaatttggctaagttttttttttctatgaagtttgaaggggtcagtcagtggaagtctgttttttatcaaggcccactgtataagcaggcacagatagtgacactgggggattaggtgtcagggcaatgtgaagaccaagccttgaagagctgtggtctgtcccaatatttgttcttgtttttatcaacaagcatacccagaagaaatagttcatagttggtattggcttaaggaacatctgtattgagagaaaacaaagaaaacctttaagcatgaaaaagaagttgtgctagcagaaaacaagtctcagagtggttgttttagggtgggagtctgactattagtgagaacggtccttgtactgattggttttgtgtcaatttgacaaacactagattcatcagcgaagaggaaatatcaactgacaaactggctatgggcttgtccctggggtagtcccttgattaatgattgatgtaggagggcccagttcattatgggtggtaccccgatggcaggtggtccttggccatataggaaagcaaaaactgagaaagccaggaggcagcatccctgattgatcttctcttcagttcttgcctccaagttccttcgatgacttcccttagtgacacatggtgacctgggagtttctcaagttacttttggtcaggagtgtttaatcacagcaataaaggcaaagtggaggactcctgaacgcagcgatctgaggaaggaaatgctcactgagaaagagaactgaggacagggagaaagtctggaactgttctcactagttttgagtggcagcagtcggataagcaagggtcttttgtgtcttatagaacttgtagaagtgtttctgatcacatccttggtgcctctggttccaggcggggaggcacagagtcatgggaggtcgtttgtggaatgcgcaccctttcttccttactttacaccaaatgaaaggtatttgaaagactgagcctacttttctgttttcattcttttgttaaattcaatagtcccaatgcctccctttgagagactaaagaatagtaagcaattccacagcctggatttttggagaattaactgtttagttgggagtgagaggtaggctacaggccagaggggacaaatatagagaacacaggggatttcctagcccaacaagagagaagctcaagtgtgccatcctttgagcaaatgctttcaaggtgcttgttagttaccacagtgtgatttctgatagcaaatgagagcaagttagatctcttgaggtatcagtgttgagttcaccaaaggcaaccctgacttttctttatttcaaaaaacacgaacacacatacacacacaccccacaagaagataataaatctttgggattgagagatagctcagcagttaagagtacacactgctctcgtataggaccagagtttagttcccagaacccatattaggcagctcacaagcacatataactagctccggggtggaacccaacacttcttttggcctccgtgagccataattaaaaataaaaccttaaaaaagtctccatgagaacatttgcttgtaatagaccatcagatttttatctgattgaagtatttactaaaaatatgactaccttcaactaaaatgtaaatccccttaggaacacattctgaaagggtcttcactactgtactctcagcgtgtcgcaaggtgctatcaaagtctgctttttgaattaataaatgaattgaatagggagtccactccacttcatatgatgactttctatgaagggaaacttttttggaagtcataattcaatttatgctagcttgaaaacaacatatttttcatacatatagcagcatatatttctctttttggttttccaatcttcgtggtgcttgggtcagagcatgaaatgacggctataaaggctacactgtccttatgaagttcttttcccatagtacttcctgagaagccggagatgtgatggattttagacacatggttaacattttagggtagaattatagagatgaacggctgccttctttagctaagactactgaggtgtctgtgtgtgagaagtgaggtttaactccctcccatgaatagttcaccagatcatagtgtggctacctcacggcctcatgatggactctggacctggaagaactccagccaactttcctccgcatgtctcccttgcttgcttcaattttgtcagacactgaacaatggttgatctcaaagaagtctggcaggaatctgtatctcggcttttaagatttaccttgaaatttatgatcttttaatgtattttaatagttcattaggcattcacattaaaatcattacattgcagagacatatatttgtttttattttaagtctttgaatttagtctctgaaaaaattgtgtgacatataacaggaaacatctctctctctctctctctttggtttttcaagacaggttttctctgtgtagccctggctgtcctggaactcactctgcagaccaggctggcctcgaactcagaaatctgcctgcctctgcctcccaagtgctgggattaaaggcatgcaccaccactgcccagctattttttttaatagaatataaaaaatatagctaaaacaggttaattcttttacaaaataaatgccaatactggaaatggtgaaatattttcctggggtgtgaggacttcttgagctctctcctactgtaagcttgagctagcacttttaattccgtggaatagatagaggcctgagggaactggcaaggccagttgtctcattgctgctccaattttagttttaaaattatacacgatcctgtttgcatcacatccgggtagcattcactttaattatgacattttggtgtgttcaaaactagtggatgactcaactgatcaaatggcactgatggatggtttcctggaaatcgggcctcagtgtgagcatgttcacagagggcaggaccgagaagtggtgtttagtgccattgcatgtgagagtgtagggaagtctcacacatgagcataatgatagcatgtatagtgtggcctgctgtatactttcctgtcacatgtattctattgccaacccctttcatcagtacctcttcatggaaaaagggggaaaaggaggcagcccacgtaatatctttcccccagtgaaagcacgggtcatcaannnnnnnnnnnnnnnnnnnnctttaattatgagatttttgtgtgttcaaaactagtggatgactcaactgatcaaatggcactgatggatggtttcctggaaatcgggcctcagtgtgagcatgttcacagagggcaggaccgagaagtggcgtttagtgccattgcatgtgagagtgtagggaagtctcacacatgagcataatgatagcatgtatagtgtggcctgctgtatactttcctgtcacatgtattctattgccaacccctttcatcagtacctcttcatggaaaaagggggaaaaggaggcagcccacgtaatatctttcccccagtgaaagcacgggtcatcaatattgttttaagataatagtgaaactttttactacaacaagatgtatgtacacacatacacgcacacacacacacacacacacacacacaccacatacacatatgtatatatatacacacacacctatttaaatggagatactttataacaaagagacaatacttctcccaaacagtgtaagtgtgcaatattttgctcacaggacctggctcatttcacaagtgtggatgggctggcagacataaacatgctttgtaggtagggactggctctgaactcctaagggaagcaatgtgtagagtgtagatgtgacctcaaataggcttaactcagaaatagacttctagtttccactacttgtatcactatactctgactggtatcactaaaattccacatattaatatgtaccatgctgtgggataatttgcatgtgaaatatataaacataaaattgtctttcctgtagcatggtctaatgagtacttagcattatcttctgttgagcgaatgctttactccagcttcctcccctttacaacatccccatctgctgctctgccccgtgagttggtgcagtaatttcagattcttttgcttaaagattgctaaggatgcagacaaagaacaggctttgaatgcatttccaaaatgtactgatatgtctgtactctgctcatttaaggtctgcataatttatacaacaggacatacatatacacattaatttcagaaaattaaannnnnnnnnnnnnnnnnnnnctggcagacataaacatgctttgtaggtagggactggctctgaactcttaagggaagcaatgtgtagagtgtagatgtgacctcaaataggcttaactcagaaatagacttctagtttccactacttgtatcactatactctgactggtatcactaaaattccacatattaatatgtaccatgctgtgggataatttgcatgtgaaatatataaacataaaattgtctttcctgtagcatggtctaatgagtacttagcattattttctgttgagcgaatgctttactccagcttcctcccctttacaacatccccatctgctgctctgccccgtgagttggtgcagtaatttcagattcttttgcttaaagattgctaaggatgcagacaaagaacaggctttgaatgcatttccaaaatgtactgatatgtctgtactctgctcattagggtctgcataatttatacaacagacatacatatacacattaatttcagaaattaaaccaggcaattttaggggtagatctagatctgggacatctagtcccaggaggactaagcacatcctctcttgaggtcctattcttaaggtgttaatgcagctctgacacattacataggtgctgtgatatgattgattaagttattttagtgtcttataaaaccagtttagaagttctgtgttctcaaagttacaatggttctttctagtaattaaaagtagtatttgttgaaatagatttagagtatatgttgtacagtatactttggctgcattgatacataaaaaattttactatgggggaaaatttcagctcatttgggatttcaactccacaaagagtagtactatattaaggaatgcttgtgttcacagtgggacacatcttgtgacctacctaccaggtgcatggcccttttaacagtaacagatatgaatccttattgtgaagtgggtcttcaatcagaaagtgttaccactataactatcactctgtactgcatcagtgggcacactttgccaggctggttgttattgtagctcattcccagcaaggttgttttgttcattatctttctcctcgcctattattatctccctatgagagctagccaacagggatggatgaaacttgctttcctcatgctctacaactcaaatacgtggtatctccagaactagaatattctggaaggcaaccaagggctatggcaatagcttataaagtttggtagtctctcccactgacttgataagtggtagcttgcacctggcttcttgttagttaacttatggtgtttgtgagagatattgtctctttgctataaggaaactcctttaaaaatcacatacacacacacacacacacacacacacacacacacacacacacacacacacacacacacacagagtttcggaagcttctgcatcagaaggtttccatttggcttactcaactatctttagtgtgttatccctgtccatgctgtagcctttaccttgccctcccatctcccactccacttcattcttcctgttccattattcccgtttgtaccacctgtgttctctctgtctttttttacattccttccaccataccctctttctggccttttgacttatagcacacacaagtaaagattcaaagctagcatgcatatgtgcgggagatcaggtggcctttgtctttctgggtctaggttacctcactcacaatgtttatttccagcatcatccatttacccaccaatttcatttttctttattgatgaacaaaattctgttgtgcataggaacataggtacataggtcatggctattgcgaccatctagtgattggatggaccatctagtgattggatggaccatctagtgattgccatatgcagggatccatcccataatcagcttccaaatgctgacaccattgcatacactagcaagattttgctgaaaggacccagatatagctctctcttgtgagactatgccggggcctagcaaacacagaagtggatgatcacagtcagctattggatgggtcacacggccctcaatggaggagctagagaaattacccaaggagctaaagggaactgcaaccctataggtggaacaacaatatgaactaaccagtaccccggagctcttgtctctagctgcatatgtatcaaaagatggcctagtgggccatcactgcaaagagaggcccattggacttgcaaactttatatgccccagtacaggggaatgccagggccaaaaagtgggagtgggtgggtaggggattggggggggtgggtatgggggacctttgggatagcattgaaaatgtaaatgaggaaaatacctaataaaaaaaatggacaagcaataaatatggatgagcaagtagccttgcattagaatgcagaattctttgtgaatatactcaggagtggtatagctgggccacatggcatctatttctaggtttttgaggaacttctagaatgactccccacttgagagtgccagcattcactccagtaatgagtaagtgctcccctttctctatatccacaccagcagtggctggaatttggtttttgtgttttagccattctgactaggataagatgaaatttcaaagttgttctaatcttcatctacctcatggataaacagggcaagctgaatatacataccaaagaacaaaactagagttatatgtctcactctgcaccaaactgaactctaagtggatcaaagcctcaacacaaagccctgatgtactaccctgattcagttagaggagaaacagagtaggcatcaactcataggcactgcttggacttcataaacaggacatgaatagcatgggcaatcagaccaacaattaataagtggagcctaaaaacactacaaagtttctgcatagcaaaggacaccattaagccgaccaagaggcagcttacaggatggaagaaattgttaccagctatacatctgacagaagagtattgtctagaatatgcaaaacataggaagctaaaacataaagttaaaattcaatttaagcagggcatgaagtgatttatgattttaattctcaatgagctgtattggttaggaatctatgtgaagctttgaaggaaatatgtctcaccaaaacccctatcagttaaattcctgtccaattatatacagtgattctatcagtaggtgaagcagctaatgctttcattggacctacatgtttttattttttaagtggttcttggttaggcataattaatataatgtgtttgaattgctaggcagctctccttgatgctggggatgttttctcattcatctttttattcttaaagccagcacagtatcaagatagtaggggtgcttgaattaagcaagaaagagtcaaacacaggagtcannnnnnnnnnnnnnnnnnnnttagcatggatatttaatgaatctagagaacagactcagttttaacttgttgctattatgtcagacacttaaccagttccactgtcttcctctctgtgtcttagcgtgacgtttggacttctacatgctatatgctatcctttctcatctctttaccttgattaggaatgtgctgctcattctactcaacaggttggcttggaagaaagaggttggaaatggcagagacaaactggagggataagaactttaagatcatcaaaagttgttctgtgggtctgagtccctcaggttagcatcttctcttgtgtgggtctgtgtccctcaggttagcatcttctcttgtgtgggtctgtgttcctcaggtcagcatcttgtcttgtgtgggtctgtgtccctcaggttagcatcttctcttgtgtgggtctgtgttcctcaggtcagcatcttgtcttgtgtgggtctgtgttcctcaggtcagcatcttgtcttgcagagagcttacgctcaggccgagctccagtttagacccatgcaggtctgagcaggcctgggaaccctgcagggctcacacatcaccaaggacatctgtgcttatctgcggtgtctgctctcaagggctagcaaaactgccagctcttcccagctccttaacactgttttctgtgttacacctgcaattcaaggattaattaaatgaacatagtggctcatatttgtaattccagcagtggaggcttggctgaggcagggagattgccatgagtttaagatcaacctgggctatagggccagactgctttgaaaattaagagagaaaatgaaaagaaaaacaataaaatctgagccaccctttaattaaaggaggggaaaagttgacagcttaattcagaaagccggcctgtgtctctcgctgttagtggttctaaagtgattcaggtgtataaagaacactcccagattccatcattctgaccaacagattcacgctcccccacccctgtcaaagtccttgtnnnnnnnnnnnnnnnnnnnngataaacagggcaagctggatatatacataccaaagaacaaaactagagttatatgtctcactctggcaccaaaactgaactctaaagtggatcaaaagcctcaacacaaagccctgatgtaccacccctgattcagttagaggagaaacagagtaggcatcaactcataggtcttaatcgcgttctcacgcccggccaggaaagacgcaacaaaccaaaatcttctgcggcaaaactttattgcttacatctttgggagccaggagggcaagcgcccagcgcccagccccaaaaacgaaaagccccttctattacatctttaagagccagagctccggcgcgcgcgctctattgtttacatctttaggcagcgagcgagcgcagggcgcgcagagccagagagatgccagcgagagagaatggcggaaaccccgtccccttttttaggagagttatatttcgcctaggacgcatcactccctgattggctgcagcccatggccgagctgacgttacggggaagtcagagcacatggagtggagaaccaccctcggcatatgcgcagattatttgtttaccacttagaacacagctgtcagcgccatcttgtaacggcgaatgtgggcgcggctcccaacacataggcactgcttggacttcataagcaggacatgaatagcatgggcaatcagaccaacaattaataagtggagcctaaaaacactacaaagtttctgcatagcaaaggacaccattaagccgaccaagaggcagcttacaggatggaagaaattgttaccagctatacatctgacagaagagtattgtctagaatatgcaaaacataggaagctaaaacataaagttaaaattcaatttaaacagggcatgaagtgatttatgattttaattctcaatgagctgtattggttatgaatctatgtgaagctttgaaggaaatatgtctcaccaaaacccctatcagttaaattcctgtccaattatatacagtgattctatcagtaggtgaagcagctaatgctttcattggacctacatgtttttattttttaagtggttcttggttaggcataattaatataatgtgtttgaattgctaggcagctctccttgatgctgnnnnnnnnnnnnnnnnnnnnggattggtttaggtgcattttctgcaatcttttttcttttcagattaaacatattttgaaaaccaaagaagtattattccaaatttagacacttttctcacttgaaattagtttttttttcccttcatgatattttaatctaaaacaaatggggatttttacctcatctctgtttatagtttgttaacttttctaatattttagtttatatgaaatgtctaagaccaattaagttcagatgataatagctgtctaggatttaaaaattatatatagctatcttcatgtcttcagagaaaataaaataatatataatgtatttgaaactttttatcatgaaataaattctaattgcttttatagtcaagtttagttatatcatttgaactcagacagtagcatctgtaggcaactgtatcagacttcctcaagcatcctgaaactttatatgacttacatgggtttcctaataaggatattagcttttcttttaaattttctttttcataaaaactgtggtaggtttctaaataccaatgtcttatgaaatgctcttatttattacctgtagaggtgacattggttcataaagtatatgtaaagtatacagagataaaaatgtgagtgtttatgggcttcaacaggaagtaattagtgaccactctccactgctttcctagaaaaagcagagctcagtgggttaatgttgagtgtctcagagtgtactcaaaggggtgaaaggggacagatggaaagagttaggacgttccgggaaagtaggaccaccatagaaaggtgggggtggggtgaaggggggggttggtgttagaccttgatatcagacttttctctgagggcagaaaagtggggaaaagatgtggacgccgttgcaaaaagcccaagtggaggctagctgagctgtgtctatctgcagaatcaatatggcatagggaaagtagtaatacagaggtaggacatagacaaagcacttcagcgttttttgcctttaacttcccattgtgaagagggaggaaaagaacagagagtaaggcagtggccagttgagggaatggtgtcaggaagcaactagaaagaaatgcaggcagtgagcattgacagagtgatctcaagagaaagaaagagactcagactcatcaagcgagcaggagaggcccaggtcacaggagggcacaggcccccacccagcagacagccttgctctgatgaatgcctcattaagcactgggagaaactgcctcagagtcagatgtgctcagcactcttacactggtacaaagctctcagaaagtaagtggacaaagtgccaaggcagaatccaaaagactattgggagttgttatacactttgttgtttttcctaatttaaaactgacaatataatacttgtatatttagagcaatcatagttttatccaagcacataggaaactgatggaaaaaaattactttacaactttgacatgttttgatttttctcttcactttttgaagtgatttccacatagtagcggatatacatgtatgaaacttttgatggacatgcacatatatctatctgtacttatgtatgtttatttatatattcatataaactccgtctgacacatgcagctgtcagctcctattttaggcacagtgtcataggaccagcaaggccccacccaaatgcccagtgtctgagcattccaagacataactgatgaaacgtccctcggagctttccaagaatggaacctttagagcctgctactagtcagcttaaagtcttcctcgtggtcctcagaagctcaggagacctgcacctgtgccctcactcagcatacccacctctgccctcctccctagctcacactgcttcctcccgatcttcctcattcctagagcatggtgctcccaccgtggcctttccccagcctctctcctccccccaccccttctccctctctttatctctctgaattgtttcttttgttagatatataggtagctcacgctcccacttcttcccagtctttacaggattgttaactttctttcccccacactgagaacatccatatcttttctacccaatccacatacttccattcttgctggttgttactctccagcacacactatacctttatcttgtatatagactctttccccagctaggagaagaaagcaggagactcttgtctggtttattcactgtcacatacacaatactgaatttggagaatggaattattagctaaggcgatgaattccataaaaagtcactgactattgtattcagcacaggaccaggaatgaaggttagaaaacaaggcaagacaattgatcaagactctagagttcatcagtggcagagcccagcccaactccatccttggctccttaacgtaagatggttaaaatcaacctcgaaatcggcgtgagggcttttcttccctttcatttgagtagatctttgatgtggcatgctaggatgagtgctctggattatgggagcaaggaccactcctcattgtctgtgaagtaaggggagtgatatctgcctctggactggtttggtacctgactctttctgagcccctgaagaaaggtcctttcctgttttctaacagaagctacaagcagtgatgctgtattttcccatgtgtatgactgcgctgcctgacaactgtggagcttttctcataccaggcacaaacacagcagcgcacacacagtatctaattagaatcttagaagaatccagtgatgttggcattgctatttttgatttacaaatgagaaaaacatctcagaaagaatgtgttactttgaataaacacaatgtcaggaaaaatgacttgcgtggacttctaggaggtgacaggtttactctaatttttcttgtttttttttttttttcctttttttgttttgttttgttttggtttttttcgagacagggtttctctgtgtagccctggctgccctggaactcactctgtagaccaggctggcctcgaactcagaaatccacctgcctctgcctcccaagtgttgggattaaagacgtgcgccaccactgcctggcgacaggtttactctataagtgttcaggactcgtgttttcattggtgcttcctggtgagagtacataagttgagatgatgagggattcacatgatcaatgtttcatataatgaagaaaaaactgtgtggtctagtaccgtgtagacgaggccttagccagcatcactaataaaccttacttgcactgctgaacaccaaccagtgttatgctcttcaccataattattcctattatgaagtttacaaaaattatttcatttcctcaggcttgcttctttggtgagatgtttaaaccaactgacaactaggatcatttgttttagagtgtccataatgattttaagctacttaaaatgcttggccagctaatagagacctgaagaaagtcttaaataatcccactcaatgcatatgtattcctctacgtctcaggctgcaagaactccaagtttttcttgctactttcagtttacacgggatcatacaggcccctacttgttctggttgtttatttctgcatggaacaaactacattgagataaacatatatataatttaaagtgagattgcattaataaactttttactttatagaatcatccttatatgacagtggtagtaacataccaaggcagctacatatgtatttaagataatcctttctaagctaaacacaaatgaatcgatgccagtctgatctctccttcttttagacacacaccattgaaaccctgaacctgaatcctgacactttacctttcttttatctgaattctactttgttggcacctgctcaatattccaatccattctacaaagctgtaatgtatgaaagggcagctattcagagagttgaatttacagtagatgtagtctaatcctgtggctctcggttaggaaagtcacaggctttggaaatgcagtagcttagtacagagccgctctagggaatgttaaggcttacttgtagcgtgtggagatatgtttaacatgggacacttggttccagtgacttaatttcagaactggagtaagagattctttggagaagaaaaactttttgtgatgtttgcttctcatactacagatgttcagttactctcttcatcaaacctaactcagcaagaaatcaatacaacttgaacttgctctggaaactcatgtacaggtcaagcctctgtttcctgtacactccgctccagttagacaaccaggctgctttgtgaccgccttgtcattctgtttccctatgtggacttgtatgggaaatacatgtgaattacagatctggttagcttctccagagctatgttttgccctggccaatagcatctgcaatgtgtagaggtgtacatggctaatgtctttaaaattattcttaagaaacagtttaattcaaataaaagtttacatcagatgtgagtttgtgacatagcggaaatgtatgtcagaaacaacattctgcaagtttacatgcatttgcctccaaaatattaagacagtattgtttatgtacgaaatggtagtgttgctgaattctagccagttcacatcacttccatttctccccccattccaaacctttatatgtcatgagattccctctcaaattcatgacctctcctactgagtgggtcttaagtcctagcagatagctgttggctactcccaagatataagagccacttttgaactactggggatattttggcaggatggccattgttatggtccatgggctctacagctgggtgtgcctgttgattactttgcttccttggcatcttgggtaacacttttggatactatgagaactagtcctcaagtgcaggactccggttccatctctattcctctaagtcctgtgtttgaagtgtgtgatgtcttcagcaataaagtcttaactctcaacttggagaaagaatctaaaggcaatggcaatagcctctattgcttttggggtttcttggactactgtgaccaacaattggaagggaagcttcctacgcctggtactgggggtttggttagtcaatagnnnnnnnnnnnnnnnnnnnngtgtacatggctaatgtctttaaaattattcttaagaaacagtttaattcaaataaaagtttacatcagatgtgagtttgtgacatagcggaaatgtatgtcagaaacaacattctgcaagtttacatgcatttgcctccaaaatattaagacagtattgtttatgtacgaaatggtagtgttgctgaattctagccagttcacatcacttccatttctccccccattccaaacctttatatgtcatgagattccctctcaaattcatgacctctcctattgagtgggtcttaagtcctagcagatagctgttggctactcccaagatataagagccacttttgaactactggggatattttggcaggatggccattgttatggtccatgggctctacagctgggtgtgcctgttgattactttgcttccttggcatcttgggtaacacttttggatactatgagaactagtcctcaagtgcaggactccggttccatctctattcctctaagtcctgtgtttgaagtgtgtgatgtcttcagcaataaagtcttaactctcaacttggagaaagaatctaaaggcaatggcaatagcctctattgcttttggggtttcttggactactgtgaccaacaattggaagggaagcttcctacgcctggtactgggggtttggttagtcaatagctcttggagggagcattatgactatagtggtataactgaatttaaattatatatatatgtatatatatatatacatatatatatacatatatatatacatatataatatacatatattatatataatacatgtataatatattcacacatatatgcatgtatggtcatttatgttatgtttgtatttttaagaaagtatatgaaataatcttttgctacggctttttaaacatccttagtattatttgtccattcttccctcccctaactcttcatttctctccttcccccccgccttttaacctcccccactcactttttccaccctccccccttagtagcacccgtggcctactgtactcctctctggcgatccttttccttcatatcagggttccttcttccttccctggttcctgcagttactcaaggctctgtatgcacatctgaagacttgaagttaggaaccacagatgagaaagaacatgtggtgtttgnnnnnnnnnnnnnnnnnnnnacaattaataagtggagcctaaaaacactacaaagtttctgcatagcaaaggacaccattaagccgaccaagtaggcagcttacaggatggaagaaattgttaccagctatacatctgacagaagagtattgtctagaatatgcaaaacataggaagctaaaacataaagttaaaattcaatttaaacagggcatgaagtgatttatgattttaattctcaatgagctgtattggttatgaatctatgtgaagctttgaaggaaatatgtctcaccaaaacccctatcagttaaattcctgtccaattatatacagtgattctatcagtaggtgaagcagctaatgctttcattggacctacatgtttttattttttaagtggttcttggttaggcataattaatataatgtgtttgaattgctaggcagctctccttgatgctggggatgttttctcattcatctttttattcttaaagccagcacagtatcaagatagtaggggtgcttgaattaagcaagaaagagtcaaacacaggagtcagtcaaagcactgaacagctttcttcaacccagtgctcaacaaacttacacttgtctgcatttttctttcaacttagtttctacttggcaatgtaaagatgctactgtgtcccgctaatttattctgtctcttccttaaagctttggaaattcacacttactttcatggtcacattaacgatagggtttccattttaatgcaaatctacccattcccagactgtcgactgctctaaggagcctccctggtccttcttctctacccttccacattgcttggaaccttgtgatggtaaaatgtgcaaactataagatgccatgcagataggaggcattactgcggctcatcctttaaaaatcattgcatttctcttggattaggtcagagttccaaaagccatatgtatattaagtcttcttcggatccctctcacctttccttccctaccctcacctcctacctcagctaaggccagtgaggtgtatgtagtgatagtagttactaattatttcattcaacattctctatacttactacctttatcaagaacagtggtagaggatacgcctagtcctgatgacttgatgtgtgtggggttgtaagaggggtgtgatatgtgtgggggtggggtggggagaggggtctccctcctcagaggagaaggggaggggagagtggggggagaggatctgggtgagggaaggctgatattcagatgtaaagtgcataaataaataaaatttaaaaaagataatctattagcatggatatttaacaaatctagagaacagactcagttttaacttgttgctattatgtcagacacttaaccagttccactgtcttcctctctgtgtcttagcgtgacgtttggacttctacatgctatatgctatcctttctcatctctttaccttgattaggaatgtgctgctcattctactcaacaggttggcttggaagaaagaggttggaaatggcagagacaaactggagggataagaactttaagatcatcaaaagttgtttctgtggnnnnnnnnnnnnnnnnnnnnnnnnnnnnnnnnnnnnnnnnnnnnnnnnnnnnnnnnnnnnnnnnnnnnnnnnnnnnnnnnnnnnnnnnnnnnnnnnnnnnnnnnnnnnnnnnnnnnnnnnnnnnnnnnnnnnnnnnnnnnnnnnnnnnnnnnnnnnnnnnnnnnnnnnnnnnnnnnnnnnnnnnnnnnnnnnnnnnnnnnnnnnnnnnnnnnnnnnnnnnnnnnnnnnnnnnnnnnnnnnnnnnnnnnnnnnnnnnnnnnnnnnnnnnnnnnnnnnnnnnnnnnnnnnnnnnnnnnnnnnnnnnnnnnnnnnnnnnnnnnnnnnnnnnnnnnnnnnnnnnnnnnnnnnnnnnnnnnnnnnnnnnnnnnnnnnnnnnnnnnnnnnnnnnnnnnnnnnnnnnnnnnnnnnnnnnnnnnnnnnnnnnnnnnnnnnnnnnnnnnnnnnnnnnnnnnnnnnnnnnnnnnnnnnnnnnnnnnnnnnnnnnnnnnnnnnnnnnnnnnnnnnnnnnnnnnnnnnnnnnnnnnnnnnnnnnnnnnnnnnnnnnnnnnnnnnnnnnnnnnnnnnnnnnnnnnnnnnnnnnnnnnnnnnnnnnnnnnnnnnnnnnnnnnnnnnnnnnnnnnnnnnnnnnnnnnnnnnnnnnnnnnnnnnnnnnnnnnnnnnnnnnnnnnnnnnnnnnnnnnnnnnnnnnnnnnnnnnnnnnnnnnnnnnnnnnnnnnnnnnnnnnnnnnnnnnnnnnnnnnnnnnnnnnnnnnnnnnnnnnnnnnnnnnnnnnnnnnnnnnnnnnnnnnnnnnnnnnnnnnnnnnnnnnnnnnnnnnnnnnnnnnnnnnnnnnnnnnnnnnnnnnnnnnnnnnnnnnnnnnnnnnnnnnnnnnnnnnnnnnnnnnnnnnnnnnnnnnnnnnnnnnnnnnnnnnnnnnnnnnnnnnnnnnnnnnnnnnnnnnnnnnnnnnnnnnnnnnnnnnnnnnnnnnnnnnnnnnnnnnnnnnnnnnnnnnnnnnnnnnnnnnnnnnnnnnnnnnnnnnnnnnnnnnnnnnnnnnnnnnnnnnnnnnnnnnnnnnnnnnnnnnnnnnnnnnnnnnnnnnnnnnnnnnnnnnnnnnnnnnnnnnnnnnnnnnnnnnnnnnnnnnnnnnnnnnnnnnnnnnnnnnnnnnnnnnnnnnnnnnnnnnnnnnnnnnnnnnnnnnnnnnnnnnnnnnnnnnnnnnnnnnnnnnnnnnnnnnnnnnnnnnnnnnnnnnnnnnnnnnnnnnnnnnnnnnnnnnnnnnnnnnnnnnnnnnnnnnnnnnnnnnnnnnnnnnnnnnnnnnnnnnnnnnnnnnnnnnnnnnnnnnnnnnnnnnnnnnnnnnnnnnnnnnnnnnnnnnnnnnnnnnnnnnnnnnnnnnnnnnnnnnnnnnnnnnnnnnnnnnnnnnnnnnnnnnnnnnnnnnnnnnnnnnnnnnnnnnnnnnnnnnnnnnnnnnnnnnnnnnnnnnnnnnnnnnnnnnnnnnnnnnnnnnnnnnnnnnnnnnnnnnnnnnnnnnnnnnnnnnnnnnnnnnnnnnnnnnnnnnnnnnnnnnnnnnnnnnnnnnnnnnnnnnnnnnnnnnnnnnnnnnnnnnnnnnnnnnnnnnnnnnnnnnnnnnnnnnnnnnnnnnnnnnnnnnnnnnnnnnnnnnnnnnnnnnnnnnnnnnnnnnnnnnnnnnnnnnnnnnnnnnnnnnnnnnnnnnnnnnnnnnnnnnnnnnnnnnnnnnnnnnnnnnnnnnnnnnnnnnnnnnnnnnnnnnnnnnnnnnnnnnnnnnnnnnnnnnnnnnnnnnnnnnnnnnnnnnnnnnnnnnnnnnnnnnnnnnnnnnnnnnnnnnnnnnnnnnnnnnnnnnnnnnnnnnnnnnnnnnnnnnnnnnnnnnnnnnnnnnnnnnnnnnnnnnnnnnnnnnnnnnnnnnnnnnnnnnnnnnnnnnnnnnnnnnnnnnnnnnnnnnnnnnnnnnnnnnnnnnnnnnnnnnnnnnnnnnnnnnnnnnnnnnnnnnnnnnnnnnnnnnnnnnnnnnnnnnnnnnnnnnnnnnnnnnnnnnnnnnnnnnnnnnnnnnnnnnnnnnnnnnnnnnnnnnnnnnnnnnnnnnnnnnnnnnnnnnnnnnnnnnnnnnnnnnnnnnnnnnnnnnnnnnnnnnnnnnnnnnnnnnnnnnnnnnnnnnnnnnnnnnnnnnnnnnnnnnnnnnnnnnnnnnnnnnnnnnnnnnnnnnnnnnnnnnnnnnnnnnnnnnnnnnnnnnnnnnnnnnnnnnnnnnnnnnnnnnnnnnnnnnnnnnnnnnnnnnnnnnnnnnnnnnnnnnnnnnnnnnnnnnnnnnnnnnnnnnnnnnnnnnnnnnnnnnnnnnnnnnnnnnnnnnnnnnnnnnnnnnnnnnnnnnnnnnnnnnnnnnnnnnnnnnnnnnnnnnnnnnnnnnnnnnnnnnnnnnnnnnnnnnnnnnnnnnnnnnnnnnnnnnnnnnnnnnnnnnnnnnnnnnnnnnnnnnnnnnnnnnnnnnnnnnnnnnnnnnnnnnnnnnnnnnnnnnnnnnnnnnnnnnnnnnnnnnnnnnnnnnnnnnnnnnnnnnnnnnnnnnnnnnnnnnnnnnnnnnnnnnnnnnnnnnnnnnnnnnnnnnnnnnnnnnnnnnnnnnnnnnnnnnnnnnnnnnnnnnnnnnnnnnnnnnnnnnnnnnnnnnnnnnnnnnnnnnnnnnnnnnnnnnnnnnnnnnnnnnnnnnnnnnnnnnnnnnnnnnnnnnnnnnnnnnnnnnnnnnnnnnnnnnnnnnnnnnnnnnnnnnnnnnnnnnnnnnnnnnnnnnnnnnnnnnnnnnnnnnnnnnnnnnnnnnnnnnnnnnnnnnnnnnnnnnnnnnnnnnnnnnnnnnnnnnnnnnnnnnnnnnnnnnnnnnnnnnnnnnnnnnnnnnnnnnnnnnnnnnnnnnnnnnnnnnnnnnnnnnnnnnnnnnnnnnnnnnnnnnnnnnnnnnnnnnnnnnnnnnnnnnnnnnnnnnnnnnnnnnnnnnnnnnnnnnnnnnnnnnnnnnnnnnnnnnnnnnnnnnnnnnnnnnnnnnnnnnnnnnnnnnnnnnnnnnnnnnnnnnnnnnnnnnnnnnnnnnnnnnnnnnnnnnnnnnnnnnnnnnnnnnnnnnnnnnnnnnnnnnnnnnnnnnnnnnnnnnnnnnnnnnnnnnnnnnnnnnnnnnnnnnnnnnnnnnnnnnnnnnnnnnnnnnnnnnnnnnnnnnnnnnnnnnnnnnnnnnnnnnnnnnnnnnnnnnnnnnnnnnnnnnnnnnnnnnnnnnnnnnnnnnnnnnnnnnnnnnnnnnnnnnnnnnnnnnnnnnnnnnnnnnnnnnnnnnnnnnnnnnnnnnnnnnnnnnnnnnnnnnnnnnnnnnnnnnnnnnnnnnnnnnnnnnnnnnnnnnnnnnnnnnnnnnnnnnnnnnnnnnnnnnnnnnnnnnnnnnnnnnnnnnnnnnnnnnnnnnnnnnnnnnnnnnnnnnnnnnnnnnnnnnnnnnnnnnnnnnnnnnnnnnnnnnnnnnnnnnnnnnnnnnnnnnnnnnnnnnnnnnnnnnnnnnnnnnnnnnnnnnnnnnnnnnnnnnnnnnnnnnnnnnnnnnnnnnnnnnnnnnnnnnnnnnnnnnnnnnnnnnnnnnnnnnnnnnnnnnnnnnnnnnnnnnnnnnnnnnnnnnnnnnnnnnnnnnnnnnnnnnnnnnnnnnnnnnnnnnnnnnnnnnnnnnnnnnnnnnnnnnnnnnnnnnnnnnnnnnnnnnnnnnnnnnnnnnnnnnnnnnnnnnnnnnnnnnnnnnnnnnnnnnnnnnnnnnnnnnnnnnnnnnnnnnnnnnnnnnnnnnnnnnnnnnnnnnnnnnnnnnnnnnnnnnnnnnnnnnnnnnnnnnnnnnnnnnnnnnnnnnnnnnnnnnnnnnnnnnnnnnnnnnnnnnnnnnnnnnnnnnnnnnnnnnnnnnnnnnnnnnnnnnnnnnnnnnnnnnnnnnnnnnnnnnnnnnnnnnnnnnnnnnnnnnnnnnnnnnnnnnnnnnnnnnnnnnnnnnnnnnnnnnnnnnnnnnnnnnnnnnnnnnnnnnnnnnnnnnnnnnnnnnnnnnnnnnnnnnnnnnnnnnnnnnnnnnnnnnnnnnnnnnnnnnnnnnnnnnnnnnnnnnnnnnnnnnnnnnnnnnnnnnnnnnnnnnnnnnnnnnnnnnnnnnnnnnnnnnnnnnnnnnnnnnnnnnnnnnnnnnnnnnnnnnnnnnnnnnnnnnnnnnnnnnnnnnnnnnnnnnnnnnnnnnnnnnnnnnnnnnnnnnnnnnnnnnnnnnnnnnnnnnnnnnnnnnnnnnnnnnnnnnnnnnnnnnnnnnnnnnnnnnnnnnnnnnnnnnnnnnnnnnnnnnnnnnnnnnnnnnnnnnnnnnnnnnnnnnnnnnnnnnnnnnnnnnnnnnnnnnnnnnnnnnnnnnnnnnnnnnnnnnnnnnnnnnnnnnnnnnnnnnnnnnnnnnnnnnnnnnnnnnnnnnnnnnnnnnnnnnnnnnnnnnnnnnnnnnnnnnnnnnnnnnnnnnnnnnnnnnnnnnnnnnnnnnnnnnnnnnnnnnnnnnnnnnnnnnnnnnnnnnnnnnnnnnnnnnnnnnnnnnnnnnnnnnnnnnnnnnnnnnnnnnnnnnnnnnnnnnnnnnnnnnnnnnnnnnnnnnnnnnnnnnnnnnnnnnnnnnnnnnnnnnnnnnnnnnnnnnnnnnnnnnnnnnnnnnnnnnnnnnnnnnnnnnnnnnnnnnnnnnnnnnnnnnnnnnnnnnnnnnnnnnnnnnnnnnnnnnnnnnnnnnnnnnnnnnnnnnnnnnnnnnnnnnnnnnnnnnnnnnnnnnnnnnnnnnnnnnnnnnnnnnnnnnnnnnnnnnnnnnnnnnnnnnnnnnnnnnnnnnnnnnnnnnnnnnnnnnnnnnnnnnnnnnnnnnnnnnnnnnnnnnnnnnnnnnnnnnnnnnnnnnnnnnnnnnnnnnnnnnnnnnnnnnnnnnnnnnnnnnnnnnnnnnnnnnnnnnnnnnnnnnnnnnnnnnnnnnnnnnnnnnnnnnnnnnnnnnnnnnnnnnnnnnnnnnnnnnnnnnnnnnnnnnnnnnnnnnnnnnnnnnnnnnnnnnnnnnnnnnnnnnnnnnnnnnnnnnnnnnnnnnnnnnnnnnnnnnnnnncttaagaaacagtttaattcaaataaaagtttacatcagatgtgagtttgtgacatagcggaaatgtatgtcagaaacaacattctgcaagtttacatgcatttgcctccaaaatattaagacagtattgtttatgtacgaaatggtagtgttgctgaattctagccagttcacatcacttccatttctccccccattccaaacctttatatgtcatgagattccctctcacattcatgacctctcctactgagtgggtcttaagtcctagcagatagctgttggctactcccaagatataagagccacttttgaactactggggatattttggcaggatggccattgttatggtccatgggctctacagctgggtgtgcctgttgattactttgcttccttggcatcttgggtaacacttttggatactatgagaactagtcctcaagtgcaggactccggttccatctctattcctctaggtcctgtgtttgaagtgtgtgatgtcttcagcaataaagtcttaactctcaacttggagaaagaatctaaaggcaatggcaatagcctctattgcttttggggtctcttggactactgtgaccaacaattggaagggaagcttcctacgcctggtactgggggtttggttagtcaatagctcttggagggagcattatgactatagtggtataactgaatttaaattatatatatatatgtatatatatatatatatgtatacatatatataatacatgtataatatattcacacatatatgcatgtatcgtcatttatgttatgtttgtatttttaagaaagtatatgaaataatcttttgctacggctttttaaacatccttagtattatttgtccatcttccctcccctaactcttcatttctctccttccccccccccccgccttttaacctcccccactcactttttccaccctccccccttagtagcacccgtggcctactgtactcctctctggcgatccttttccttcatatcagggtcccttcttccttccctggttcctgcagttactcaaggctctgtatgcacatctgaagacttgaagttaggaaccacagatgagaaagaacatgtggtgtttgctctttttgtgtctgggttacctcattcagtattatgttttcttgtttctttcatttaactataaattccatgggtttcattttcctttaaagatgaatagtattccattatgaatattagcatatttttattattcattcaccagtagaacaacacttaggttgtttctttcctagttattgtaagcagagaggcaatgagcatggctacgcaaccttctccagagtaggatgtcaagtccttgggattatgttgaagagtgctatagcgggtttatatagtagatctatttttaattttttttttttgtaatttttcacattggtttccatgtgttgaattaaattctggaataagaaactgctgtttactattactactctcaataaaattcttgaaacactagctagagcaacaagactagagaagaaaattaaaaggaatgaataagaagtcaattatccctgtgtgcagatagtattatacataagagatcccaaaattccaccagcaaactcctagaaatgatcgacactttcagaaatgcggcaggatacaaaatcaacttagagaaatctgtagctatgtatccattgaaagcctgctgagaaagatgctcccactcccaatggcctcaacgaatatctgcgagtatcataaccaagaaagtgaaagacttatgagatgaaaacttaaagaaagaattaaaattaaagaaagaggttgtgagacattaggagatgaaatacccctatgtccatggatgggaagaattaacattgtgggaacgattgtcctacccatggcaattcgcaaattcagtgcaatcagaatcctcacatagctcttcacagaaacaagcagaccatcctaagatccatgtggacagccagatttatcctaggcaaaaggagaatgctggagaaattaccatcccagatttcaagcaatattacagagctagagcaataaaagaaagaccttagtaattgttacacacccttagcagtcaaggaaatgaaagttaaaactgctttgagatttcatcttaacccacttagaacagctaagatgaacaaagcaactgacagtgaatgtgggggggatgtggggaaaggcgagccctcaggcagagtgggcaaaggtttagtacaaaactctcaaggctttcctggagattgatactactaatttttatttaaaattatttttaaccaagcttttaatttcacagttgtatggcagttagtagaagttaaggaagccccttgtctatggggaaaagctaaaatacattttgcattaaggcagtaacatatgggttttccagttgtaattcatgagttaaacatctagtaggtaagactcatttagaaaatgagagattgggtttagtaagtagagaagaaataggaatttgaaaaaattctcttgatgtgatagccaactttattacttgacatatattcacaagtgggtttattgggtagaatttaaaacattattaatttttatttgtgaaaacgtaaataaaaactggtaatcattctatctctaaacttggtatgaaaaattatggtgatgagacaaatcacgtataaaactgctagaggacgggatactgctaaggatcgtatgtatgcaaaatgattgtagagctatttttattatcttcccatgtaagccacaaccttaaagagacatttcctgggcatgacgttttaggaagggtgacagagaaatgttagtttgtgttcaaatctaagatttgatgtaaatattgttaagatcaggagaaatagttattctttttaatcttagttttctcattataatgacaaaggtaacatctaatttgtatagctatgaaagtttattgaactaatgaacctatggccggagagtgttcagtttgtaaagggctttgaacctgcagtgtagcccaggctggccctgcacttactgtgctctggtttcagcctcagtcatgtttagattccaggcctgcatctaggaggctgttatggctgggaggccatgtggagtcactattgcaagctgctgcatgggtcggagcttgcagctgctttgtcccaggtcattgtacaagtgagaacatgggctgtaatgttcaggagccttcagtcctttccatctggacaggctatgagaagtctagattgaagaaagaactgttcagatgagggctccaagacggggcttctggaggacaactgtactctgaggtatcgtgctcaggccttcagtcccaccaggtcaagtagctttcctatcccgtgtctggcactacagatgccaaatacacagacagtagagggatggtgtatccgtaacatgtttgttactgtctcactttgtgtgtaaagcaaggtcgacctgcacttgtctattggttgtatattattctatactctacagtgtgtggggaaaacgtatctaaagcaaagctttggcaggcactccaggtcagtgatagtttactgaacatgcatgagacccttgacttaaccccaagtaccacaaaggcaaatatttttcaaaataactgtaataagggcatgcttaaagtatagactctccaatagcgttccaaaaatagagggggatattttacaggatttgtggctgggttgattatccttgataaaataacatagaaaaatactttaagcattttaataatttcttgtcaaatctctttcacttttaaacagctatttttaaatagtaacatgtaaataagtgcttctggtgttttcaaaaccttttcctatgattcttcttgttcaaagtagaagaaaataaagtaccctctacttgctgtataattaactaacgagagaaaatgtccattttgtttcatgtgtgctaccttacagttgggcattgttgaaccacagctttctattcccatcccccactcctggcccagtacttagaaacacactcctccagacttttcctctagcgttcagtatgagctggacattgccccagaatgacacttgtgttgcttaagacggtgtcaggaatactctggaagaaatttccattaacataaataaccaggctcaatgagtagccacatggcttgaagtgatcacgtgttctcccctcctgccttttatagctatctctgcaagccattctaaaacatccaagcaagtctagactccatattaaggaattctatttttgttgaacatatttcattgatttttttaaaagtttttacaccaaatgtgacgtgtttcagatctaaggcttcagaatttcatatgttacccaatttccctctgcgctggaaagtataactccaatccctgtattgtacttgatgaatacaatagatgcttttgtgggagatgcagaaagcaaagagttttatttggaagctgaaagaaataacgggagggcaagcagctggagagtgtcttacatgacaggcccactctgccaattagagttgtttggcggggttacgagaggctaatgtaaaacgcactgccgccgcatgaataacatgctggaagtcgaatttctcaaatcttctattccagtgcattaaacaaatacagcatttttatcgtgggcaagcactcaactagacatacaaaaacatttaaaagactcaaaaattaagcctgttggtctctgcctcctcaagaaagaaatgctatggagaaaggaacggcatacccacgtgagaatcacacccaaggaaagtgggagaccagttcttgcagaaaagaatgggagctatgtttgcgaatttcctaagagggcaagacaggatgtggagcgcgagcctggttagaaaggtgaactgtatactgacagtaggagggacctgtgctgggcgtggaccatgtgtgatttcccagtcaaattccatctttcaaatgacacattcttcttaaatcgtgtaggtggaaacgtggacttgaaaagccagtttcatcgcatcatgatgtgaggtgtgagggagcaggcaaatctagtttttaaagtcatgcttagaagtcaataaccattgttactaatatgctagggtacccaaataggtgggctccaaatattaaggcccgacttgggatcagggaaagcagagccattttatggatggattggagtcggggagagagtagggttaaaaaagagcagagctccgcagggtggtggtggcacactcctttaatcccagcactcgggaggcagaggcaggtggatttctgagttcgaggccagcctggtctacagaatgagtttcaggacagccagggctattctgccctgtcttgaacccctcccctgcccccaaaaaagggcagagctcagatgtcaagaatggtgttaattatggaaccgggaatgagagggcctcatgtgccacccagtaggtgggatctgtggtaagtgggaatttcatctgggagaagagaaatgagaattttttttttaaatttcagtttcaaagcttaatggtttggaaaataatggttccaattaaacaaaacaggaaaatttaacagaacaaaactctggcaaatatagtcacttgagtaatttttttcttaaaaatacacacacagagatactttttatgcgtatatatattattaaatttctcaagcaagtgaattctgtttttacacatccacgtatcaagaagagagaaatgatatagtacagattaggaaatgaagtctgttaaaatgatggcaggtttcttggagattcactgaagtaagaccactgtgccaacagcagtagctacccagcatctattaatccagcattgagagacaggcccacaaatcagccttgtgtttattatgttattttaaaattagcagagctatgatgaattacgttaaggaaacacgggagtttttgtagctgtccactaaacgatgtgtttttggaaaggttcataataggttcgtagtaaaatgtaacaaaatattgtaacttttgtcctaatgttgagaagtagtgttttatgcccctgttgatattatttatcttgggctgggaagtgctttcttaattgacacccccctttccctaacttacttaatggctatagtgctgctggctgctcgagtcagataaaacacgtaaagagtctgagagcttggttctaaggtgagacttcagcttggtaagctgagtaagtcgaggtacttatactaacatcagctacatattctctgggggaaaagaaccaagaaaaaaatagtccatttaaacggtcataatccatgactaagctattacttggcaccgagtcatctttaaaggtcactgaaactcacaaacattcacttctagcacagtaattgtgttcctaattaattatcatttaaaggcttcagttgtatttggattattttcatccaagattttcccgttccttctttcccaatttaagacaacacacctcatgcgttttaagctaatgcccactggagaggctctgtaaaagcaggatgactaaaccccgctgctgaccaccgccaagctcttgtctttatagaaatcacagtgaactttatgttctcatagtttctgactttcatacaaataaaaatgtaatacacgagaaaataaaacataaaactcactttctgataaagcttcataaaagcaatgggattagttgcagctgtggacagttttcatgttcccaaaatcttggctttctgaaattatcctttaacaactgaaaaacgtatgagttgcagataatgtcaaagtacttcccccttgcacaagcattttgtctttaatttctacttaattattttaccttttctattgtgtatgtgtatgtaagtgtatatgtgtataatgtgtatgagtgtatctgtatatgtatgtatataaatgtatgtgtgaatatatgtgccatgtggagagtatgtatgtatgtgtgagactttgtatgtatgtatgtatgtatgtatgtatgtaagtatgtatatgtgtgtgtgtacgtgtgtgtattgcagtgtgtgttgcatgggtgcaaaaatcagaacttgtagtagacagcttcgtcctcccaccatgttgggccagcacacacagctcagattctcatccctagcaaccatctttaccttctgaggcacttcgctgtccctatttctagttttaaaagtctactgctacatagttaatattcagtcgtgtctttctttttatcctcttctttcctcctcttccttccccactttttcttcttggtgatgtgaatataaaaattgtaggatatctctcctggaaaatttcaaagtgtataagtggctgagacagatatttgaacatatttgatcacttctttaattttaattttttaatggttcttttatttatttacatttcaaatgttatccaccttcttggtttcccctccacaagctccttctcccactccctccccctacttctatgagggtgctcccctacccacccacccactcatgcctcactgccctagtctaagcatggactgtccccactaggaacccttaggtagacagcacaaccaccctttgcctgcagcaaacttgaaggctatctcagcagatcactgtaattatggagccagcaggacttttctgaagccctcctccacgtgacacactccagtagtgctgtgtgctgttaccactgttaactaagagtgagcgtgataaatgagcttcccttggtatggtgataagtgtccttccttccctatctgtaaagaaaactctttcataaatctcagggtcctcttctaggcctttgtgaattttactcttatgtaaccatatggtctgggtgataattataattattttggtatggtaccatatgttgttattacgtttgagagaatgatctcatggagtttcaagggctatggccaggcatgaactgtgcagggaagacgtggtactaagctagtagggctttcctgactcctgggagctaacagtgtgcagcctttcaaacttcttcctcaggtcttcctcatgccatgctgggagctcaatatggacctaaaactggccatggcaggactatttaaacgctggaaactgatgaaatagggaaagaactacaagtcagaacctcttcttttcttctggagaggccattgttaaattcttactggcttatccactgcagtgttatttttggagagtgaacctcaggcccagggaatgctaagcaaacatcctacccctggggccacattctcagcccctcaatacaatttccccagctgtcactctcctccccaacactgcattctcatctgtctttaccaagaagagacttcgtgtttgctggtggcctccagtgaaaagaaaatacagccagagcatcatgtgtcattggtgaggctggccctggactctcacaaggctctcacaagtggtatctttcctctgatccttgctgaagccttatgaccctcaaactcagtgcctctagatagcaatgaattgcacacttaacacacacacacaggtccagatatgtcaagacacacaggataatgctatggagggtaaggcttgatttagtggaatgtaataattgatttcagtctttgttgtgtatatctagtgtctaaatatgacctctgaccatgcagagtctggaatgcatgtactgaaatcatctcatagtctaaatctgcagtgcagggactcttttggttttcctccttgtagcctgacatttcctcacagtctaagcgatcagtactaaacatctgaggtgggagtactagcaaattccaaaaatgtccaagcaacagccaagtcataaaacaaatattttaacccacacattgtattcattaaagtctaacaaaataggactcttgataccagtcgtgtatataatgattcaacaacctgaatcccccatcccctggcgctttcacaacttgtacagtttctctgtcttggcagtatgatgctttggcctgagtggagatatattagaagccagagttgtgtggtctttgtgtgggattcaaaaatctagggtgaggctccattgtttgttatatgatgttttgctttcagttttccattttctaaatattgcctatcccaaagagtactatgtgaaggcccagcatagacagccgacacacacgtggaccacagacattcctctgggctcttcatccatttctttcatttaacatagtcacctttcttttagtctacttttcctgattccaatgttcatcttgatggatttcttcaaggtgttcttatcctcagaggttcccattgccagttctagagttaaagacccatttcctcagggcttggtcaatctcctttgctactccaggtaaatgcaggtcttctattccagaagatagcttatttcaaagaaacttgcaacttacttctgtgcctatacatattacagaacggactcatgtataatgccaggcattggtaaacagtgccggcagccttttatgcagctgacatcacagctatgaagaatgtgacttccactctatggctttcaaaggaggggtgggtaggatatagtgagacaatggcttaaagggagctgagcaaacaggatgagagaacaggagagagagagagagagagagagagagagagagagagagagagagagagagagagagagagagttgtggtggtttgaatgaggatggctccatagaatccttgaatacttggtccccagttggtagaattgtttagaaggattaggaagtgtgactttgttggtggaggtttgtcacttggagcaagctttgaaaatttaaaaagccataccaattaactttccattcccaattaactttctctgctcatcattgtgtctcaaaagcttttagctactgctccagtgccatgtttgcctgcccatgcacttagtcctctgaagctgcaaaccccaagaaacattttcttctctaagttggcttcactatggtgtcttatcacagcaataagaatgtaactcagacagtaagaaatatagtgataaataacagtaaagacccttcagagaacttatatggaaaccaagctactattacagaagtttccatgtatatgtatgtatgtgtaacatatgtatatattatgctcacataaaataagagtaagatgaaattctcctataacagggcaacaatgcctgtattagacaccacaagctaataaatcaaagccccactgtcagacttttggggcggtcagctgggagagctgcagactcccaaatagtcagaatcttgccagtgctattggctctcctccagaactcaatgaaaagagaccctactgctgaggacaccatgtgcttgagtcacagaatatgatactgatctggaagtcttatctctactggctacctttcggtgcttgagtgtgttatgaatgccactggaggagaaaacaagtttgtctagctgaaaccccggccacctgcatgacctctggtgcaaaggtgacatgaacatcagtggagtgactaaacactttctgattggatttaagacctactccacaagagaaacccatgcttggcaccattgtcagaccaagaacctgtgacaagacaggttctaggcccaaggggacaatctacaccattgtatctgctaaatggacgtagtattaaatggaccccatgacttctagtgatacttgtagagtactacatctctgaggcctcaccagtgaagcttctagttgcagtagatagcaattaacacaggtccacatctgctcaaggtacagagaacaaaagaccaaccataaatcatggagttttcaaccataaatgggatgttagtatcatgcagattcttcccaagaccttgaaagcattgaggaagaggggggaagagtgtaaagccataggtggtagatgagtacaaggaacctgttctagacacaacagatagctgcacatttgaaattacagcagttgttacacatgcataagacttggacaaactcaggccagatcctaccccagcatgaagaggggagctgccacgatctcagacagttggccaagggccattgatgaatgaattctgggagggggagagtcagtttatctaaaagtgtggcttctggtaaattgaacacacttcagtggatggccacacatccaagaatatgttgactgcacaaattaaacttggtaggtgtgagaacaaagagaggacacaaagttgggtgggcagagaaagagggaggcagatctgagagaatgtgggtgagggagaatatgatcaaaacatgttttatggaaaactaatagtttttgtaaaactagtaagagcagctttgagttttcagagaaaaattttgatatcttgttaaaataatatttaaaattcatgtctaattttattttaattgttgtgtatgtagtttggaaacagacagttaaatggcctctctttgtgtgtagtccctggcttacctctttgtgtgtagttaatggcgtggcttctttttttttgtatcttacttacatacaaaaagggaggctccttatagagattcactaaatttagatctcgtcaggtgccatcgcttggagtgacattgcttaataatcctttatttttgcacattgcccagatccaggctctatccagaaacatcttttctttagactcacaatcctctctcctctctctctctctcccccccccccattggcacatagtttacaagtttttttttctggtccactttagctttgtgtcatgccgcatcgttacaatctgttctccgctgcacagggctggagagggtggggaggcaagcaagggctggccatggtaactggcgagaaggaaagacgcagcttcccttgcccagtgagtccaaccctgctctctctggccctctctccttttctccatcagctttgctttacacttacctgaaacacaacttggaaagacttaaagaacaaaacaatgaaagcaatgtcgactagcagcgtccttggcaagtggaaaggagatgattgttctcgaaggttgtttgttgagaaatgacaaaattaattttatattcagagtgaataagaacatgttcttcttgagatccagtttagctctctataatacgcgagcacacatattcagttttggtgtgctgaaatcttctctcgaaatatcaacatcactttagactgtctctaaacatcgtctctaaataataaatgttgtttgaaagtatatctaagtatgaacatcactctgagatttttaaagtgtatatgctagcttactcaggtaccctgactcgggatagctcaactcctacactgggctgagggcttgcccatttatacaaatacaacctattcttaggaaatgtgtcctctcatcaagtcctggtcatccttccttggagcaggtgcacttttgcctaccaatgctatcatgtcctcgttggccctgtctgctgtcagctctcctgccacactgctgctagaggtggcttttgaaagtgcctcacctcctaccttctcagaatgaaaacccaaacccaactagtgaaatacatttcagcacaagctagccttgcctacagttcacggttcttgcctgagaccttgtgtgtgctagaagcacaggagccctaatgttgctggatattacatgtaatggctcttgcagtttcttctctctgactttctgggtgttactactatgctgtttgaagtttgtgagctagacatcaagaaaaggagtgctatggatatacatccatcctacaagctaaatatcctacctacttactgaattcttttgagggcattgagatataaacagcagtttaaacctttgggatggcatgatgtgtttaagaaataaagttatacttttaatgagttcctatgatcctaaagtagaagtaagttcttccactagaaatgggaggaacatttgcaaatcaggttttcaccctaaacactatctctcagtattatcatcattggctaaatcttgagactgatttgttgggcaggcaggggatggcttttcagaatgtggcagcaataaaaaagctcatctgaattcccctgagtatgcagtttgagaagtcccgtgtttcagtactggcttgcaggagggtgctctttgccccacctgcaccatctctatgcttagacagtcataccaaaaaccactgattttttttaagagcaaacatttgaataaaatattgtaaatatgatgtttaatggctagattcttcaggtaacagaaaaatgacctgacataattaacatttttagaaatattcttaaagtaagaatgtatagtgaaattcaaagtttatagaccacaacattgtctttaaaccaaaggactaagctaatgataatacattttggaacatgggattttcataaacaggcagataaaaacctaacaggtagccgggcagtggtggcacacacctttaattccagcacttgggaggcagaggcaggcggatttctgagttcgaggccagcctggtagagtgagttccaggacagccaggactacacagagaaaccctgtctcaaaaaaaaaccaaccaaacaaacaaaaaacccaaccctaacaggtgcatttttaatgttttaattatatttattggtagtgaggggtatgtgtttgcgaatgtgcacagcatgcatgtggaggtcagaagggttttaagggttggttctctcttttaaaggattaaactcaggtcaccagacttggcccagagtacctttatctgcttagttatcttgccaggcctcatgtaatcaactttggaataaaatttaaattatatttatgagataaaaggtactgaataaggacctcttcattaaaaggcaccaaaaatcactttgaatgtttccctaaagatgctatcttaacatgaatttatagtaaaatgaccagacaaataatggatacaatgagaagagatcttagggcacaaaaacatactagccctgagtagataatatagtgtatctacatgtggactgcagatgtcattctctttgctcagagtaataaagactacaaggtaccaggaaagtcttctggagttagaatgaatggatgaataatgaatgaatgaataaatgagtgacgtagaaaatatactatatgcacaggctagatacaatttggactttcatctagaatagaaagtttttactagtatgaacattaagatagattatattcgatatttttaaaataataagagtatatataagaacaaagatatgttagctaactcatgaaatatgagagcttgtgtatgtgctccaagtgctggaaggaagacaggtgagtgaatatgtgctttgcctcattaccacagaaacatatggaagttgttatctatatcagagttgtatgctaaaaatgcaagtaggtttaaccaaaaccataatggaggactttatagttgaaaggagaactggggatgtttggagttatctcacagcttaactgagctgatatcataaaagtgatctgaaatgaaatattatttaaagtaacagtgggattttatacttatctatttaagtatactccatgactgtcagaaaatctgaaggcaacttacctactatttctacttatcctttgagttcagtcctcacagtttatatagagccttgaggcagtcattaattctttactcctggaataactaacaactaataattaataattatgctattcgtaattcaatacacaggttgataggggttcctatatctttctatgtctttcagcatttgctgggcgcctaccaggtagagattcacatattgtactgtggatttgatctttaacaagcataagtcagtccagtccatgcggcaacatttgggaaatactgtcatagagaactctatgccatgatgggaacagaggagtgtgctggagatttcgtggtagcataagaaaacatttgttgaagccaaagagtaatttgtaaaggaacaatgggaaaaagtgttaggagtggactgtagttagattttgcagggctttgaattccaactacaaaaggttttggtttactctgctttttacagagtgcactcccagagtgtttggagcactagactattatgcagaaagggcaagtaccaagtcagaaatgcctgagacaggctggtaggtgagatgtaaggatcccttggataacagagatggcaatagacagagtgagagcgttgtgtgcggagctgtgagacagacacggagcagtgagtacagaagtcctccacagaggagctgagttagaaacagaggaatgagtgcaaatgtcttccataaaagctcactgtgctctccacccttaacatttttaaaaaatatcttcttatatgaatagacattttcattttttactctttccttgaatttttcatttctgtaaaagcatgttaactactccacataacaatttatcatttagagtgacattgttagacagggacttccacctaaaccttcctaagagccaagggggcgggggtggggtggggctgtatgtcctgcttttgctttcgtgtctgagtgccagcatggtctgaattatcttactgcatgggaggcagaatggtcccacactctcctcttctatcagttccactcctgctgcctgtgtgctaagcccctttgcattcaatcaaagtctttcagaagctaggtattcactgatactacagtatttacatctctatccctgtgtcatgaaaatccagtatcccactgagatgttagacttcaggaaacaacaacaacaacaacaacaacaacaacaacaaataagccaatgacccagagaaactttctaggtggtaggaagttattgcttcaattgtgtcttcttatgaaacatgattatgagattgtgtgtccatacttcctgtttgtttgaaataatcattccaaacaaacaaagatttttatttagcagatgtggaacatctatatggggagataaaccattctttctgaagtgggagaacttcctctgatttcagaataaacaaaggtaccctatcttccttgcttcaaagaagcaagggctagaaaattgatgtagaattgccagtttgtaaacatagctcaaccttcagtatataccactggataaatatctcctatttactgcacagccaaataatttgcctctaattcagtcatagttgcaagtctgctgaaacaagctcaaggtgttttaaacagatgcagaaccaacagcagcacacaggtgtgcttctagagatctataggcagtttacttgttttcttaataaatctcccaatgagtgaagggatcatcatttttagccaacccgacaagttatctgaatgtttttgatatcactaaaaatagaatccggattgattatcagttcgcggtagaatgacagtggggagtcagccctctgttgcagaacacttggtgtgttctaaggttctgtgtctcaactctgccactcaacggttctagggcaagcttcctcagatcaaatgatgcaagtacaggattagtgttatccatcacacatagcaacggtgttaccctgaagtagcggtctccatctacatcagaggagagaatcacaaggcttcctctctagtctttgtgaaacctcctcctagcccaaatcaataaagaaacttgaagaaggtgggctggcttctttcccagtgtgaacactggcatgctttctccaggcagcaaagccagtgtagcacacatgtcacttgacaggaacctcacagagagcttgttctgtgttatgcggtccctgtttagttggaggtcctgattttaatctaattacttgtgatcttgagtctgtttaattctctgtaacttttgaggaaatcaacataagtaatattcacccctccagataactaaatactgcatgtttatataatttgacgctgaggaaaaacaaacaaaaaacacctcagtttgtgatatttcctaatataagttgttcctaagaaaagaaatgacccaagccatcctaaaaccaatgtaaaagtgaaacaaacttaaaaggacactcaactcgctcacttccttataagtaacttctctttagtggaaagaatgagcgtgactctgctcaaatatgtttgctttgaagaactctttttggctagagataaatattcactgaatactgtcaatataaaaaaatattacttcttccaggaatgttcaaaacaaaagttaatcccatttatctgacaagggtggggggaattacgttagttcaatcatcagaattgtgtattcaagtctaataaattatatatgtgcaccatcgttgtcactgttacactctatagccttaaagcaagaaaattaacttttcatgatgaaattattttattccctttagagtacagagtaattttcttccatagtcaaggtaaaagcaacagcttacaggttatcaggcaccacaaataattcataaattacctaaataacctgatttctactttttatccaaaagcaaagtagataagacctcatctgtagcaaaaactggcatcccagaaagaaaacattatcactgccaaagcatagctaagctgtcccgttacagtgagtgcagggggtcaaggtgctgttgtcttaatgataccaggagctttagtagcagactcaaagtggaaactgatggtagggagagaataaggaggccgtgctctgcatcaaaccatggaattctcacttccaccgtgtgccagttagattccatggtagctacagctgaagacatcaaataaaaacacgaaacaggaaaactgggaaattttgattttcatctcttttaaagaccttagcattatgatgcgagcatgaaaaatgattctgtgttagagagggaagtggggttaaagattccatataaggagtttctgagtgaataaacattaaatcctttaaaattagaaatgccaacataattgtattttaaaaagtgagatgatcccctgaaagttttttggatcatgaatattttattattactaaaaccaattctgttagtcccatgttctagctggaatgtgattatggactcacatcacaaagtgaatttaggaacaggatccagacaatctctatcacagcacactcattaccctcactaaaccctccaactcagtcaaacaaataatttacaaatctgaagttatgtttcaccagagaacacgcagaagaggggacacaaagagcacaagagtgggacagtggggaggagaaccaagagacagtcttgtgacctgacccaggactcaaaaatgtgcagcaactgcaactccttccatacgatgtgcacaggaccacacccccagacatctagtctctcactggggagatattgatgggcccaaccctgcccaggggaactcatggcaggtgagggctattggaaggaagtcactgtcttcccgggtgttaccaactaatgagttttcaatgatcctgtggatagctctgcacctgtgcccacacggacagcccttaaataggttaagcctagtgagtcatgaataaaatgaaaatgcgtgagcttgagatggggactgagtagaaggagggggtctggtgagggtgggaggggatgacggtgacagtacatgatcagatgtgtgacactcctccaactcaatgtcactcattcgtcagtgaaaataccacccctgccttttcttatattccaattttcaaaatgactggaatttaatgattcttgacttcaatatctcatgtgttttatccttggataaccattgggcatggaagttgagggatgggcacagcaagaggaaagaataaatgtgagagatgtaagtgatcctcactgtcagatatcagtagaatatttgcattctctcctatttgctgaaagcatgcagacgaggcagaggaggggtaatgttccagtgttatgtgcagcagtctagtggactggtgaagcatgggaactggaacctgagcaccagccaggaccagtgaggagaggtggtgcttccaggaagtcaacaacttccccaggacagatgtgtgtgggcatttgcccacatgtctatacttgtgtaccacatgtatgtaatgtatgatgccttgagaggccagagaagtgtgctgcaacacctggacttggagctatagccagctgtgagctgccatgtgggtgcaggaaattgaacctgggtcctcagggggaacagccagcgctcttaaccattgagccatctctctagcccttttgtaatattctttatgaatgaagacctaggcattttacagcctcaaaataagctaatcagtttttgattctaaaacaattaacataatctcaggttggaataaagaattcgacccatcattccttaatttggtatttttctagtttagaaagtaatggtttgagtgtctgcaagaacatcaagtatggctgtctggcaataagacagaggagatgattctgcttcggacttacttgttatttcatcatttcgtcaagacaggatgactttcactattttataaataggtccgttctctgtcatgtgcagttaaatttgtaaccttaatatgactgttggctaacagtattctcagttaaatataaactaatcaagtgtaaaacaactttataacccacttttaaacttcatattgtgatgaatttgacaacgtgtagttcacttgtagataatcttcatgtcagcagagtctctgcctagaatgaggtctggcaatgagtgcgccataactacttcttagcaaactttgtgagacggttgcacagcagccagcgttatttgggggaagtcaagcagtctccacacctgcaatgcttagcttgtggagtgctgcttgcgatagcagggtaaaaccacacggtcatcttatcattgagaaactacatatattacaagaagaatcaagctagcttttttggggggaggttatttatttatttattcattcattcatatttttattaaactaataattttttatttttaaaaattgatttatttattatacataagtaaactgtagctgtcgtcagacacaccagaagagggcatctgatcccattacagatggttgtgagccaccatgtggttgctgggatttgaactcaggacctccagaagagcagtcagtgctcttaaccactgagccatctcttcagtcccctaaaatttattttaaatatacaattcagtattgacatttttaagtcatcaaaacaatttataatagagctgggtggtagtggcacacgcctttaatcccagcacttgggaggcagaggcaggcagatttctgagttcgaggccagcctggtctacaaagtgagttccaggacagccagggctatacagagaaaccctgtctcaaaaagcaaaaacaaaaacacaaaaccaaaaataaataataataataataataataatttataacagttaaatgcctctcaaatatatgatatcttccgaagctaaaagtaatatgcactcaatcagtttttaaaatatatttggaacattaaacatgatagaagtagaaaaaaatctcttatgaagtcctctatgaagggaaattatgaaaagttcctgattagacagaaactgttccatctccaagggagaacactaagtgtaactatggcttcatagaatgaattgtgtagtgttgcttctgtttctattttgtggaatagtttgaagagtattagtgttaggtcttctttgaaggtctcatagaattctggactaaaaccacctggtcctgggctttttttggttgggagacatttaatgactgcttcgatttctttaggggttatgggactgtttagatagtttatctcaccctgatttaacttcagtatttggtatttctctagaaaagtatccattttatccatattttccagttttgttgaatatagaattttgttgtaggatctgatgatttttttggctttcctcagtttctgttgttatatctcccttttcatttctgattttgttaatttggatactgtccctgtgccctctggttagtctgcttaagggtttatctatcttgttgactttctcaaagaactcgctcctggtttggttgattctttgtatagttctttttgtttccacttggttgatttcagccctgggtttgattattccctgccttctgctcctcttgggtgagtttgcttccttttgtcctggagctttcaggtacactgttaagcaggcagtgtacgctctctcatttcttcttggaggcattcagagctgaactttcctcttagcactgtcacactagcttttaagaaacatatacacatgctaattagatcagaggcatgtttttgtcatcttttctacaattatgttcgtattttaatttgcatccgtttaacaagctgttaattgtgtaaaactcacagaaagtattttggaatttatttgttcataagtcataagttttacactgttaaagaaaataaatttcatgattagttagagaggggcaattaatattttctttatccaaaactctgaaataatgaggcaatgaagataatcattagaaaggctgtgatggcgtgtaaggatgagataagctaacagcctatgacttgggggaccatgaccagcagctcttggtcttagtctaagccatgttaaaatgctgggttgaagtgaatagtctagcgagtgaacagtctgggagtcattctggacgaggaagggcaaaagaaagactgtaggtggtgcgggaggacagagccttcacttctgggaagcaacacacactgacacatagctgcatgataagtaaatcaacagacaaagctgcccctaacagcctagagccttcatacccataaagaaaggacggaagacagtcaacaaataatgctggagaatgagattgctgtttccaagaatctgatatcaatgttggattaaatctccttataaattcaaagcatttccagctgaattaaaattttttttgaattcttgtttgaaatccaaaacatacaaaacaaacaaacaaacaaacaaacaaaaaaaacctggaatagaatatactttcagcagtgggttgaaaatcactctcaaacacaaaaacaatgtaataagttgttaagaagcacaagttacatgttattataaaatgccaatcttaaaacaaaaaaccaaacccaaatgaggtcttgcctttctacttgtggttttcctgtctcagtctcccagccttgggatcacagtcctgagccattcctgctgggtaagagagtaccaaccgtggagtaaacccatacaaggaggggttcgaggctgagggaggagcagcagtcagactagggtaagagatgaagtgctaaggtttgcaccagaattacaacagtcacagtaggcttggacctgagacaacttgctcactagtggccttgacaatcaaggaacagttaaacttggtactggggaaaagaaaccacatgctttttaatgaaggtcttcaggaagggtgggacactctatccattgggaaggctggagaaactatcctttcagctcctagatactgtgtctacagtctatgaaaattacaagtccttaaaaatgcatttagagctttaaaattaagatactggcattaaagtttaaaactagtgattagcaaatatttagcacacaaaatgttatgctcatttcattattcattaaatataatgattttaatattatttgaaaacaattcagtatttttcactttgtaagaattcccaagaatgcgcagtacctgaaatatgtctatcaaatgataagctcagtgatttattatagaatgactgatctttcaaaagaaagattgcacaaaaccctaaaataattctattgggtaatattcacatatttaatatgatccactgtgtagggcagtcttgggaaatagtgccatgcaaatcttaaagtagctctggttaagggaatgcatttaaagaggatttttgtaaccaaaaactgaagagacgaggaaccacaggtgaccagaaaagcgaggagatagctaagctgagtcgactgctctttaaaggtgcaacagcaaaaaacacatatatatgtttaaaatgtaactggacaaagtaatgcaacatatggcaaaagtatgaacctgcggtacaggattttcacatcaaaagggacacttgtttaaaaacatctttgctgtcttcataattgtgtccatgctcaaaaaaagtaggataaaactacaagttattaatagctgtattctttaattaaagctgtcagcctagttaaacaaagactgttcacagtttattatttgtgtatgtaattcaccatttgaaacctaatagtttgaaacgcattagcaaagtctcagggcatttagaagcacattgactgtttctgaatgcatgtgcacgaagtttctatttataaaccacatttacagaggcttataaactagccagagatattcatagcacgaatacttgagacttacaacacacagagaaattgtaaccaaaaactctaggagagataaaaatggaccgaggaagactggcttcagacaggattctggccctgatatcactttacattctagactattattgactacaacaaagaattgtgtaagtgaagtataattacataaacttagtgcattagaaatttaggcataagtcattttggaaaaaaatgaacaatttataaaaacaatcacaatactgtccaagggtcagaatgacaccaatcagcacccgagcacaggtaccttttagcttctcaactgaaattcatatcccatctggttccctccaggggatctctagtttgacatttttcttttttaaaaaaatttttttactacatttatctacttatctatgtgtagggggtgggcacaagtttgccctgcatgggtagagtggtcagaggcatgctgggagttggttctctcccttcaccttgggatggatgtcagctggaggtaagcatctgttcttgctaagtcatctcatccactctcacactgacactctttaaattacaaaccagaagagtggaatagaattgaagacccagaaatgaacccaaacctatggtcacttgatctttgacaaaggagctaaaatcatccagtggaaaaaagacaatattttcaacaaatggtgctggttcaactggtgggcagcttgtagaagaatgccaatcaatccattcttatctctttgtacaaagctcaaatctaagtggatcaaggaccttcacataaaaccagatacacagaaactaatagaaaagtaagtggggaagagcctcgaacacatgggcacaagggaaaatttcttgaacagtacaccaatggtttatgctctaagataacaatagacaaatgggacctcataaaattacaaagcttctgtaaggcaaaggacactgtcaataggacaaaatggcaaccaaagattgcgaaacgatctttaccaatcctatatctgatagaggctaatatccaatatataaaaagaactcaggaagttagactccagagaattaaataaccctattaaaatggggtacagagctaaacaaagaattttcaactgaagaatatcaaatggttgagaagcacctaaagaaatgttcaacatccttaatcatcagggaaatacaaatcaaaacaaccctgagattccatctcacatcagtcagaatagctaagatcaaaaactgaggtgacagcagatgctggtgaggatgtggagaaagagcaacactcctccattgttggtgggattgcaagatggtacaaccactctggaaatcagactggcgattcctcagaaaattgggcatagtactacctgaggacccagcaataccattcctgggtatataacccaaaagatgttccaacatgcaataaggacacatgccccactgtgttcatagcagccttatttataatagccagaagctggaaagaacccagatgtccttcaacagaggaatggatacagaaaatgtggtaaagttacacaacacagtactcttcagctattaaaaacaatggactcgtgaaattcttaggcaaattgatgaaactagaaaatatcatcctgagtgaggtaacctagtcacaaaagacacacatggcatgcactcagataagtggatattaggccaaaagttcagaatagccaagctatagtttacagaccacatgaagctcaagaagaaggacgaccaagtgtggatgcttcagtccttcttagaagggggaataaaatactcatgggagaaaatacagagacaaagtgtggagcagagacttaaggaaagggcatccagagacttcaccaccatcccatatatagtcacaaaacccagacactattgtggatgccatgaagtgcttgctgataggagcctgatatagctgtctcctgagaggctctgccagggcctgacaaatacagaggtggatgctctcagccaaccattggactgagcacggggtccccaatgtaggagttagagttccttaaggagctgaaggggtttgccaccccataggaagaacaacagtatcaaccaaccagatcccctagagctcccaggtactaaaccaccagccaaagagtacacatggaaggacccatggctctggctgcatatgtagcagaggatggcccttgtggagcatcaatgggaggagaggcccttggtcctgtgaaggctccatgccccagtgtaggggaatgccagggaggggaggtgggagtgggtaggtgggtgggtgggggaacaccctcataaaagcagggggagggggatgggatagtggggttctggggtgggggaaccaggaaaggggataacaattgaaatataaattaaaaaaatatccaacaaacctgaagggacaccccattttttcttttgtttattattttttaatgtattcatcattttgtttgcttacatttcaaatgttatccctcttgcgggtcttccctccacgaatctcccaaccctcccctttgcctctaagagggcgctcccccaccaagtcttgcctcacccctctagcatcccccttctctggggcatcaagcctccacaggactaagtgcctcccctcccactaatgccagacagtcctctgctctatgtagtgggagccatggatcaacccatgtatactctttggttgatggcttagtccttggaagctctgagggtccctgttgtttataaatacaaattcaaattcctcaagttagtattcagttccattgcttacacttcctaggctagatagttctaatttgcatgttagcttccatgaccttgactatgctggtctttcttcaactgtgctgcatgctcatctcatttacacattagccttacccgtcacgtgaggctctaccattactcagatccttttacccttctttaccacagaaaacatttcttggttttgaattcctacgaaattgatttttcattccatgaatttaagcggttggcatatgttgctgggtatcatttatcttatccttgcagaaagagaaaatctaaaaaatgaattttgatagtcactctactcatatcaaagcattttgatgactgcataattaatgtcatcaactcgtttctaaaatgtcactgaatctcatgttccactctgcacttgagagataagcacacttgcaattgtaatcgtggtcttcacaaacatagaggacttgtgttttctacacttgccgatgtgtatttgcattatgaccctattgtttatatattacaaaaagaaataattcatttgataggcaggtcttaatctatcaccaaagacaatattcaaaacaaactaactccatatgctctgtgtctttgggacaaaaataaataattaagatgtttgtatagtagtctccttacagtccatcattgtatacaataaatgaaagtcttaagagtacaacttcaaaaatttaagttgcaattttaaaacatatttttcagtcacaacagctatatatttgcaggcaatctgcacagagagcagggttactcgggttccactatgtttaatgtcttagaatggtgaacattttctagcactgatgaaacaatatttgaatatatattagtttgctatgctgtgcaatcgcatgaatttgacaaatgcataataaaatgtatatgttgttgtagttctatataatagtcccctgattaaaattccctgctttcacatcaatgctcatgtaagggacttgttgctgttgttgttgttgtttttgtttgtggcctgatatttgagttctaaaaacactaaacaatattccagtgtatgtatgtaagcatagttggaccattcatcccctcttgaacactttggttgcttcatttctagctcttatgggtgaagctgctttaaacatctatggtcagatttctgtgtgaacatgtcttccactcagtagagtaagtgccttggcatacagcatctgtgtgttcagtttctaggaaaccatctgcccagtgtcttccaagttggctgcactttgcgttcccactacccaggaggagtctggactgggtggcatctttgccagtggtgtgtatgagctgtcaggcttgctcacgctaatagctgtgaggaggccctcaagactgttccttcttcaattacaggacgaggcacctttcctctcatctgctcttttgctatcatttcttcagatagcttatctacttttaatgatttttgttatattgtcatttaaacttctttgttcttttagagatattaaatatcattttgcaagcatgcatttaaataaaatttattgttaaataaaatctattcccttaaatgtaatataaatattcagttgttaagatttcttgctcaagacaatcctgatagaatatcctaaaagttcgttatttaacattaaaattgtgggattttgttgttgctgcttattttagttcttagggttttttttttgtttgtttttgttttttgtttttagttcttagttttaatgtgtacaaaaggtatacttgatcaaagataaaattaaatggtctaattagcctaaccatcaaactacttttttcatcttcgaaatgtgtattattctatctatatttatatgtgcttcccttgaaaccttccagcataatgctttaaaaagtgttaggaaataaatattaatacgttggagtagaacaggtttccacataactattggaaataattttgaaagggaaagttatagtactctaaatcatgaagctactgacaataacatggagctagtatcagtatcgagagagagtgcaggattaaaggagtacttgtaattttgcaagtagatagtgggagaattttgtttaagtatagcgactaatcccagggtttcaaatgtgacacaagattaaagaggcaaaaaggtggaatgatggaattttggaaatagaaaagctattagtgtgtaagctagacacctaaatcatgtcatgttattggctaggttaatgggtgatatacattatatattgtcttaatctttatgtttcattctctctctctctcattatgttaaaggtctggtacatctatgtaatgcaatgtgcttcatctcattggggatgagtgagttaatttgtaaacagaaatatcaatccacagaaagatgccatcttatatttgccttatataagaaagcatatataccttttatttattgtatattaaaatgtcaagaacaattaagttattctggtagataaaatatctataagttacgtgtttttatattttctgaaaatctttcaaactcttgttttagggtggaggctaaattctagaagtctggacagttaaggatcccacaggtttttatagctattggaaagaactgcattcccactctgcccgtgcacaaacaagagacagcgttaatacttccaatttccaggtttcttgatttcaaagggcccagcagacagggtgtaacagaccagacaatcagggctggttccccatcgtgcttcttaatgctatcccgccgaatgactttaggtctgctcatttcctggtatgaaaaaaaaatccttttctttttattgtcaggcaattaaaaatacaagtacttagctatttaaagcatattcttatcctatttgaagcaaaaaaacccttacaattctttttcgtatttttatcctgataagattaacaatgtttatcactgattggtgtcaaagagcaacaacaacaaagaggtggacaaaggacatggcaggtgggggttgggggaggaatagaggagcttctggggacaaggtgatatgactggtcctaaaaggcacagagcccacgtatcacaggaccagtaactgtcattcaacagttacgttttgcggacaactgttacataagaacctgaggcgggtgcttgtctctgaattgagcctggcatggcagtggctctagggaagatctgctgactgttgtgtgactgtgtcagcgtcagcatcgtaccctgtcgtgagcttgtcatcgatgtgtaaagtttccatagcctcttcaggctagtgttctcctgaaagctttcttctctttcaagtaaggtgtttctacaggagtgcttgtgatttcaagtttttaatttgtttcctaaaattacaggatttcatgcatttcacaacacttcacaaatacttctaatgcacattcctttgcctttgcttctgagatgccagtgtttcagctgtgctgctgttccaggtacctctgactactgctgttcacacacatgacaaatcctgagtaggcatgatcacattttcccttcctccaactcctcccagatcttctctacctgcccacccacccaactccatattctttttctcttttaaaaatagacaaaaacaaacacaaccaannnnnnnnnnnnnnnnnnnnacacacacacacacacacacacacacacacacacacacacacacacacacatcctccacaaacccacaaactccaaaatataccagcaaaagaccaagaggacaaaacaaacaaacaaacaaacacccaaagcagaataagacaaaatgtctacaaaaataccaccgagttcattttgtgttagccaactactcccgggtgtgggacctatcctaatgtgtggtttgtatacctggtgaggttccactggcaatgggtatcaattagagatagcttgttggttaggggtgggagcccatgtttattccctgcctcccagttgctgagaatccatctggcttccctgtgcaggctctgtgcacagtctctgtgagttcatctctgtatcagtcctgctgtgtctagaagaagctatttctttggagtcattcattcgctctggctcttacagtctttctacatcgtcatcatagagccctgagccctgaagggagggatttgatgaagtgctccaaagtctctcactttctgctcattgccctagagtgatcgctgtgttcatttccatctactgtgagacgcttccctgaggatggctaagcgaggctccggtcctctatatcatatataataaaagagaatacttggctaacattgtaaagtacctgtttagtaaaataaattccacaaagattaaaaagttaattacaaagtatataatcttatgttaatatgatttttataattaaattttgaatcatctctatgcattaaaacattgagtttaaaacaatcattttaaaagacagttggttttccttgctataatttataattgcttaagttgtaattttaaagatagtcattttcagtgaagtcaagaactatttatcagtaataatttttaagataaatatagacaaacatgaagagcaacattgttaggtgtatccttcctttttgtattttaccatttagcagctgtcaggcttcggtagattacttacttctctgtgtattctcagatcctcatcaatgaagtggctatagcaaggatgcctgccctacagtgtgtggtgatgactgcacaacttcatacacaggagggatacttttatgttatgagttcagcaaatattagctacattgtcactatggtagatttgaagtattactctaaaggataactctgaacatgtagtaaatgtccttcttcgtgtaatacatgtatcggtttgcagttctgtgtttcatgatcacactgctgtttgtggctgtgtgttagggaaatatgtctccagattcgtgagtaatgatatatgcttgtgtgattccttgcagacatcatggaaatcaggaccgtggcagttggaattgtggcaatcaaaggggtggaaagtgaatactatcttgccatgaacaaggaagggaaactctatgcaaaggtattaataactgataagttattgttcaaacctactctatcaaaattatctgcttttctgaaaactgaaattagttttattccaccggtgcaagtggactattccattaagccactctttactccagcactaaggcaaactattttctgtatgacctgagatttttatttaaagctacctggatgttatatgcttcatctgtaagatgacttggaatgactgatctctagggatccttccaattctaaatcccttgtgcactattgacacttggaacctaaaatttgcatctctgagtattaaagctctttttgtgaggatccacccaatttgcaccttgctgacatgaaaattcttgtaaaaaattttgaattgttcagttcatttatcaacatcagtctcccagttatggcctttgaactctaagcactgacatcgtttccactttagtatgatggaaatatgtgaccgttcatcccactgtggtaaagcaaaggccattctccattgtgctcttgtagctctgcagaataatgcctacgcaggcaaactacagagtagaggctcaatcacatgagcacacatctctgcatggatgatcaaactaagtaactttttacttttgttacaattgaggctaacatggtagaaagtgaagtcaaatttactaaatagtccctcacctgcaggagatagaagctaccccctctacataaatatctggtggatagagaatgaagagatttggggaccccaacattaaaaagagtagaaatttactgcccaactggacataactaaatgtgttttatattattatgtttttgttaaacttaagatgcttttggcctacagcagtatgtgccataagtaaaaccactaaaccacatcagctctgctcaatctgaggcttaaaataaatctcatgtatatcacctctacagaccatcatctgcttgtggttagtttgattctcctgcagaatttgctttaataattgtgtttgttttttggcttgtttttatcagaaagaatgcaatgaggattgcaacttcaaagaactgattctggaaaaccattataacacctatgcatcagctaaatggacacacagcggaggggaaatgttcgttgccttaaatcaaaaggggattcctgtcaaagggaagaaaacgaagaaagaacaaaaaacagcccattttcttcctatggcaataacctaagtgtacatggtatttgagaaaccagtttcattcagcagggagatttctttccagtggacttttcttctctctctctctctctctctctctctctctctctctctctctctctcagtaaccaagaaaggctggaaaactactgaaaactgatcaagctggacttgcgcatttttgtttattttaaaagactgcattaaagaaagatttgaagaatatacacaaaaatcagatttagtaaaggttgtaaaaagttgtaaaagtggttgtacaatcatgatgttagtgacgtgatatttttcttaaattaatttacccttaagagtatgttagatttgactatctgataatgaatatttaatatcactatctgcttataaaatggctgctataataatattaataatgcagatgatgttatataaggtatgtcagacctaaaggctgctgggatgctttgtcagatgatcaagccccacacaaactacagacgatgagcagtgtttgaaagctttccagtgagaactataatccggaaaaatgaatgttttcaacattttattatagaatagaatctacaggtggttttacaaaatcacaggcttggaacatgcctgtactgactaatatgaacaaaaatccactcaaattgaaaaggtattgctaacaggatgttttaaaaatctgtatataaaatagcaataatgatgataatattgtatttcatctcaccacaaaataatattttataatcccttaaaataaatttcagaaatctttacatttttttcaagtaaatctatctgttgtataaatcacatttgggaacacaacttttagtaaatgctcttcccacaaataatcatgcttatttccctctgtgattacagcattaaactctactttaagttgtatttgaattttattgttttgttatttaagtttatgttatttataaagaaaaaaaccttaagaagctgtatctgtttcatatgcttttaatttcaagggagcaacaaacccgactggctgcagtgcagatgtcccctcccctggtggctgacaccatgactagcacacaacacttggctagcaagtgctggatggcagacaaaaacgacagcctgtagccatgctcacaatagatgtctcacagagaacaatacaaatatgtgggagagattttacacaacgctcgtgccaatgaatttggatcatatacgtaaaaaagaagtatttagtgaggatgtatttttgaaaataggcatatttaaagttagcaatttgatgtctttagaagtttttgccatacaagatatgccaacattgaaatggcaagagtgaaactccaatagaggttgtagtcagccttgaggcctcaggttgggccacaaatgacaggcttaataagtagatgaatacttactccatagttctgcaaccagtagatggatgctgacataaatttatgaataagtacttatgaagggaagggcaacatttatttaaattgttggtatattaattaatgcggtatcaacttcatagtgcttgtcattaaagtttctttatattacatacaacactttttggtaatatgtttatatgttaaggtatatgataaagccttgtcaacaaaaaagaatcaattgactttgtgtttgtccaggcatccaggctactggaaggtcagaagtgttgccctttgccacatacactgaaggacacacatgaggcaatactttgtattagcatccaattcaagactacttgtaatctagcttcctagcccaggtactgtaactggagtcttgtacacataccaaaggtagaaaaagactgttcttcttagttgtttcataggtgtctagctgattatgactagagtttataatcaacatatatatgtaaatccattaaataatattttccaaggaaaaggtgaaatgcaattattcttactaaaagtttaaaaactcggagcaaagcataatcacgcagaagcttaaacagaagtagtaaccatacacagaaggtggctatagtgattaccaaattagttactaagaaaaagccattagaatattggacttaaattagacagaaccaatattgagtagtaaagccattcttagtgatatgccatgtacaaaatctgcccacaagcactaacatttttgttacttttagatcatgtgcctgtgtaaatgtctttatgggtgtgtaaatctagtgtggacagtagtcatggagttgagcagagggttctaggagctgagcttgggtcccttgcaagaacagtgtgtgttcttaactgatgacccatctcgcctggcccagttcttatttttaacatgcaatttcaaaaacacctgtttagtcaaatacatttagaattctagagtcttgaaagtctatgaggccttcatcttactcctctttcacatcaggaaactgaaatttttaacacactgggtgctggatgaatgcaggttaccttggagtctcagacactaagcttgtgtcttagtctcaccttgtcagtgatcaccttgttttgcttgattttaatttccatcaagatgtcatctttttatgtgagaatacttgtggtttgcttgtcaattcacttagcacgtaatgataccattatgatttgactctaatggagaaaggaatgtggtttccaattctgattcctaagcagcttttatgtgaacttctttataaatgaaaagtatcacacaagacattttcataatcatagtattcctttctaaagtgttctttaaaaagaaaaccatatcaactcatggatttccccaagctggtaaaggactaagtaagagaatatgactcgttaacacaataagtaaaatgatacttccagtacaagtgaactaaaacactccaacagataagctataatgtagaccactgacctttgagttgttataaatccaactcagatatgaaaaagaaggcaggctagaggttctatcacttagagggtttctttctagcttctagggtgccaaaaacatgaagagtgattatggagatactctgattcatgatcccccacatattcagttatagtgtagaatgaaatcctaagaaaccttataaagatggctttccaaggtggctctgctgaccctagtgatgagggcacaggtgagcctcaccgggtgtgataatgggagagctgtccccaccagctgcagcagttgggagagctggccctgcaccttgactgggcaacacagtagaactggtttgtggtggcatgtgtggggtgcaggtgaggtggccctgaagtcatgaaagcaggagagccagtcttgttctttgtcagctgcagcattggtgagctggctaaggcagtactggggagcttgtcctggtggtgtgatggtggggtcaggagagcttccaggctgaccaactcagctaccatccaggcctatattcagaggtttgagttggcccaccctaacatctacctcatgtatgagctgctggagcacatgaaagagccaatcctgcagatccaaagctgtagaagcaccatgatccggggcaaccaaggatgtctgagaggagtcccagtgaggattcagtactgaagatgcagcagaagccagaggcctcaagccaagcccatagctggctgcagcgaacacgtacaaggaaagatgtgcagacaaaagggtgtactgtgcgcacaccgggccacactgcaccttccatgacagtatttcggtttagtttttttattatttcttgttattttcttttggaggggaggttgcaagggtggaagggttggggcgatgagtgggattggagcaggtgatgtgacattcacaaagaaccaatacaaagcaaaaggaaaaaagttatctcccaaagacagaacattttacatttaaatttaaaatctgttttcttgaaattcatgtgagttttgtcttttactctggtaatacttatatttgctttaatatgaaaatgtctccagttgatgtcagcgaaccaaacggaagttttcagtggctatctgaacttattgcaaagctttgctttcacccttaccctgtgtcacatagatgagacaaatggttttctatctttcatagtccaacttcacatacaaataatacaggcataaacaaacaaaaattaagccaagatcattttgtaaaagtgtgattttaaaaatatttaacacctaatgtgggtggttattagttagtcaaaatacttcattgattcttaatgctggggagagacagagagaggcagattcctggtgccttcctgcagccaatcaggccaatagatgagctacagtcccagagagagacccatctcgaaaaataaggtggagagtgctacagaaagatactcaacctcaggcttctgcgtgtatgtgtgtgtgcattcgtgtgtgtgtgtgtgtgtgtgtgtgtgtgtgtgtgtgtgtgtctgacacgggcctatatgaatatcagatattgtcatgtgtggccattttaaagataaccttaaagtaggtggttagagttcttagaatgttcttactatggagcagcttgtaaaaggtgcccatgcaactgtcagtggtattgtcaggttactctttgcttactctactacagtcaacaaaattttaatattcaatgacagtgacttattctatttcactcccatttgctctccaattttgaaaattttatcaatttattttcttttgaattgagacttgacaggaagcaagaaaatcttactatcttaccaacacctccttaggagccaggtaattactctcatgagaaggtgtctcctagtttcccatttgcttcttggctgtgacagtcctatttgccaaatcaccatcccgagctttctgaaagttaatgccattatatgaccaggaattattcctttcttctgtctggatgcagctatgtattagttattatggtgtataacatgaaaatttaataacacagcagttcttttgctttataattctctggatgccccgtctgcaagccctcataaagttgtaatgaaggtattagccagagaggcccctgatctcaacactcagtgctgagggaaacccagcaccacctttaccggctgagctgcaaacaccagctagctcctcatttcacagcactgttttcccaaagaactttatttcctacaaaacagtgagtcagagaataaaatttcctgaatggaagccagttttaagaaacgatctctagtggagcctgttcctcgaactgggccaccttgtctggcctcaatggtagaggatacgcctagtcctgcagttacttcatgtgtggggtgggggtgagggttgtgggtgatacctagaaagggggctccccttttcaagggataatgggagtgaggaatggggagagggtctgtatgagggaggagatagggactgatattgggatgtacagtgaataaataagtttaataataatctttagtgtgatgttacttctatacacacacaagaggaggaaaagaagaccactgtaaagtatctattgcaagtcattcgttagatgaccatttaaggctttaccataaacccacatgttttacagcctaataaaaccaattcaaggcattcatagagaaacagatgaaacaggcgtattttctgtggaaaattggtcctttcttccacatgaaaatgagagaaagcttggatcctatctgtttttgctagcctgcattgtgccttcttaggtctaacatgggaggagctgacaatgacacccgggttccacaggaggacagcatcatgtcttcagactcaacccaaaagtaattctcttcttatcttcactaccttaagagaataggatcatagatgtcatttgaatttcctttaaggcattaagagttttgttccagaaggcagaggcacttaagcactcatagttgcccaaggccatctaagtcagtggttctctgctcctttaggcccacaggaccctttcaaaggggtcacctatgaccatcaaaaatccagatatttacattttgattcataacagcagcagagttatagtcatgaagcagtgacaaaataatgttatggttggggtcaccacaacatgaggaactgtgttaaaggcattaggaaggttgagaaccactgtcctaaacaaaatgaaatctgaagacccgaaagctattggattggtctccatgcagaacgcacactggaatcaccgccaggacttttcttcctcttgaaacagtgaggcacaggctttaccctaggtcagctctgtcagtgaatacagattggggagtgtcatttttatattccccagaactctctactgctcttgttgcaatgagaactaacaagacaagtagaaaaaaccaaagcaagcacctttctagcctagtcctggctcattatctcctttttaacacagtgacaagtcttactcctcaccaacccaactttccaccatgttcctattgacagttagcactagaaggaacacaaacttgagaaagagctatcatcattcttacaatgagattattatggaatataaggtgaataaaagcccattctccaaaagaacatgcattagatatgataaaatccctcttttcacatttgtgattggtttccacatcacacagactacaatcttaaattgcatggaggccagcagggcagcagtggaacaaaggtaactggttgaaaaccttgctgctggttaagcaggacaagacaacaggcagaacgacaggcagaacataagcatatgttcagtttgctgagcaggaactgtcaagttcattaaaaataccaaaaatgggttaggtcttttgggactcctgaacctgaatggctgtatctttgccaagattagggatgtctagggttattgttttacatatattttatactttccctcttctgagaccccaagactcagatatttgtttgtgtaatggtgcccacatgtctcgggctttgggtttttgtgttctttgtctttcctcttttttcttctactttctctttttttttcatctgattggaatattcacaaaaactgtctttaagtgcagattttttttttctgctttagactgctgttgagtctctcagctgtgtttgtatttggcttgttcagttcttcagttccaagggttctatctggttcttctccatgctaaatctggagagctctcgttctaactcatggcatttttttctgttatttttctctccgtagttgctcatgttttattgactttccttagaatcaatcctctgaacatcttatcaggcgcctcatcggatttaaggttagttgccagaaaattactatgctctatctgttgataacatgtctgggaaagttctttctaggcatgtcaccataactatataaatactcttacctttccctgtctcatgtctgtcacttatccctggttttaaaaagtacatttccaaacaagcacagcagctattgagtgaggggacagtctaccctctgagtaagtgctgccagccacagtgtgaaagcatgcagcactcctgctccagtgcctcagagacagcatcattagggaaagcaagcatttaacgctgtttgcttgatggcgctctctgcctcaaagaacgtctgtctcttaggcccagaactccatgttgataggctttcacaagatcatctcatactgcccagcttttcccccctcctcagttatcttctgtatcactgtgttgctaggcaacaattattcttacaattttacttcaaattttgttggccagtaatgttcattgttaagtgttgatgtgctttataaagtatgtactgtatgtatgcatcactgagttcactattaatttgtccagtgttgatgatgcttcccaatgatggaaagaggaaagtgttggcttcatgataagggaagtccaatcagctatatccataactctaaaaataatagtataaaaaagtatattgatgcaggagagatgcttggcagttaaaaataattgctgctcttgtagaggacctgggtttggttacaagcacccacattggacagttcacaactttatgagactagttcctggggatttgatgtcttcttcaaggcctctgaaggcatggtggttcatgattttaattccagcacccagcaaaggcaaaagcaggcagacctctgagttgaagaacagtatgttctatgtagctaggtcctgtctcaaaaatactttaaacattttaaatttgggggggattggagagatgggctggtggttaagaacactggctgctctcctagaggttttattctgctctggggctcacaactgtccgtaactccagttctaggggtctctgagggcaccaagcatacatgtggtgcttagacatacatgcaggaaagaacattaattcacataaaataaaaataagctataaaatgttacatttttcttttacagagatgtatttatcataatctaatattgtgaattaattttctgcatgtttatgtattgtttacattgatatagatggtccttatgatctgagagtaattgtcgacagtattttaaatatttttatgtttacattatttaaaaaacttgaatcatgtttaaaaatattatatatataatgttttgataaaatccataattctattctctctattcagtttacccaccaaaatgttcccattccaacattacatgttttctgtcccctctttaaataacctctgagagcatctagtgctgcctgtaactgcatgggtgcatgggtctcagatcatctgagagcatggacagtctctccagggccaccccactgaagaaacctgacactgccttccccaggagccctcagttgccaatattctcttctacagctccttactcttcctgctgggattttggctagcttgatcttgtgcaagtcttgggcacaaagtcctagtcactgtgagttcatgaatgagataccgtttcatgccagacatctctctctttggatcttgggatctttcctcccaatcttccatgatgatgctgagctttgagaggatacatgatacagatgtctcatttagagctgagcttgccagctattgctctcagcatgctgactggttgtgggtcactgtattcatcactgtctattacaaaaagaatctgccagatgggaagcacagctagctctggcctatcttcttccagttagacagatatttgttaagcatcaagacagggcattaagtgagggagggggttgccatcccacagtcaaaactctgacccatattttttcctgtctgaaagaactccagggatggaaatggagaggagcctgaggaaaacaaggtctagtgacatgcccaaagtgggatccagctcaaggggaggccccaaggcctgacactattactgaggatatggagggctcacaaaaaaagggactaatcaggatgtactctgaaatacccaacaagtagctaaaagagtcagatgtagatatttgtacccaaccaatgattaactcctgtagttgaattagggaaaagctggaagaagctgaggaggagggcgaccctgtaggaggaccagcagtctcaattaacctggacccctgagatctctcaaacactggaccaccaaccaggcagcatacaccaactgatatgaggcccccaacacatatacagcagaggactgctaggtctggattcagtcagagaagatgcacctaaccctcaagagactggaggccccagggagtttagaggtctggtggggtggatggtgagtggtgggtggtgggtgatggggacatccttgtggatacagggtggcaggaaggaggtatgggagggtggagccgcaggggaataaaatctggagtgtaaataaataaataaaagattaaat

SEQ ID NO: 64 - DNA, 83943 bp, Mus musculus; identical to SEQ ID NO: 63
  misc_feature (4860)..(5004): n is a, c, g, or t
  misc_feature (21150)..(21169): n is a, c, g, or t
  misc_feature (22247)..(22266): n is a, c, g, or t
  misc_feature (25696)..(25715): n is a, c, g, or t
  misc_feature (26732)..(26751): n is a, c, g, or t
  misc_feature (27894)..(27913): n is a, c, g, or t
  misc_feature (33042)..(33061): n is a, c, g, or t
  misc_feature (34250)..(34269): n is a, c, g, or t
  misc_feature (35850)..(40949): n is a, c, g, or t
  misc_feature (71256)..(71275): n is a, c, g, or t

SEQ ID NO: 65 - DNA, 907494 bp, Ashbya gossypii
cccatacaccacaccgctgagagacccatacaccacaccgttgagagacccatacaccacaccgctgagagacccatacaccacaccgctgagagacccatacaccacaccgctgagagacccatacaccacaccgctgagagacccatacaccacaccgctgagagacccatacaccacaccgctgagagacccatacaccacaccgctgagagacccatacaccacaccggtgagagacccatacaccacaccgctgagagacccatacaccacaccgctgagagacccatacaccacaccgttgagagacccatacaccacaccgttgagagacccatacaccacaccgttgagagacccatacaccacaccgttgagagacccatacaccacaccggtgagagacccatacaccacaccgctgagagacccatacaccacaccgttgagagaccccatacaccacaccgctgagagacccataccccacaccgctgagagacccatacaccacaccgctgagagacccatacaccacaccgctgagagacccatacaccacaccgctgagagagacatgcgctcaaccagcgtgcctcgtcaatctcagatccgatttcttccggtcgttagtaatgagtttcccataatatgaccccggtagtttttttttttccagtacaccataggacacagagtctagcttcctgtattcgtaacaaattatatctctaattttccccccatgtgcggtcaatccgtacaccatgggacacaagatcagataaattaatttaatttaaattaaaatagaatataattattttttttagttgtttttaattgttttttattaaaaaacatttatttgatagtagttttgtagaataattattaactatgtagttggtcgggttttagaaaggtggtaggtagtctggatatcttccaatttggccgtaagtgtagatagggtgcgaagtagaggtcttcgctcatctaccacacgatagacatgaataactgtcaatcagtaatctgaactgcctatccaggctaaaagctcacttctgagtgggaaaatattctttcaatttggacgcggattgtcgccttccctacgcgatgtaagcaccttagggcattattgagcgaccaactacgtcatattatggaaagtttgtaaaagttcgcgcttaggctatttcggaatgtggccaagctctggtccaaagtatcctctctcagtttcggtcacattaagaagcggcacccgagcgtaatcaagacccgcatatgagatactgtttccccaccagttaagttcaatgtccttccattgaacggagaaaaacatcaagatagcagaaaacaccaccccgcaggtgatggcggcagcaatgacataattatacctctcccatatacgaaggtggtatcttttcaagtaaaacatagaaatgaagcccacatagagaccagaggtactatactgcaaattatagggaggaccaaaagaaagcatgccaataatgaagatcaccggactgaaacgtctagggtacggtattttgtcgtacatgatactgagcctcttccatattccgaagaataatcctacgcacgccccaattaaccagcaccatttcatgataggatagacatgttcaaagattcgtcttggtccaatagcaccccacatgacagaagcattgaagtatgttctgacgccgggacatgtgaacttgaaccgctgcttaggatcgcaatagttctcaacattatgaagctgccaatttataacgccaagattcacaaagacctgtatcagaaccattaaaagctgtcccctaaatagtgggataggtggtattttcgcgtagtgtgccatcttcatattgctgagatagttatcagtttggccatcaatattatacccgaatgccttgataaacattagcgcataaggatttcctggcaatgccaggccactgatcatttgcagcaacaggttcagtcctatagtaacaccgcgcgtggcttgtagtaacgtaattggaagaagcagaatgaagtttaagcctacggctagaaataatccccacacaggtgtattggttttgaacgttgtcaccacgatgactccaatcacgattgaaaccacaaatattgacatgtaccaccactcaggtacttctttgtatttcctcatcatccgacagtgtgggtcgtggaattcgtctaacacgtgcttttcgttactgaaggcttcacgcaacccgctacgcgttctcagtgaccatagatctaggatccaggctttatacacccgcatataaaatgccccctgctgcaggatggagctcaccacaagcgctgtgtaaacgcacataaaacaaccatacgccaccatgttacctgcagtataatatggaaatccgtatttctggaacttctgctcatcgagtaatcgatcttcagtcagtatttcctctacttggtacacttttgctttgttattatataagctttgcgtgaaaattggaagaaactgacattcactgtagttcatataatagacgccgagagtgattagtgctgcaagtagacctcccatatacatagtcagcgttactctgaatggaagataaaaaccgcccactccaatgttagtccagtccaacgtcgaaagtgggttcagtcccacgccattaattccgccagtgacagtcgcaagattgaagttatccggttttatccaagttatccagttaaaagtactcaaggcttcgaaaaggtatgtcggaaaccaattgtatacgaaaataattgcaaaagtcaagtagaacatcttttttctaccaaacccccccgagtgctcgtcgctcatcatcgccttattcagcgctatcgtagtcattatggatggccacatagcagtcgctggatacaccacgtattttctcatgattccagccaagccaaaccccaagaactggagtggaattgatagtagcaattgatacgcatatggcatagggcttctgtagtgaatgtgctgcgttaaaatattatagttcgcgtagaacgagccagtagtgataccgtacaacagcgtcacaaacatctgctccttctcggtccacggactatcgatgttgagtgcaatcctgcggccatagacgttgaagccccagcatggcatcaagcgcgcccacaggagtccacagggatacaccagcatctgcaccgcagatatactgagagcgattgaaggctgtctctccgaaaagaacatggtcaaggcactcccaacaaccacccaaaaagtcgccaagaaataggcacggaaagtctctactggaatcgttggatcatccacagggctcgcgaccgccctcacttccacgtacggcgagtagtactcgaaaatccctgcaacagttttaagttcgaacacatgctgcggatcttcggggtcaaaatctctcttcgagaaacgaactaaatcattccaatcatcagtctttaaattgaagtcctcattatgtatctcaaagctcagatcgattattctcaagcatttctcgatatccaattccgcaagcttcgactccaggtatcttactgaagcaggcacatcgctgagatctctggggtggtcgtagcccattcgagagatgaggtacaccaattgctcgtctgtgagaacctccgcggtaacttgctcttctgcaccagcattgtatttttccttttccttgtcgtgactagataagcttggtgagcggctaccatacgaaggggggtccccgacaccttcagagatcttgctcatgtctacttccttcctagcaggcgaggtttacgggtagttgtgcgagactcaagcagtttatgctgctgcatatatacagatatccttatctatctatatatcgttcatctaagtatctccgtatccgtctgtacgtttgctgctgcgttactccccgccgctcgagactagagtgtctcgtacaaatctcgctactcgaatgtggtttttgccctattccccatctgtctcgactgctactgctcgtgatcctgcttatcacagctatacggacaaccgaggattccattatgggcacacattacagaatacaagcaacgcacattctccggcgcgcattggatgaaccttggcgttatgtcagcatgcggctgcatcccagccgtgtctcgaaaaggagatgccaattacagagagaactccgcacaacgtatttcggaggtcaatacgtggataaccgaaatccgcacctcaggacatggtgcggccgcgtctattccctgcattatttaccctcccattactacaagttgcatcggtgggaattccagcggtacaaatgtaacattcgtgagttacttttccgcatcagtaggaactcagttttgcaggacgtatgccatgctcttaggcggcaaaacaagcacccacagatcggagatactgcattttctatcggtaattgtgataaagtaactcagggcaacgccaactgtggagacggcgcaaaagcacggagttggagtcggaatggggttgccagtgtcttgatggtttgattaagagacatcactgcatttgggttttgcgatcgtgttgcactgaggatcaggaggtgtcacttttttgtggcagaagtcaactctcaggttgaatttgttaaatccccgaggttcagtccagaaacgggactcgcggagccggtgataagctattaacacgactatacttacagatctacaccatgcgtggagtgcgggtccaaggcgaacaggagacacataatacgcttcagtgggcgaacctaaagtcaagcctcttgttgcccttgtcggttgtattctcgatgtacgactgccgatcttgctcggtcatcgcattccataccagctctctccttctgttgcgccacatgtagtacagctttacgccgatgaaaatgggtatattggcgagcatgagaaaaaacaggatggtattacctctgtgatatagcggggcgtcgtccatcctgtaaatctggtttccacagacaaagccgatcacgttaaagacctggagaacggctgctgacacagatctcgttttaatggagtgcgagtttctagaagcccacgaaaacatcatcggaaatatgtaggggcaggccaacagcacgaccattagcgcgtaggtttcccatcgcgtctcaaatgcgcctttccaccaccggagaaatccgagtaacactagtttccatacgcaggaaaccagtgacagcaacgaacgctcgtctaccacctcgtagattttcagcatcaccaggatggcgacagtattcgaaaagaagttggaaatagagagtagttggacggtaaatgtggaaaagccaacatctttgagtatgataagcatgtaaggccctgcggctgcctctggaaagaaatgcactagcgcgagtaagtacaaaggccacaagtcgtaatccaagagcgcttcgatgaatagcttggccgatacaccagttttgttgttcatatctcctttgctgggatcatctctgagtaagcgattaacagctatcaattcttgcctctcagtgaaccagccctttggatgcaagaggctcttagtctcaactattgacgggacaaagtaaaaaaatccgaaaatgcccatgacgcaggtaatcactccttcaaataagaaaagccactgccaacctgaaagtccgcatatcccgcgcattcgaaatataccgtaagacgccaaaggcaatacggagttcattagcccttgcgcaacccagaaataggacactctcattcccagttcctttgcagtataaaaactggtcagccatgtcaccatgatagccgcgaagccggcctcagcgagacccatgaatacccgtaatatgatgagcccgactttattacgcataccggcctgcgccattgcaacacagccccatataatcatttgacaaggtacaactcgttctaccccatatcgttttgctatcagctgcaccggcacagttcccagaagatggaatacattgaacaactgatttccaaggttatagtcgttcgttgttacatttaattcttcgagcatctcatctgaagtgccctgaaagtaattaaacctgtcggcttccatggcgcaaaataatatacatgcaataaatgccaccttaaagtccagccgtctaactagtcgtttttcttcatctttagaccatttaagctctgggtcaaagtgatttctgcattcgtagttcgcttcacgatacagattcctgtagtattccgcaactacaggatccgcaaacgggtttgtcccagtaaagtgctcgagttcaacgatgtcgcatccctcttcacttttggaagatacttcttccgaagctctgacttccatcttattggctcgaagctgcggaaacaccgagagaactgatcgaacccttccatatagtgtttggttccttatatactgcgagaagacttatgtcccgatgaccaaacgcagagaattaagttaattccacactatgcaatgtcactgctgaagaaaactactgaacacggatcgagcaccatgaatacggagcgagcaccatgcaaacgatgacattctcggtatagtgacttcatgggaaatcgggcgtatagcgcgaattaagatatcagtcttaatagtgcaggattatcccggcaagaattttactaatattgacaaaaggagtaagatgagtggaggtactaatcattctacgcaattttcaccattagtataaaatcaagagtatctggaataaagggcatcattcactgctggtttgcgtagtgaagctcatgttaagatagccatgattccgataaaatattatacaggggcgagtcttccctgggcggtttcgcttacggcacgtgctgaatctcgggagattcacttgaaaaacgctagtcacggatcgacggagtagagcgtgggtgagatgcaccgcacattcccgggtaacacctgattaaaaaagatacgcattgctcgtatccgcactcggcactacttaggtgctagtccatacatgcaaacgtataatacattcttctctcccgaatattccgcaattgcactagttttgtacgataatgaagtcaaccagccccttaaggacatcattaggtatagttgcggatggaccaagcccgggcatttctcatgagctaattctccagaaaatttcggtagggctcggtaacatgagctattcgcagattacagtatgatagcgttgagacaaaattataaaaccctccatttcccatggcccggtgttacgagctatcatcttatgaatcagacatggcattacgtcctggcacgacggtcaaaatattccaaagctatatttcacattgaactggcaatggaacagacccgccatctgagcggagcactgtcagcttggtagatacactctaaatttactttagagtgtaatggcaacatggccgagcggttaaggcgaaagattagaaatcttttgggctatgcccgcgcaggttcgagtcctgctgttgtcgattttttgcatctgatgctgtttcaggctacgccaagacttcagaccagtctgtcgttgaacggtacaatcgttactccgctacaatcgttactccgcccagcggacaaaaagcgtcaatctttccgacccctcgcagcctttcctgcggcagctgctaaagtacacaattttatgcctagacctgaacgagagtgatttggtagatgacggcgaactaagaagccgccctaagcgaagttcatagcatgtaggtagttgcttttcttgcttctatcggccacagcgcggtccgccgtttgcagttggccggccgcaagcagtgtgaccaagctgcgtatgtttctccgcgcaccgcgcatgctacgtacgaattacagcagttgcaagaatggcttggctcagaaggacattcttccattgaggccgattagataatactatgacacgacgttgactatcgcaagcgattccgcatatgtgcttgctgaaattattgccaagaactgcagttgcctaattgtggttcactgggagggttaactgagagggttaagcattacgatgtgcactaatttaagctcttgacgcatcccaccgaccttctgttggggagatagcggcagtgtcagaagtgcctatgcgtttttaggtgacatgctactggagggaactgaaagcattccgtaacttacagccaatatatagcggcggacaatggcttgcgtgcacactgagaaaggtcatccgtaccaatgtatgcgctcgtgatatttaatatagtattgtgtaatgcactggatgtgaattttaattccagtgcatctatatgcaacgccacgaagttgatccagcagggtatactagactactatgaggggctgaggccgggcggtagggtaggcttttttcaagaaccctactattggtggatggccggggatgtctttggggggatggtagaaaattggtacctatgcgacaacacggagtacaaggacttgctaaccgaagcaatggtatctcaaataggcgaaaataaggattatgtgccatggcaccagagaatggtggagggcaacgatgaccagggcatctgggggctgctggttatggacgcggctgagagggatttccccgatgcgcccccggaccaagctccaggctggctggctcttgcacaagccgtctttaacaccatgtgggctcgatgggatatggataattgtgcaggcggacttctgtggcagatatatccatggaacgttgggtacgattataaaaatacaatctccaatggctaccttttccagatcgccgctagactggcgcgcttcacagggaactctacgtacgggcgtgttgcggaaactgttttcgactggctcgtggactcaaagctagtgcaattggacaacgtagcattggtgcttgatggcgcgcatgtttatacgaattgcacggacttcacccggtacgaatggacatacaactacggagtcgtactcggtggatgtgcctacatgtacaatttcaccaatggctcacctgtgtgggcaaatcggctgaatagagtgctaaatggagcactgttgttctttgagaatggtattatgtatgagcgcacatgccaggatgttgatcgctgcaataacgaccaacggttttttaaaagtatattcaccaggatgctcgctctgaccagtgtactggcgccacacaccaaagcgcgcatcgagcccaatatcaggaaaagcgctgaagcggcagccaagtcatgcaatggtgggagtgacgggcacacctgcggcctggtgtggcgaaactacacttgggacggcaaggctggacttggagagcagctgtgcgcgctagagattatccaaaacacactgatacacaccaaacggcctccgttgaccgccaaacagggggccaaaagcaaaggagacccggcggccggtctcaattcgagcaggtatgatttgcccatcgttcatccgcccagcggacaaaaatcgtcgatccttacgaccctccgcagcctttcttcttctgctaaagtacacaggcactatgcgtcgacctcaacgagagtggttcagtagatgacggcgatctcagaagccgccctacctgaagttcccagtatgtaggtagttgcttttcttgcttccatctgcacagcggctcgccgtttgcattttgccgaccgcaagcagtgtggctaagctgcgtacatttatgtgcgcaccgcgcatgctacgtacgaattgcagcagttgcaagaatggcttggctcagaggagcatactcccattgagacagattagataatactatacacaacgttggatatcgcgcttaagcggttccgcatctgtgctggttgagactattgtcaggaacttcacttgcctaattacgactacttgggggtttaactgttacgatgtgcacttatttaagccccaggcgtgtccaagaccgaccttatgttggggagatgtcggcatgagaagtgcctatgagtgcggtagtcatatgcaggtggggtgggtcgaaagcattccgtaacgtacggcccaatatatagcggcggacattggcttgtgaaatccgagacagggtcgtctgtaccgatgtatgtgctactagtgatattgaatatagtactgagtaacgcactggatgtggacttcaattcgagcgagtctatatgtgacgctacgaagttgatccaggtgggcatactcgactactatgagggggcgaagccaggtggtagggcaggctttttggtcaagccctactattggtggatggcgggagaggcctttgggggaatggtagaaaattggtatctatgcaacaacacggagtaccaggacttactgactgacgccatggtgtctcaaataggcgaaaataaggactatatgccgtcgcaccagaagatggtggagggcaatgatgaccagggcatctggggcctgctggttatgggcgcggcggagaggaatttccccgatgcgcccccggagcgagccccaggctggctggctcttgcacaagccgtctttaacaccatgtgggctcggtgggatccagagaattgtggaggcggactgcggtggcaaatatttccatggaacggtggatacgattataaaaatacaatttccaatgcctgtcttttccagatcgccgctagactggcgcgcttcacggggaactctacgtaccaggatgttgccgaaactgttttcgattggcttgttgatgtaaagctagtagaattggagaatgacgcacgggtgctggatggcgcacatatctcggagcgttgcgaggaccactctcagctcgaatggacgtacaatcacggagtggtacttggtggatgcgcgtacatgtacaatatcaccaatggctcagctgtgtggggagataggctgaataaagtcctgaatggatcactgttgttctttgagaatggtattttgtatgagcgcgcatgccaggatgttaataaatgcaatgatgaccaacgctcttttagaagtatattctccaggatgctcgctctgaccagtgtcctggcgccacacaccaaagcgcgcatcgagcccaatatcaggaaaagcgctgaagcggcagccaagtcatgcagtggtggacgtgatgggcacacctgcggcatggtgtggagaaactacacttgggatggcaagtatggacttggagaacagctttccgcgttggagattatccaaaacacactgatacacaccaagccgcctccgacgactgccaatgagggagccaaaagccaaggagacccaggagccggcctccagctaagctcgcctaatagtattacacttcccacccgccaaattcgcttgaaggaccgtgtcggagcagggtttgcgacagtcgtatttctgcttccgtttatcaccggatcaatttggatgtccatatagtttcttgcatatggattcccaaggcctaaaccaacgatgctggcattgagctctgtaaatgaaccataatatctattggcaccattctatcacccactagctcggaaccaaccaatcgatcatcatctgatattcaaggactgtgctttctgtagaccgatatgtatgatggacggccccacgatcagcgccaacgaagttcattatctctcttaagcggtgtctgcattctgtgtggctgtaagaatattgtccggaatggcaattgtgtagttggggatactggaggatttctgagtgctgttgtgaacttatctaagcttctggcctgtacaaggccgactaatattgaggagatgatggccgcgttagaagtgcctactggcgcggtagtcatatgcaggtaacattgtcggaaagattcgcagtggttgcaacgaagtacgtacttggtgttataaagtggttacagtcgtgacctcaaaatgcgtgagagaactcgcacggccactacatagcggatgacagtagcctttgtgagggtcggggcggagccgtctttgccgatgtatgtgctactagtgatattgaatatagtactgagtaacgcactggatgtggacttcaattcgagcgagtctatatgtgacgctacgaagttgatccaggtgggtatactcgactactatgagggactgaggccgggcggtagggtgggcttttttcaaaaaccctactattggtggatggcgggagaggcctttgggggaatggtagaaaattggtatctatgcaacaacacggagtaccaggacttactgactgacgccatggtgtctcaaataggcgaaaataaggattatgtgccgtcgcaccagaagatgatagagggcaatgatgaccagggcatctgggggctgctggttatgggcgcggcggagaggaatttccccgatgcgcccccggagcgagccccaggctggctggctcttgcacaagccgtctttaacaccatgtgggctcggtgggatccagagaattgtggaggtggattgcggtggcagatatttccatggaacaatgggtacgattataaaaatacaatttccaatgcctgtcttttccagatcgccgctagactggcgcgcttcacggggaactctacgtaccaggatgttgccgaaactgttttcgactggctcgtggactcaaagctagtgcaattggagaatgacgcaaaggtgctggatggcgcacatatctcggagcgttgcgaggaccactccaagctcgaatggacgtacaatcacggagtggtacttgctggatgcgcgtacatgtacaatatcaccaatggctcagctgtgtggggagataggctgaataaagtcctgaatggatcactgttgttctttccgaatggtattttgtatgagcgcgcatgccaggatgttcaaaaatgcaatgatgaccaacgctcttttagaagtatattctccaggatgctcgctctgaccagtgtactggcgccacacaccaaagcgcgcatcgagcccaatatcaggaaaagcgctgaagcggcagccaagtcatgcagtggtggacgtgatgggcacacctgcggcatggtgtggagaaactacacttgggatggcaagtatggacttggagaacagctttccgcgttggagattatccaaaacacactgatacacaccaagccgcctccgacgactgccaatgagggagccaaaagcaaaggagacccgtcggccggcctgtatgacaattcacctaatattattacactctccactcgccaaattggcttgaaggaccgtgtcggagcagggtttatgacagtagtacttctgattccgtttatcaccgggtcgatttggatgtccatatagtttcttgcatatggatcccaaggcctaaaccaacgatgctggcattgaggtctgtaactgaaccattacgtctattggccaccattctgccaccatctgatattcaaggactgtgctttatgtagaacgatatatgaataatggactgccctcacggctaggctccaggtgtacactttcaaaaggcaaggacgcggcgtttcaggttctgtggccactgccaacacaggacttggatggtgtgggccaaatgataataaatgatatgaagtcagcattgtgctatataaataatatatattttaaaatgatcggtgccttgctagtggaacgtcatctctcgtgaatatttacgtgaaaaccgcatgaaaccttggatggaacggagaagtgaagaagtatgaagttcctatcaatcgctgagttacagttcatcagcaaatggcaagttgctcacatccccgacggcaacgtagttgaatttacccaacttgaagtccttagcgttctcgagcttcaagctaacaggggaggcggcggagtcgttttcgacagccaactgcagagcggcgtacttgcgggccacggagatgtctttgccggccttcaagtcggcgacaaccttcttgatgtccgcagcagccttggcggcctccgcggacttgacgtagagcgagaacaggccgccgtcggtgtacttgtccaacttcgccttatgcaccagcggagaaagcgcgtacaggtccgaagtcaagtatctggccaggacctcgtaggtggcaaagtcggccttggccaccggaacggcaatcgcagccacggaggagcccgcgtgtctcaaccgcgcctccccggagtgcgtcttcgcgttgccggagccggccagcgaggtgcccgatggcagcgacgcaagcagcgagtcgttgacaaaccgcttcaggtccgcctcgttgatgccctggcccagaaccgtcacgttctccttggtgtacaccttgtccgcgtacgccttgatgtcctccagcgtgaccttctccaccccgtcgtacagcaccggcttgcccagcccgtgtctgtacgtcacgctgtacagagcctcttccgcggccgccacagggcacgcgcgcgccaccgccgcgtcgcgcgtcgccgcaggaagcaccgactccgccagctcgtgcggccggaacgacgtcttgtacagcacgtcggccagcgcgttgacaaagtacggcaagtcctccttgaggaacgtcgcagacagcgtgatgtgctcgcggtccaccgtcgactggaatctgccgcccaacagctccgactcgcgcaccagacgcaacgcagacttgttgcccgtgttgtggaagttgaaccgcgacagcaggtgcgccacgccgtccttcgtcgcgtaccgcgacccgccctgcacctgcacgctcagggtcgacaccttgccggagccgtccttggctgccacgctcaggtgtctggcgaactgcttgctgcactgcaatctctgggacaacattgttactttcgcgctgtattcttacgccttggcaaaggatggcccaacactggtctctcgaatagatcgcctagctgctcacctgtgtcgctgtgttaacctccgcggcgcgcacagctagcgccaggccgctgctcgcggcctccgcgccccgctgcggcgccttctggggaaaaatctgagaccaccgcaaatttttgctcgatctcattggttcgtgcgccgcgatgccgcgccacgtgaccgagccacgtgaccccgttcgcgtgcccggcacccggtggtacgggctgcaaagcgccacaccgcaagcgcgatagcgagcggcgcaggcgcgtgcctcggcaggcggtcggctgcgccggcccgcggccgcgccagccgtccgcgtatacgaggcagctcgtcgcatgagaccggaaccggcgtggtatgaatcatcgcaagggtcgcgcgatcagtcaccggcgggggccaaatatttaaggagcacgggcaggcccagcacaagcgagccagaagcaacgcagacagcgaaatgttcagagcagcaggcagacagatgattgcgggcacgcgcgcggcggcgtggcgcgcgctctccggcgcgcgggcacgcgcggccatgcggccggtgcgcagcgcgcgggcggcgccgctggtgcagtcacgtggtgtgaagcaaatcagcttcggcggcacgcccgagacggtgtacgagcgggcagactggccgcgggagaagctgctggagtacttcaagaacgacacgctggcactgatcgggtacgggtcgcaggggcacgggcagggcctgaacctgcgcgacaccgggctcaaggtggtggtgggcgtgcgcaagggcggcgcgtcgtggaaggcggcggtcgaggacgggtgggtgccgggcgagaacctgttcgacgtggtggaggccgtggagcgcggcacgatcgtgatgaacctgctgtcggacgcggcgcagtctgagacgtggcccacgctgcggccgctgctgacgcccggcaagacgctgtacttctcgcacgggttctcgccggtgttcaaggacctgacgcacgtggagccgcctaaggacatcgacgtgatcctggtggcgcccaagggctcggggcgcaccgtgcgctcgctgttcctggaggggcgcggcatcaactcgtcgtacgcggtgtggaacgacgcgaccggccgcgcgcacgagaaggcgcaggcgctggccgtcgccgtcggctccggctacgtctacgagacgaccttcgagaaggaggtcaactccgacctgtacggcgagcgcggctgcctgatgggcggcatccacggcatgttcctcgcgcagtacgaggtgctgcgcgagaacggccactcgccctccgaggccttcaacgagactgtcgaggaggccacgcagtcgctgtacccgctgatcggcaagcacggcatggactacatgtacgacgcctgctccacgaccgcgcgccgcggcgcgctcgactggtacccgatcttcaaggacgcgctcaagcccgtgttccgcgatctctacgagtccacgcgcaacggctccgagaccaaacgctccctggagttcaactcccagcccgactaccgcgacaaactcgaggccgagctccagaccatccgcgacatggagatctggaaggtcgggaaggaggtccgcaagctgcgccccgagaacaactgaccgcgctgggctgctgtgtcacctgaactgactctccgtgcatatgtattcatctatagcctctagtttacctgaataaacaggctactctccaccagttacacccccgacgctgccaaaaaatcgtcggccccatccaccgcaggtctggccttagctcagagagtagaaccaagactcgccgcacgggagccaccaccgccgagagatccatgtcaaacacgctccgtccgcagatctacgtcgggtgcaaggcgcccaacttccaggtgcagtcttcgcaggggatcatcgacttctacgactacatcggcgactcatggtgcctgttcttctcgcacccggcggacttcacgcccgtgtgcacgacggagatcggggcgctcgcgtcgctggccgaggagttcgcaatgcggcgctgcaagctcctggggctgtccaccaacaaccgcgcgacgcacgtcaagtggctcaaggacatcgagcgcgtgaccgggttccgcgtcaacttcccgctgctgtgcgacgtggaccggcgcctgagcacggtcttcggcatgctggacgcgcgcacgctggacgcggacgggcacccggtgccgctgcgatccacgtacttcgtggaccccaacaaggtcatccgcctagtccagtcgtaccccctgtccactgggcgcaacaccgcggagctgctgcgctgcctggactcactccagctgtccgacgccacgagccaccagttcatgacccccgtgaactggattccgggcgacgacgtcgtgctcgcgcccgacctcgacgcgccgaccatgcaggagaagtacccggagcaccgcaccatccgcgactacctgcgtctggcgcccttcgatccggatcaactggaccgctagccccggcgcgcgccgctgccacgcccggcacgcgggcgtggcacgtggcccaagaacgccagcgagggcgtctgccgacggatacaaactacacacgaagcccgggcttggcgcccgccgatcacgagaatgtggtgggctcgctgccttgcgccgcccccttacgtgcgccgagcagtgccctttttgctgaactcacaaatgccatagggccagcagggcatcacaaggatcgaacaatttgtaagccaaaaaataggtgcatgatcgaggctttataaacggcgggcccacttctttccgcagccgttgacacgcaagccgcaactacgactaacatggttgagccaacactaaagaagcaaagaaccggcaactcgctcgcgcagctaaaggccaccggcacgacggtcgtcgccgacacgggcgacttcgaggccattgcgaagtacgcgccccaggacgcgaccacgaacccctcgctcatcctggccgcggccaggaaggagggctaccaggcgctcatcgacagggctgtcgagtacgggcgctcgcgcgacggcagcgtcgagcagcagaccgaggctgccgttgaccggctgctggtcgagttcggcaaggaaatcctgaaggtggtgccgggccgggtgtcgacggaggtggacgcgcggttgtcgttcgacaaggacgcaaccgtgcgcaaggcactggagatcatctcgctctacgagcagcagggcgtgtccaaggaccgggtgctgatcaagattgcgtccacgtgggagggcatccaggccgcccgcgagctggagtcgcagcacggcatccacgtcaactgtacgctgctgttctcgttctgccaggccgtggccgcggcggaggccggcgtcacgctgatctcgcccttcgtcggccggatcctggactggtacaaggccagcaccggcaagacgtactctggcgacgaggacccgggcgtgctttcggtgcgccgcatctacaactacttcaagaagcacgactaccccaccatcgtgatgggcgcgtccttccgcaacctcgacgagatcaaggcgctcgccggcgtcgacttcctcaccatctcgcccgccctcttggagcagctgatgacgtccgcagacccggttcctcaggttctggatcctgccagcgcaaaggcacagggcgatgacaaggtttcgtacgtcgaggacgagccggcgttccgctttgcgctcaacgacgacgccatggcgaccgagaagctcgccgagggtatccgcaagttctccgaggacatcgtgaccctcttcgccatggtcgaggagagaatccgcgcataagcgccttccgcgcgcccggatccgtggatgcagctaactaaaataaatattaaaccgttacttaaccatattgaccgatgccgagcttgtttttcgctggcgccattccgatctcggccttccgttcgcccgcacaggaacaaaccctgctgtgccgctccagccatcctgtggcttctcttttacgcgtccacgctcgcatggcagtagtccagcagctgatcgcatgattccatcaactcgttcagcttcaggcgcacgtacgcgacgttttcatagagcgagcgcagctctttcgagcgctgcgggggaatcacgtactccagctcgcagcccacgcccttttttaagcacgacgagcacggcttcggccgccgcgtggccgagtcacactttattttattcttgcggcagcgcacgcaggatcgtagaggcttcttcatcttccacgtgctgtgcacgtagcccgcagcgcgcttatcaccatgagaatccgaacccgagtctgccatggcgttccggccggggaagcaaaagccaagaactaggactattttatacttctccagtttttatgtctatgggctttttcagttgcctatagatgtgctctcagccaacccttgttgacgtaggaagcacggcggcagcctggcacggtcgccgatcggccagggaaccagtagaccctgtgtaggctaaatacctcaagttccttgttggggtagatcgaggatcggagagtgcggcatccgcgcggtttgcccgtgcctcgcgctgtaaacgcagcccgcaaacggtgccacagggctatagcgtgatcgggctatgcacgatggtgcgcttacgcggtggaatgcgagtggcgagcgccaggcctgcgggctgcgaggcgtgtgcggctgccggcagcgtggcgagcggcgcggcgcgcggcgtgggctgcgatgcagagcgcgcgggctcgcgcgcggccgggctgcgcgaccgctggcgcgcagcctggcgcggacgccgaaacggctcgttcttggccagcgacaggctgtgacgggcgtgcggtagcgcgcgcgcgcgcgactgctggctcccgctcggcgacgagggcgcgcgccggtgcgccagcgacaccaccggccccggcagcgcgcgcggcgtgtgtcccggccgaaacaggctgatctccttgtcatatgctcgatccagctccgcaatgatgataaggaacgccgcgaagatgtggtgttcctccgccccgaacccgcgctcgtccaggatgtgcgccaattgccggctattggtgacaaactcgctgcccagcagcgtgccgccctcctccgtgtacagttggaacttgtttgtcagcgtgtagtatttcagcttcccatcatgccataccttgtgcttcttccgcagttgatccgtgtactggcagaaatactccactacgtgtgacacggtcttcccgctggacattctggtctcaggccgctggcgatacgtgttcgaccgtttatgtacctcaggagatgggtgtctagcggatgattggggtgcctgtctctgcctttggcgacgtgcgcccaaaaaattgatggctgtggtaccagctgaggacaagataaatgctgaggtagaaagggctgctggggacggtcctgagtctccgagaggaacgccggggttggatcgatgccgtgacgcaaacagggaccgatccgcccttctcgtgccgtcaattaattactactacatatagtggacaaaggtagtacaaagtcatcgcgcacttcgcacaaattaacatcaaattgcaacataggcccgtagagatacccttgcaccagtgagagcgcgcgttgctgggaagtgcgcggcaccggggcgcgccttgaagggtctcgacgggcgggcgagccgtaaaccctgcctgcaggcgcggcgccagtgctaaattgcggtaagtacagaatcgaagcgccacgatgctattctgtggcgaggcccaggccgaagcccacgcctatcagcgctataatggtgaggagttcgacgacgcccacggcgatggcgaggcggcggaaccatcgtacatcgacatcccagagatagccacggtcggccttgtggcgatgggccttgtgaatgatcatctttataagaatgcgatcggagacgcccgaatacgtgcctccgccaatcataaatagaaggggcggaatgaaaagcccgaagaacaggatgagcatgacgcgcggaatgctgaaaagggtggacttggtccactgtgaggggctgaactggtcgctgtcggtttcgcggacagtggtgcagcccttttctaggtccatcatgtggcgacgaatgcccttgtactcatagtactggtagatctgctggagttcgtagtccgccgagtccatgcttttgctgcggcttcgctggggccgcgcgagaagggggtctgaggacatcgcgctgctctgcggcgagctgtcgagaccgctcgcggggctcgcactggcggccttggagtgcacgttgaggtcgcggctaccgtgccgcgattttggcttggaggacggcgtggtgtgttcccccttgtcgctcttgctgcgcagggattgcagtggcagcgatatcctgctgcctttggtcgccgcttccttctgcggagagccgtgttcagaggtagcgtgccgcgaacttttgcttgtttgcgaagccttagcttcattttctagcgtgtcatgcattatgtttgaggcttcaactagagaagcgatagatccatcgggggccgtggataatgtggcccagtttgaggtggtccggaaaacatagggaacgttgtgggccatgtgtgaccctcttttgcttgaaaagctgtagcgagcggtagtatacatatctgtgtcgctttcttgttcttcctcgatgggctcctgggcgatgcgatccgaaagtaggtaggaaccaggcatggttttatgactatctactcgcatattatcgctggacgatgcagatgtgttctgctggtgcacaggcacatgggactcaaggctttctgcaaagctattattcggtaagcgatagttgcttagtccgggcttgcctctgctggatatcgatttagctggtgaccgcgaatcagataataaagtgtctgttgggcttggtacttgtgtgtgggttgattccatactcgaggatccgccgctctgtggcggctgactatcgtggtctctctgtgtagcgacgcttctccgatttgccagcgtccgggaggagctcatcaatgcgggtaggaacggtctggaatgttgtgtaatcgtagcttggtcattttctaatgttgtgccacttgcagcctgactgtatactgacactctggagtccatcttgggcggtgagtttgtcgagcgcgctgtggccttcggggagttaaaggattcgcggaagaaagagtctgtgcgccgggcttggctgtgctgtagaccacacagcaggcccgagccggcagatgaggtcgaagaatttgtttcagggtcagtagagtcttcttggctatcctgctggtctaacagtgaccttatgtacgacatagttcagcgtctagagtttgcggtgtttaaaagagtgtgatgttggaaggttcgaggattttgtgtacggcgatggtgtgccctgtttgatgactgtctaattataacgaatgactgaggttagttgtgtgttccacgattaccttcgtggcatcgaccgtgcgacctgtcgatcgtgtttggcgtttgctctgccctgctatcccttgcttctgttcctctcctaaactttgcgccagtctggtagctatagcactagagagaaagagtagctttcaagaggctagggagctactacatctttacctgtactaagaattcgtggtcactcgcgttttctcgcaacggtctttggacgctgtttgctgaccactacagaaaacccgatttagtaactcgttcaccgggaatgtcgatactattttggctccaatacagatttcggtgctccaagttccaaataaggacctatctacgatcgaggtacggctcacaccacaacaaaatcatttttgcaaatcctttcaaggagcggttatatttatttgaagatatgatgttatccaaataggcgatgtactttgtttggttgtctctcgaacccagaaaacgatgtacaaaaagatacaaaagaaaatatttacctttaacaaatgagggaaaataattaatctaggtttttcctccaggcacagttttacaatgacaccacatgcccagaagaagacagagaaacgctcgctgatatgtcgtaaacgcatacgctgcgaagctgcgaatcccctgcatacgcctacggtatccacatccaagtctccgaccaggctgctttatctgccaatgcatgcagctagggcaattgggggagagacgcggtttaagtgctaagtcctcaagctatagtatctgtacatgcccctctcaaggcaaccgaatacttcgtattcctgcaccatttccaggtgtttccggtatctttcgtttgtctctgcagatggagaatagtaaatgcagctgtcgcggaggaggtcccggtagggatacatattatagtactgtgggggcaggcctcttgccatcagagcatgatttttaaatgtcttagttaacaacgaaggcctggggattacgctctcattcgggatgctgctggggcggcggcggaaaagactaaattgggagcgtctcctctgtaactcggggttgttgaggtagtcatagctagtatcatactcatcggcggccgcgctggcgtgattgctgccaatggtcatgagactgtcgggcctgcccgtaatagcaggttcggtggcacccagtaagtggaggtcggtgacggatcggtcccagtaaagaccgtctctggtcccgcttctccttaggggctcttggtggccaaaattgagctcaacgccaccaggcgaaagctgatagttattggaagccgcgctatctgggatatcgtctaactccgcgtctgtactcatgatggtttcattgttcacgtgtctccaggcgccaggtggaagccgcgggcttctgatgggcagcgttctgctgccgcccatcgtaagcttaccgtctttctggaagaaacgtgatatcggcggttttgtatcgcggtaggtgttgtggcgccgcacactgttgagtgagactatgccgcagccaagcattattttgttttgcgcaaacttcaggaaatccggctgtttggtaatatctattaccctatttccttcttcatcgtacctcgtaacagatcctcgggcatctaaatcatcaccgttaagataatcatccgtccggaacagccagtagcgcctaccgtaggaagcatctatgtaacacttccacttaacttcttcaactcttgagtaatcttggatgatagaactcctgctgttattgggactttttggccgcatgaatatcacttcagaattcgctctgctttcaatctgctgccaacactcgaaagaaacctccaacgccactagcgagtcagaacatgtaaataatgcgggatcattaatggtccatttattaatatatgagttgccggcaacatccaaaaactttaactgctgcgacggaacagggagggccccctctaagaggggtgatctgggtgagctcggcgacatgtcttcgacattctcctcctcatagctatcgaacgaagaaagtaatttcaccaaacttgggattggcacactggattttctaatacttagtgacttgagcttcgggaagttccactttataaacttcagtgtatcttggcactgatagtaatatggcgttttcgttatcttgttatcttcagaataatgtaatggcagcccatctatatttagatattgcagggtattattgtggccatatcgacaaagcttctttaacaaaaacatcgtctgcgtctccgtccatgaagaggtatgcttatgagccttgagatttagccattgcaacgtagtattattttcatcagtaatagcgggatgatagctaaagaattccagaattgctcgcggagttagctgtgagcagcatgcgagtgaaagatgtgttaagttcttccagtgaggtaagctatgaagcaaggtgtggtcatcgatggacgtgtgcgacagatcaagcttctggagctctggttgagtctttaggaacctgccaagtgtcaatgcaggcagatctgtgcagtcattgagcccaacagacgtcaattggtaattttgctcccgtggttcgtcggagtcagcatcatatagtctgtcaataaccctaacaaaagtttcggtgaacgatggtcctgaacaaccgcaaaaatccaacacattaaacaacgatccgggtcgcaccaagtggtagatgacttgctcgtccaagtcgccctgtatgtgttcgctggccaaaaactcacgcagcgaatgagttgtcagctgcaggaattcaaagagtgtctcattcgtcaagtttttaatgatcctgttcatctcaccggtacgtcctagcccgatagatgtgagctcctggaaatctgcgacctgtacaagcccactgaggccggtcttgtcatgtttcaacacctctagtatcttgttgaaacaccgggccgtagtgaagttgagatagcggtatgtaagaactcggcagacgtggttgaatgtcttattcacggttgaattgctgcgcagaaacatgcgaaggttgttatgatacttttcgctgctgggcgggtggtcgttggacattaagtcccggaactggtacgagagtatctcgtacactatctcagggggcagctgctttctgcctacgaactcttcgcccattgatacactgttactggagtatgtgaggatgctaagaccgttattgggcgtaattacccgtttatgaaccagcttttaaacatgggctgacaataagggttggaaaaacggaacctagaatctccactggataaagtgttggctacgcaaatcaatacacgaaagcctgccggggaatctgcccgcaaaggtgtcggatgcccgcaaaggtgtcggtatgccggctcccacaagccagtgctagtaaatgtaactatgtagtacgactagacgccatgctttaccaggttgtcgaaacggagcgggaaagtctcagtagtgtggcaaaaaggcaagatgcgattaaaggtacgcctatgtatcatgataagtaacttcacaaactttttatacgcttctacagactgcagatcattgataaggtgggagcacgacaggagccaagagccaggtaacgataggacccggcagcgtggctgttgggaaacatgttactgctacaacggttatcactgcaacggtttcataacctcctcgtaaagcatcgccttgagtgtatccatggacagctcctcctcttctgtcttctggcgggcttcgttatcgaccttccagaagttatcctggaggttaagcagctcgtagtcgggctcgtcctccgcgtcgtggtaggtctcaaggtaaggatgcttcaatgcgtccgcggcactgatgcgcttgtcagggttgaatgtgagcattttatccaggaggtccatggcgagggggttgatgtcgtttgtgctgagcgccacgttccaggggatcttcggccgcatgggcagattcgcgatgtaggcctttgctcgcttgctcttgatctgctcaaagtcctcgaaggaaggggtgccgaggatctccaggataatccacagctggtgatggtagtcgcgccccgggaacagcggcttcccgctgatcatctccgcaagaatgcagccacaggaccagatgtccatcgcggtcgtgtactcctggaacgaaagcatgatttcgggcgcacggtaccaacgcgtcgccacatactcggtcatgaagcccaccatgttctcgcgcgagcggtcactcgaggcaaggcagcgcgagagcccaaaatcacacagcttcaggtcacagctggaattcagcagcaggttcgacggcttcaggtcgcgatgtatcacctgggcagagtgaagcgacttcaatgcgcgaaggatctggtacgtaaagtactgtatgtggtcgtccgacaggaagctgttcggctgtgagataatccgctgcaggtccgtctccatcagctcctgcaccaggtataccgcctcgaagtcctggtacgacgtgggccgcacgatgtccagcaccgagataatgttctcatggctgtggaagaacttcagcagcttcagctcccgcagtgtccgcgttacgaacatgggcctcgtgaacggctggatcttcttaatggcgaccttcgtccccgtcggcttgtggatggcagagcatacgatcccataagcgccctcgccaatcaggtccaccagcttgtagtgcgatggaatgtcgaacgtgatcgtccttggcatcctctagttctgccggtggcctgctgtacccctgtcgcacctgctttttcactcctagtatttataccgcctctgctacaccgcggtatgaagtacgtatcaggaagacctctattgctcgtctgccgcttaagctactattcgactcgatgttgatgattcccaaccttgtgctcgacgtaattgctctgggagggccgtttcatcttcgggaatggcccgctgctaggatggaaatgacacgcggacgtagatagcatgtagcgaacgtttctgtcgccgcggaagtcctcggccgcggcattcccccgctgagaacaactgttccatagccccagcgccgcgtgctgaggcaccgcgcggggcggcgtggccagcggtgaaaaagcgagcagcagcggtggcggcgtgccaaccgaggcaacatgtctgagattctgcgtgcaaaggtcaaagtggcactcgtgcagctggccgggtcatccgccagcaaggcggcgaacctggcgcgcgccgggcagttcatagagcgcgcgatgacggagcagccagacacggggctggtggtgctgccggagtgcttcaacgcgccgtacgagattggcaagttccgcgagttcgcggaggtggcggcagagggcccggagtcgccgtcggtgggcttcctggcggggcaggcgcggcggtggggcgtgacgctggtgggcgggacgatccccgagctggagccggacacgcagcgggtctacaacacgtgcctggtgttcgacggcaagggcgctctagtcggcaagcaccgcaaggtgcacctgttcgacgtggacatccccggcaagatcacgttcacagaaagccggacgctggccgcggggcggcacgtgacccaggtggacacgccggctggcgcgctcggcgtcggcgtgtgctacgacctgcgcttcccggaactggccatggtgtgcgcgcggcgcggcgcgtacgcaatggtgtaccccagcgcgttcaacacgacgaccgggccgctgcattggcacctgctcgcccgcgcgcgcagcgtcgacaaccagatctacacgctgctgtgctcgcccgcgcgcgtcgccggcgcgtcgtaccaggcgtacggccactcgctcgtcgtcgaccccaccggccgcgtcgtcgcagaggccggcgagggtgaggagatcctgtacgcgacgctcgaccccgcggagctcgactgggtgcgccgcgccatccccgtcacgcgccagcggcgcttcgacgtctacgcggacgtcgcggcctcctccccttagccaactgtatcgtcttatatacacatatatatatgcctagccgatctgcgccggccctgtgatccccgggatcgagatgcgcacgcggtgcgtcagcggcagcttcggcaccacggccaccatcgtcgtcagcacgaagttcagcacgaacagctgcaggtcgtaccgcgtgtagtgcgtgctcagcagaaatagcgcgatcggcacgctgatcagaaacttgcgcgtcggtgtgtacagcatcccgttgtccagctgctcccacatcgtcaggttgtcgtacgcgccgccgttgaactcgaacggcgtgcccttcatcaggtggaacatgatatacgaccccaccacgtaggtcatgttcgtcatggtccacgaccactcgttgctcagcccaggcaccaggttgtagaacaccttgagcagcacgatgattaccacgtggatgccccacgcgccgcgctgctccacccacgtcgcgttcatgttgggcagcagctgctggtcgttctcctcctcgaacgtctccggctccacgtgcgagatgatgctcgacgaccgccgccgccggtggtcgctgaccggctccaccaccatccgctcgctcccatacgacgggaacgtcttcagttgtgtcatctgctccgccgtgttgtcgtgtgtacgcccctgtggtgccggtcactgcgaatcttttatacggacctgcgaaccggccacggtgcggggccagggccttgttccgcggcagcagcaccgttacccggccgctgccgtgcgccgcgacgcccgcggccgcagaaaagcggcgcgcgccgccccctttctcgccaccccacactcccctccccagccatggtttcacagctattcgaggagaaggtatgtatagtcgcgcccgtgccgcacacccgccgctaacacgttcaggccgccgccatcaacaaggtcacgactgcgcccacgcaggacgaaatgctgcagctctacgggctgtacaagcaggccaccgtcggcgacaacaccaaggagaagcccgggatcttcaacatgaaggaccgctacaagtgggacgcgtgggagaagctcaagggcaagtcgccggccgaggccgagcaggagtacatcgcgctcgtggacgcgctgctagccaaatacgcctaagtaatacatagttatgccgcagtcacgtggtggctgccaacccagaccccgcggcgagccctaggggttctgttttgtttccggaacgtttccccggcgcgctcgcgcgcaaagcgagggcggcgagctgaaaaacgaaaacagaggaaacggcaaggcagtttttctcccagctacacccctcggccagacacagttgttaggccagctctgttgcatctgcgtgcgttagccgtcagtgcgtaccgaagttgtgcggcgaacccagagtggtacaaagagcgaaaatgtcggcgcaggaaatagcacagctgttgagcaacacgattctcagcccagatgcgggcgtgcggttgcagtcggagacgcagttgcggaagctgtcgaacgacaacttcctgcagtacgcggggacgctctcgcagcttctggcggacgagagtgtgatcttggaggcgcggattttggcggcgttgacgttgaagaacgagttggtgtcgaaggacccggtgaaggggcagcagtttgcgcagcggtggctcgggctggtggacgcggagtcgcggcaccacatcaagcagtttgcgttggccgccctggtggacaagcagccgcgggtggccaacgcgtcggcgcagctgattgcggcgatcgcggacatcgagttgccgcgggatgagtggccggacttgatgaagatcctcgtcgagaacaccacgcagcaccagcccgagaacgtgaagcgcgcgtcgctcttggtgctcgggtacatctgcgagggcgcggacctgtcgaacaaggcgttgatcgcgcagtcgaacaacattctgatagccattgtgcagggggcgcagatctccgagccctccaaggcggtgcgcttgaccgcgttgaactcgcttgccgactcgttggcgttcatcaagaacaacatggagcgcgagggcgagcgcaactatttgatgcaggtggtgtgcgaggcgacgcaggcggacgacgaggagatacaggcggccgccttcgggtgtctctgcaagatcatggcgcagttctacttcttgatgaagccgtacatggagcaggcgttgtatgccctaacgatctccaccatgcagtcgcagaacgagaaggtagcgtcgatggccgtcgagttctggtcgacgatctgcgaggaggagatcgatattgcgtacgagttgtcccagtttcccgagtcgcccttgcagtcgttcaactttgcgctatcttcgttgcaggaggtggtgccaaacttgttggtgctattgacgaagcagaacgaggacccggaggatgacgactggaatctggcgatgtctgccggcgcatgtttacagctttttgcgcagaactgcggcaactacattgtggagcctgtcttgcagtatgttgagcagaacataacgagcgagaactggagacagcgtgaagcggctgtgatgtcgttcggttccatcctagatggtccagataaagttcaattggtcagcttggtccaccaggccctacctccgatacttaacttgataaacgatcctgtcttacaggtcaaggagacggttgcatggtgcataggccgtattgccgatcttgtggtcggcgctatcgatccacagcggcacttgtcggacgttattaacgcctgcttgctgggtttgaacgaccatccgaaagttgcaacgaattgtgcgtggactatcatcaacttggtagaacagctcgctgataaccccggttctccaatatacaattactaccctgtcctagttgactccttaatgaaaactgcgaataggcccgataatgagcatggtgttcgtgcctctgcattctctgctttgactaccttagttgagttctctactgaccaagtgggtgaatccgttacatccatttcaagttacgttttggataagctaggccataccataaacatagatgagggccagctaagcacggatgataggcaaagtttagaggaacttcagtcgaacatattgacggttttatcggcttctattagaaagaatccgcagtcagtctccgctgtgtctgacatgctaatggacctgtttttgaagctattgagtaagaaggactcttcatatatcgaagacgacgttttttacgtcatatcctctctcgcaacgtctatgggtaagggtttcgaaagatacttagagacattctcgccatacttagtgcacgctctgaaccaggtccagtcgcaggtctctgtcaccgctgtgggtttgattgcggatatttcgaactccttagaagacgacttcaagaagtttgcccctgcatttatgaacgtcttaggttctatgatctcttctcaagatgctcgcatggagttgaagcctgcagtactttctgtttttggagacattgcttctaacatcggcgatgactttatcccatacctcaaccaggtcatggcgttatgcgttgcagcccaaaactccggcccagagagcgcgtccttggatgcactcgagtacaacgttaaggtccaggaagcagtgctggacgcctatgtcggcatggttgctggcctacactcgcagccggacgccctcttccagtatgcgggcacaatcttccagtttttgagttccttcgccgaaaatccagccttaagcagtgaggacacttctgctagatccgctgtcggcatcatcggagacatcgcctccatgttccccgatggtaggataaagcaattgtacgcccagacttgggtcacagagtttatcaagaaaacaagaagtaaccccaactttagtcaggcaactaaggatactgctagatgggctagagaacaacaaaagcatcaactaaccctatagccttacactccagaataatttatcttattactcattttcttctgcgttatctcgctctcctcctgttattctataatacttcccctgcattgtcttcattattgtgtctgcctcgcgacagaccgcttcgttgtctcttcttttgttcgaccctgcactgacctggccatgctgctctttctagtggtttggtacaggttgcgggtctttttacacaacttttctactacgtcttctatctaatcccatctacttttctactttcctctcctactttatccgtcggacccgctgctcgtcttacgtggcagcttgtagcatctatataattgtatatatcgtggtggcaactatctacggctgctatacatctgctgcccggtctgatcggccgagccgttcaccaatgcagtaaaaccacataaaccttttaagagtacaagctcaaaaacgtaggaaagaaaaatagtacgtccattggacactttctgcgactagcaaaaaccaaaggtggtcgtactgcgcggtccctagcagcggttcgccaagatgataggcactcagatgttccccatggacaatttaattccgtttgatgatacttacgtgctctatgacccaaacgacatcgtatcgttcatctcgtgctacttctcgcttcttccgattgccatactagtgttttacttctcttggtttgtgaccaatcgtgagatggaagcggtgttcatcgccatcggacacctcatgaatgaaatactgaacaacgtagtcaagaacgtgattagggaaccccggccaaacaactttgggaccttccagaaggagacacttcggtctggctttgggatgcccagcgcacactcccagttcatgggcttttttgcgctatatcactgtatgcggatttggctacaatggacaggattgcggcgcgtccacaaagttttgggctcggtagctgtggtgatcgccacgacctgcgtggctggatcccgtgtgtacttgggctaccacgatgtgccacaggtgcttgtgggggtgtcgataggtgcattcctcgggtcgctctacttcctcctagtgggattgatccggcacagcggcctctctgattgggtcttaacttggcggctagccaagtggtttttggtcaaggactcatgttaccatgcaccaattagcttgcgcgaagaatacgaagcgtactggcgccgtcgtagtagaatagaaggtcctgggaaaaccgagtaacacagcatcaccccattgatatagaacatttccgaattcagccgcgtcaatgcatatagatgaaatagttctgcgttttggccaccagcgaaatccgaagatctttcaagatgcgggctgactacgtacgccgcacatccatagcctgcatgctacatcctatagaattacaatagttaacgtgccgaacccaaggttcagccaggaacctgtttacttacacgctttttgtccacaaccaagggtattttcgcaattttattttcaaacggaccgaaggacacttcgatcagctcatcccgcgtgaagctcaacgatgggatgtcgtggcaagagcatgcagtcacgtaaccgtagagaatttttagtgtagattcgtgtccaataatcaatatgtcgccgtacatgcgctccatctccagcagtagaggttctatccttacggccagatcgtgataagactccgcacgagggaagcggtagtggtaaggatccttcatgtactctttgtgttctgttgcaaactgagaaactatttcctcctctgagaggtcagccaccaccccggggtgcagctgctgcagttgagagcgctgacgtacagttatcttcttgtcgacgaaatacatggcagtatcgtgcgttctcttgcgaggggctgtccaaacgacaaatgagtcttcatcagtaccatcgcccgacgcatgctgtctcagcgccgccttaccaagcgattcggtgcgctttaatgtggctgaagtggaaatgaggggactttccaggtccgaagaatatgatttgcatgaagatgtcagaggcaaagactcgtactgccctggggtgtcgttttgctccctcctcctgttgtttatccgttctagcaccgtatctgtaagcactttcgagtattcgatgccctcgtcattgagaacctcgtcgtcgatgtatttgtccttatcacttgtgccacaacgcgcaaaatacacacagccttttttgtctcgaagattcatcaggaagaacactgttttattgatcaaaaatccatggtagttattgttaaccactagtttctccccgaagttgaagtacttcacataactcagcccctccgagggactcatctcctcgtacagaggcctattcaactcaatgcgctgcttgtagtcctccaatgcatcctgcctattccaacccttgtagtctgcagaggctgctgccatctccactgtgcgcgccctcagaattgactcgctcacgacagactcaacgaagaatacttttacattaagagcagcaaactcctcggcgagcattctgcgctcctcgcgcatgatgttcatcccatcatagacagcaagctgtccctgctcgaagaacttcttcatgtccgcctggatctcggctatcagcgtgcgccgcagtctgatcccttccggcgtaactggcctggcagagaagtagtccagcggtagcttcaccatcccctgcggcacccgcgcccgccgatactcggacacatggaaggattgcgtgcgcaccccgagccaccgcgtatagcgcgtaattgccaccgaaacaagcgttttggatgtcgctggaaggcccaccagaacgatcaatatctttcccgcgtggaaaagccgcccagactccgtggagtacagttggcccggcgaaatgtgattgtccttgacgccctcgtgcacgccgtctgcaagcaccgagctccgcagccgccccttctctttggagtggcttgaccatcgtttcctcgtccgcgcctggtggttcccagctgcaacagccacttggcctgcatcggtctgtttgattccggatgaacggctctcgcagccgctgtcagtgtcttcatcggacgatataattgcagacatcacttccaaaagccctcgaaccgtagcagagcctagttactcctttgtgtgtccctgctcttcagaggcggtgcttccttaaaacaccaaacagggatgtgtcatatatgtaggcgctgtctactttcttagggcggaaggaaatcaataagagtccaaggtggtcggcccggagaacggaatttcgcgcctgttcactggtccgcgggagtcatggctgtccgccaagaatggctgcgcacgagcggagcaccagagcagtcattatgcccactgataaacactagtgaaacacgactttctgaacttactatatatcgaggagagttggtagaacataattacttataatatgctggctgacctgtggaatgcatttactccaacttgccaccctttctctcgatcaaggcctttctgtccttgtccaagtgcaacttggtgatgacaaccttggatgggtggacgtccaatggcacggaggcaccgttggacttctccttggtcaccttgtcgacgcggacagcgtacttcaatctgtagacagaagaaaccttgccctcttggcccttcttggagccacgcacaaccataatctcgtcgtcctttctgattggtagagacttgatgttgtactgctctctcaactccttggatagaggagcagacatgatcacgcggcgctcggaagatggcgcgttgaagtacgcctttctggcctttcttctgtcggaggaaacgtctgcagacatgttagtactgtgccgggccaccaacttgttccacgcactggattatgctaggtccgcctgcgcgctgggccgtatgcccaggttaccacggatcgcagcgccagagacgctcattcccaatgtttcggagccaccatcgttctgtcacatacctagagattgcttagccattgctgattcgtctggtgctgtgtaagaccctctgtgtcagtatgcgagacctcaaattgtagtaacttttcagctgtcccgcctacgctgcaccggctgccgctggtgatcgccgtgccgggcccgcacggtctcgttgcgtgggtcccgccggcgggctacgcgggagccgcagggcggcctaggcgggcaagccaccagtgcaatatgtggttgtatgggtttagcagtcaacaatcctcgactaccagcgccaaaaagaagcgctggtgcgctgcagcccctcccgggactcgaacccggatcacatccaccggaaaaatgtatgctaaccattacactaaaggggcgcgctgaataacgatgcgttatggagtactaagtggtcatcgtgccgtctatgatgacttggccttgacacgtgactgaggtacatttgcatatgatgagattctgagtaagaatagcgcactgagcgagcgacgagcagatgttggcgtttggaagcatctgtggacggctgcgggcgccggccggcgcgggattgagagttaacgtggggaagatgccaggccgcgcttggcaggtggcgaacgggcagccatactcgacgttctatgcccccccagagcaggcgggcaaccgccaaaaggagcgccgcgtcacggcgtggaaaaaggtgcgggcagcagcgacattcagcgcgtcgggtatgttggtactgggggctgcaggggtggcgggaatcgtgctgtacttgattctctcggagctcttctcgccctcgggtgacacacagatattcaacagggccgtctcgacagtggagggcgacgcagttgcgcggtcactgctgcagtgcgaagacggtgtgcatagatccgagcgtctcaaggcgtacggcgacagtgtcggtgacgaccggtggacacgcaacaggccgatcagctcgacccggcgtctcgacgccagtggccgcgagcactactacatgcgcttccatgtggagaccggtcgccggcggggtgtggtgagccttgaggcccagcagtcggacgacagctaccagcccgagtttgtacgcatgtacctggatgtgccaggtgagaaacggcactacctcatcaggccggagccgtcggttgcgaaacccaagggtttcctgggcctgaactggggtccccggaaggactagcggctgcctcccgcgctgccggccgccgcgcacaggcatcttctctatttatgatggattttatcaataatgaatcgtatatttcattcctttatttatagtttttgttccttatagaaggaggtggaaaatgaaagcggtggtggacaccaataccaatgtggctgtgtttaggcggtgcaatgcgcttgaaccggcagcattgacgtctttgccagctggagcagcaggctttggctccactagctttttattagcttgaactttaacatcctccataacgccctggcattgttgcggaatgcctatgctcttggcattgaagaagaaatcgttgctggcgatgggacattcatttttgcttattttacgtctcaaatatagcttactgagttgtaaactcaatttttgtcttgtgtcacaatctgaatattcaccgtacacccccaaacttccatcaccgttgatgtccatacagttaacgaatccgcagacatactcaaagtagttcttgtatgacattgggtcttgtaggctgagcgacaagcagggcaaagcctgctccaagcagccgcacttacgtgcatctggcgttggaggtagttcttcagatgccttccacgtggcggacttttccggacaggttctggaattgaccttgtatgtcttttcgtagacactgcgctttacccccttggggcgagccttttcgaattctttctgtaggttgcggaaatctgggagctctagaacttggttatccttggtgaccttgaccacaccgtattcgttatcttcctcgaaatacatgtatgcaagtccaccggaccatacgggcgtcatcatggtcccgtataaggcctgtatttctgtgaagggcctgggcctgattgtattacacccaaactccgaaaagaacaccggcacagggaagtttctgaactcgttagtccgctctctgtagccgctcgtgccgtaagatgaatgcccgcaccattcgtacatatttatgccatagaagtctgcagatacgctaccgcagacgaagtagtcagccaagtgatccctcgtctcctggtcatcgtttgttgagtatccaaccggaagagttctgtatcccatttgcttgatgtagtttttgacatctctgatagccgccttcacaaaaggcgatgcgtctgtgttcgtgcggtcattagtgacctcgttaccagcaaaaaagcccaaaacattattgtatttctgcatggagtctactacgtctttgtaccgctggaatacttttacatcccatgttggtgtttccctaattatagaggtgtctggttctgataaatcgatgagaacgtagattcccagcttgctcaactcctccatgcaaacgtcatgtggcttggttggatcaatggagtaaacacgaatggtattgactccgagctttttcaaatacggcaaatcccgtttacatatttcaacttctgccaaagggtcgatatacttcgtgtcagccggatagccaacctcaagttcctgtggcgcactactgggctggtaagcgatcccctttatgaaaaattgttcacctgaacgtgaatcaaagaatttgttgccaacaacctcgatgacaggaagccctgattgggcaagagtcgtattctgcgaagcctttgcgactgcggcagagaatagcgcagtttttgctagaacggcctgaagtttcatgaaatcttcttctttaaccttgtagtatatcgccagaacctgtttactaaggtttttatatttgtggttttatatatatgcctttcagaggcaagtgttccgtccgacaaatgacgttgtgctgcacttgtcggtttgcaaagcagacggggagtagccgcggacagaccccgtggcaagaggcatacacgatcctgtcaacacattacgctagagacttgaggctagtgtgcaccaattacatttagctgggaacaggcaggcgaccgattaagagaagtaaatgttttttttatcaaaaaactcaaataaaaaggactataaaacttaaaaagttaaaaaataagtctgacgccaacccacctacctttaaaataggtagatctggtggtttcctaacacatagaccaatgttcttgaatacctaaggagccttggttgaccaggtagtatggatctgatctggtaggatcgtgctgaagtactggtggccacctgtatcataagtaaagctaggtgaactatcgtcggtagcatcgctagactgatatggttgtaacacattggctaacattgacattcctccggggccaaatttatcattaagaaacccgttgaagaatgtgctttcacctagattaccatcagtatccttttctttgtgtttgagttccgtttgcttgaaagcaacagccggtccagcgatgagacagacgaaaaagattaaaatcaagaagtataaggcactgtatttccttaccatacgcttccgcaacctagtctgtttcagggagtaaattggagggcgtatttgacgagatggccgcaaccagaacaacatgatagaatggaacttatcaatctgtggaacacacaatactggtagctggcagaatagaatgatatgacccaagaagaagtctgcagcaaattctgaaagttcaattatcttcacaacgtactctcttgcaggctgcgtccaagccatatatcctagcccagcgctgtaccatttcccactccaaaatgaggcgttggcgcgatcattcttgaattcacgggttaggaaaatcagagtcaacaatttcaatagcactctttcgcactggatcatagtaacaaaacccatcaacattctggccaagttcatacgttgtaatacccacattgcaaggatggcgataatatgcccgattacagacacaccatgagcgattgctgccataactggaccggtattcttgcaacacaggcctaaaagtggcccagcgcaacacgaaagtcccatgataccagcaagaacacctgcatttaagacgactggcagtagtgtgcatattgcaagtcttatgagagggttaccgatgggaatggttttaggaggaggttcagcacgacttaccaaaccggtacgggagttgataaatgcataggctattacgcaaccgatagcatataccaaagttggaagcacttctgcaaacaaaatattggatctatgtgctctggccgaatcacccgacgatttttcagactcatccccaatgagtttcctcttaaaaccggtcacacgggacctggcaacccgcacatgcgcaatccaagaatttttgtggaatttgttattacctctggataaccacctgataaagtctctgtagtccaagaaaaagtcttgccatgcaaactggtgtgggttgaaaataaatggagagaaaatcatagcgaccatggaagcccagaaccatagaagtgcaggctgccatctcgcaacagaggcgaagagcaacatcaacatcgagcgacctcccatgtaaatcgcagacccagcaaacctggagtaaagaatagaaaagggtatacgagaggttgcaaagccacgacctgtcgaaatgtaacgtgcaccaccaaaagtcatgtcactaaccaaggaagcggaatatatttgaccagcgaaaacttcaaacataggagatagagacaccaagtgacgaacaaatctctgaatggctttccaaatccctctttcaatcaattcttggacaacaataggaacaaacgcaatgaagaaaacaatgaaaatagagagagtgtaacgtctgacccagtcaacaacaggtgccaagttgtagcaaccgttaggcgacaatgcatcggtgataggcttgttcttgtcatactcacagaaaagagattcatgagcaagcgcgttcatattcatcaaagtcaagataaacatttgcaatgagagctggatgaacaagttattcaaatggaaaccggggtgcgcatagtagaaagacaagaaacgatcgataggcaattgcgtccccaaatagtagtattcacgggacaacatctgctcacccataccagctccgatcttagtcgtaaagttcaaaattgtaccaaaacccaaatctctgcccttaccacactggaaatactcacaatgcttgatgcggcctccacgtaggagagcgttcataccagcgtaaatatcttcgttcaaatgcaaacccttttgagccttagagataccacatctcgtagtcatgaaagtggcattgatgaaatcagggtgaccgtaatgcaacttaccaccaatttgcgccaaagtacgcgaaaatagggtaccaaatgtctgttccttaccggctgcagcgtcaccaagaacaccggagttttccgagaaaatatactcacgggcaccaacgattgcaacaggatggttgttttcacgttcttcatactttagagttggagtatatgggttgacatgttccacatttaattcttcaaattcagccaagacagatctaattttcaaacattcttccaaataattgtcctggttggcgtccactagttgtatatattcacctctgtagaagatcaaagcatggttttggttgtccgatttaccatcacctaagattggattacccgacaactggatacggaactttggtctacggcgaccattctccatcagctcacagtgaccatcgatcaaagccgagtagattctgggctcttctccttcgttcaaaggcggctcctcgtccaaataagcgatttgtaaatctgggtaagcacgcaatagaaattctgcattttccatttcatgcggcttaaacttagccaatctttgcatggacaccaaaaacttgaactttcttctcgccatcttctccaattcacgttccaaaccctccgcattaccgccaaacatttgtacaatctctgggttctcaacacgatacaatagcttaattgctcttgcgtaattcatcatacccgaaaccgtacgatacaaggtttgagacctcaaggaggcccaaatacgtgtacgcagagtgtactctggagcagcagacttgaaaccaatgcagtaaaatggcaagtcatcaatctgagactttaggccgccggccttctcaggatcctcttcatcgcccccttcgaaggcggcagtttcctcagccaaaattttagtatctttcacgaaacagtcccattcaaccggatgtagctgcttcaaatattctagcaacgtaacccgagaaaattggtcatcttcacggataatttcccttaaagataacaaaactctctcagagtaatgcggagttagcacggtaaaggtaggcatgttgtccactggaagcggttccggaattggagttgccaaagattgcgcgaagaacgagatacgacgttcggcctcagaattcgctgggaaaaactcagtttcaaagttattgtcatcttgcgagacaaagaatgtaggagcacgaagtgtccgctttccctcgatctcggatggcacttggtggtacaagagcttttgcacatggtcaatggctaacaaatgttctctgtacatggaaatcacaatagcgttccatacctgagagatcaaaacctttggcttgtacttgatttccatgtcagtagtagccaagatctttgaatatatccgcttaggaagtctggtaaagatgtttctccaaggggtcaaaatggaaatacctaggtaaaacgatctgcccacagagaagactgtgttacagacgatataccacatataggtatcaaggaaaaacaaaatgaagtctgtgatcaccattagcaccaacacgacctggccctgatatggacatagcctattgtttaggtatttgatacctacgcatctggagtagttcatgtatagaattctgatcgggtctctcaacgatagagttaggaaaaagtacgattcagcaagcttcgcagcgaaaacggctgcccatagcaagtaagacatccacatgtccattccgtgcaatggcgcaacagatgccgtaaaggtctgcgaagccacgtactttcgtgtagagttcttcatgtaagatgtgaataagccgcccaatggcataatcgaaaagaaaatcacagtgatcaatgcaatgacaaaaccaacaacggaaattgcgtatgcgagtttcgagtaggtacttaggtctccagaataggcaatcacaaagaccggtggggcgatgttgatcgccgtaatcatgagtaagaagaagaaccgccgagataaatgttgcgcaccagcccacttacgcggcacgtacgtccattccaaaaatgtggccagtagctggacgatacatgcaaaagttcctgcgaacgaacatgccacaaacgggaaggatggcactggacggttgttcaaaagctgttggtaatgggcggtatagagagtgggggcgttataagcggtgtacatccagtagaccgagccgtggataatccatatacggttgaagttgagaatcatatgcagccacgtgcgcacctccttgtatgtcttgaagaaaacatcgttccacgcaacatccccgagacggaggtaccgctcttcagcgggaaggtcgatcaaacgagttccatcctcaaatactatgcgcgcaataccctgtgggtaccaaaagagctggtttacgtcgtcgtacccaatcaccttgttgtggtcacgctcacgcttcatgtagcgcccgtccacaatctcgtagacctcgctccggaggaagcggtatatcggcgtgatcacgcggttcaagtagtcgccctccggaagcggctccgcgcgctgctggcagagcggcgagtcaaggtagtctgacgcgcacttgtacaagaaacacaagcactcggccgtgaaccgtacctggttcgcctcgccccagatcaacaagtacaacgctatctgccttacccgctccaacggcgtcagcttattcatcttcgccttccagcggaagtccgcagcctccaacgagtcgtcgccctccagctggctcaaagtcgcctctgtgtccgccacgttctccgctatggccttcttgtttttcttctttgccttgcgcgccttgcgggacagcttgccgaggttcatgttccggaacccaacctggtcgtctagatcaagctgggcggcaaagtaccacttcttgtagttggccgtgtcgccgccgatgtagtccgcgtgcagcgaaagcaacgcctgctccggcgacatccgcgacgcgcgcgagtccaaaagcaccatgaagtggtcgaacacgttgcgcatcgagtcgcgctggaacccgaaccggttggtcaagtcgatgaacacgtcctctatctgctcgacgctcaccggcgactgcgcgtccgccgtccacgccgggtaggggtctgcgggcagcgccatcgcagccgccgaggggtcgaagcccgcccctccgtagatcggggtcgacgtgccggacgtgcgggggtcgccgccgtagctcatgcgcgacggggtgtactggtccacgcccccgccctgcgcgtagctgtcgtagccgcccggcgtgcccgggggcccgtagctgaagtctgagaagttctcgccctcggggcccacgccgcgcggctggccgtagtatgcgccgtgctccgggtcgtatgcctgctgcgggtcgtatgcctgctgcggatcatagtagccgttgcccgtctggtcgtagtacgcgccatcctgggcgtacgcctgctgcgggtcgtacacgttcccgtactggtcatactggggctgctgcccgtacggcgactggccgtgcggcacgcccccctgctcgcccggctcgtaccggtgctggttagggtcgttcgggtacgacatcctctgtgtgttctaatcggtggtggacaccagaaggagcgtattgtcttccaaactccgcttcgcgacgagcaactaacacagtctgacggtgtgcttccttatatgagtcgcttctctagctcgcgtgctgctggcaatcacaggaacgcaaactgttgctgacttggtggtttgctgcctgcggtagcgctgctcgaacggatcagataaagcttctttctgtacgtgcgctcgacagctaagtgctttcgtcctctgtagctttgagcgaaagttcgaagaagcgtgaagctagtaaaggtggcctctgttgtcttcaagaagagaaacctgattcttgtcggctctttcctacggcagtggattttgttttaggactgatttttcgtcccgcgccgtgcgagcaccagcatgctcgagctgctgacggccaagatttgctggaaaactgtctcgggcgcgaaaagcaacgctggcctcaaacgttgcttttgctgtggccagcaaacacaactgccgtacacggagacggggggattgtggcacgctggcgcggcacaattccgccggcatcgggtgtggtgccagcatttccggctgcgcctgggctgtttcagcaccgcacgggcggcgcgcgcagacggtgcccgtggctgagctgggcgtgggatgactaagcggtctggccggacgggccggatgtttctatgtactacaccttgacaccgcgggccgcgggctctaaagatcgcggcggccgaggaagtctacgatgaggtcggcgcagagctgcggctgctggctgttgatccagtggccgccggcaacgtcgcggacgtcgaagttcgggaagtagctgccgacggcaggtaggtagtcgtcggcgacgtagttcgagcgcgtgccgcggaggaacagcgccgggcccgtgtagcggtgggtcgcgggggaaagctcccagccggcgatggcgccgcggacaacggcgtccttgagcgtgcgcagggggatgcgcgggcggtagcgcaacttgcctgaggcggggtcgcggtagtgctccatgagcgagaggaggaacaggcggacgtcggggtcggactcgacggcggcgagggcgcgctgcgcctgcgcggcagagagctcaggctgcgcggcgaggcgctcgagggcgccgatgtagcgagggaactccggctcgggcaccgtggcgaccggcgcgttctcgatggagaccagggcggagcacaggtgcggctggcgcagggcgaggcccatggcgaccttggcgcccatcgagtgtccgacgaggaccggggccgcgcggccggtattctcgcgcagccagcgcgcgacgtctgcgaccatggcggggtagtcgtggcgcggggtgcggggtgacgcgccgtggttgcgcaggtcgagcgtgtagacgtcgcggcccaggcggccgttgaggagctgggcgaggcggcggttgttgcggcgcgagccgaacaggccgtgcaagatcacgacgggcgcggcgggctgcgcgcccgcgcgcgcgggctcgcccgccaggcgcgtggcctgcagcgggacggtctcgatgcgctcgagttctgggtccgccaggcgcgtgctgtacagcacgcggccgcgcggcgcggccgtgccaagcgcgaccgggcggcctaccgggaggagacgtgtcagtaatgagttcattgccctgcaaggctctgctgtatatggctacatagtgcgccgttctgtataggttcacttcgcgcgcgccgggcagacgaagtgagcacgcaggcggcaccgtggcacgtgagcaggcgagcaggcctcgcatgctgagtatatgaagaaactaaaaggctggcgcttaccgttgctggagcctgcccagcggcggcggccggttgtgagggcagctttagggcactatgaatcctccccgaagaaaaggaacataagcctgtctcgctttctcttgaattcgtctatcttctttgcgcggtcctgtagctcgcccagtttgcgggagccgttatgcaaattattgaagacaggattatgataggcgttgcgccagttgtggtagctcccagagatggagaggctgaccaactccgagttgtttcctctggaggcaaggtactggcgcctttctgtggtctgcttcttgcgcgagaacccctgcgaccacttgacaagcttccacttcaacttgtggcacttctcaagtaagcgctgcttgtgggatagcgatttctgttggccgaaaacccagcgcttgatgttgatgtttctgctctggttctggtagagcacgagctcggaattggggactgcgcccgagtcgagaccggccgtcaacaccgtgaagccagagctaagcgagtggcccgcagtgatgtccttcaactgctggatgaagagcttcgcgacgttgtacttgtcgccgccacccaaggtgtcatcgtcctcctctgcctgctggcccaatttggcctgtttcctggccatttcgttgcaccagctggcaaggacaatgcttcggtcgtggtctttgcgggcccatgcgtcgatagcggtatccaaacctacaagtaactctgcgctctcaagctcgacagagttggtcaaaaagccctccaagcagtggaggacgatgccgctgtcctcgttctgttcaaatgatagacaattgatgaagaagcctttaagtttctgaaataggagctggtatgctagcatatagttgacatggtaccgcaactcctcctgtagactggtgtcatcgttatctatgagctgcacgtcaaacttgaagctctgcaaggtcagctgcggcgtgttggctaacgtaagcaacggtcttacctcgtctagcacgtcagcgccgacctggctaaatttgaacttcctagagaaggccttggaggccataaaactctgaaaaatcgtagcctcgtgctggtcttcattaacaaaattggcaacaagctcaagtatctcatgtagacacgcatcgaggcgcttgcactgctccggctccacagcgctatctccacattgtttgaacacttcaagggtcaactctagatggtttaggtggactagaacatcgaccaaatgacagattttccgttgcaatgggatgataaagaggtttgtattgaggctctcggactctgcgtcaatgtcgactcctgcgtatcggtagttagctggcaccatgagactgtcgtgtaccaattcatacagcatgtccaacgcactgctaaaggaagtcataaccgatggcaaaaagtagccgcggtttgaaggtggggtgtgcatgatcatgctgtcttctctgatagagtacttgactactccctgtgagtccaaccgaaggctcgtgcccatactttcatacatcattctgctgtcgtcgcgtgtgaagtcctcaatgggcgcaaactcacctatctgctgtaccacgctgttggatcttagtccgaacctttcggtttcatattccccttcgatggcggctgcgttaccgtcgtccccatcgtattccttgttctcctctagcggcgcaaatatggcatcaatagaatgtggtaactgttcttctgcaaacaaaagcttggcgtttgctgaaggatgcagagtcctcttggttttccctatgctatcatatccatccggaaagttatatttacccttattcacatctcttagggacaacgacatgatgatatccgttggttgactttgctgtagtacaacccggagttatctatcagttccctccaagcacatccgttttattttcctagatgtcatgtaatatctctttttgtgacactgacaccttccgaagcgcatgtgtcttccagccaaagatatcggaatgaaaacgtcagacagtccgcgctgcgcgtttagacgggattcaatagcggtacgttgaagttatccaattaatcgtttataccctaaaaaattatacatagtgctacctaaaacactggactgcgtaatctaaaaggttgtttaatcgaacaagccgaagcccatgtcatcgtcctcagactcctcgtcctcctcagcggcagcctcctcagctggggcggaggaagcagcagcagctggagcggcagaagcgtacttgtctgggttctcgattctgtcaactagctcctcaatctctgggtagacgtagttggcagcgatagcgacagctagcaagtccttgtagttgttgatcaaggtgtgaccgacagatggcaaggttgggtagccgatagccaaggagatagaggcaatggtgttcacagcagtaacgaagtgagagaccaactcctcgtcagtgatgtccaagatggaggctgggaagacctggccgttgtcgtagacctgaacaacagtcaaaccgtaggtgaacggagagatgttcaacaagttcaacaaagaagcctcggaggcaccgactctgttaccggcctcaacgaccttgacgtcggaggtaatctcaatggtacctctggcaatcttggttgggacacccaaagcctggaagaaagaggtcttacctggctccataccggtgttgacagctagaacccagatgtcctctggggcaacagcaccagctctggccggagcagcaaccttgttggcaacaatgacctccttaatgtcggtcaaaggctcgttggtgaagacaaaaccgacgttgcccttaacgaaaggcaatagcttctcgtagtctgggaagtcagcaatgaaacctctgatggctcttctaaccatggtgttcttacccatcaacaccacagccttgcctctcaaggcctttctgacctcgtgcatctgctgcgaagagacattgtcgacaccgacaacgaagacggacttgtactcttccaagtactctcttagcttagcgaagtattcagacttcttctcacggacgcctcccatttcaatagatgttctttgataggatgtttaaaggtgttcctgctcgatctcctctagatgcaaacgttactggcacttgatggtgatcgtgataaaagtcatccagagcttgcgcgttggtacaatatcgtatttaacgatataaagacttctatacaccaaacgaaatgtatgggtgcaaatgtaaatgtatgggttcacagtcacatggggatatctaagatatttggaccttaggtttcccagctcatcaccacatagtccggttcgctcgacgcaaagatgcagtaccaaggagaggaaatagacgctcagcttgacgttccggagtcctgcttcaattatattcgcaatgagctcttgaatcacgtgctggacgcggataaacgcgcgctcttcaataacgaagagacatgcatccagatatcgaaggccacacatgtcgaggtcggggtacagcgtgcaatgcaatcgatagcagagaacagagcggtgctactgtattcatatgggcagcacgtgcagcgccagctcggtgctgtggaaatactgaaggcgacgctccaagagcggaaaatcggctacgagcagtttaaccatcttagctgccttgcgcatgttggcccaggtagaaatgagctacttgagacgcgcgtgaatatacccgtgctactggtgattgtggcgcctgcgggatcattgaccagccttgctggctttcaacgtcaataggcgggcaccacggatcggcaccgtcaattcagagattgtgctgaggcgatgacacagggaggcgaatgctggaaattggcgggctactggcgatgcgccatctattgcgcttgtacacacgctgcgtgcgcggttagctgccaggcaatgcgcggccagcaggttattttacgtttacggtaatatatccatttaatagcatcaaactcatcagcttgagagcgtatagtatcgaaactatggcgtttgcgtcgcctcatcaatgtgccgatgcatatgttctgcaatggtttaaacagcacagtttagagattgacattaaataccactcgcagctatggttcatcttacgtttcattagacaagttgtccgcgatagtttaatggttagaattcgcgcttgtcgcgcgcgggatcggggttcaattccccgtcgcggagttttttccaacccgcaattggagtcacgtgataactgtccaataatatacagttatttgatgagccatacaccacgcccaacactgcaatttttcggtttcgccggcagcgaaggaacgtcgccggtactagacactcgtagttggtggcaagcacgttctcgagcagctaaagcaacgtaataccatgttcatcagatccagagccgccattggtgccgttcagggcgctagcagaagctatgcgacgctgcgggagattgagatgcgtttgaagtctatcaagaacatcgagaagatcaccaagacgatgaagatcgtggcttcgactcggttggggaaggcggaccgtgcgaagcagacggctcgccagtactccaaggccgaggccgagttctacagcaacgctgggactgcggtgggcgagggcgaggcacgtgatctggtgattgcaattacgtcggacaagggtctgtgtggttccatccactctcagctggctaaggctgtacgcgcacatctggcaaaccacccaagcagcgacgtcgtgactgttggtgacaaggtcaaaaaccagattatgcggtctcacgctgacaacctgaagatgtccttcaatggcgtgggcaaggaggcgcccacgttcgaggagtctgcattgatcgcagacaagatcttggagcacgatgctgcgaagtacggcaagatcactgtgttctacaactccccaatttcttctttgtcatttgagccttcgcagaagcctgtgtacaatgccgacaccatcgagcagtccccttcgttttccaagtacgaggtggactctgactccaacgtcccccaggatttgttcgagttcactctggccaaccagatcctctccgctatggctgacgggtactctgccgagatctctgccagaagaaacgcaatggacaacgcatccaagaacgccggcgaaatgattaacaagtactccatcctatacaacagaaccagacaggcagttattaccaacgaattggttgacattatcaccggtgcttcctccttggactgagcccgtggattgtttttccttttcgcacacatctgacacaatattcgaggtgtctcgcaggctggtaagagtgggagaccgcaatgctgctcgcaggaagcacatacgcatatctatctctatacataatgacgtacaaacattcataaaactaaaggctcctgttcactgcgctaggttgcggtgtcaccgttgtgtggcaaccaccggagcagtgtttcagccatgtaaagacggcgcggcgggcccgtgtcacgctgcaacagacaagatacagagacaatgtaacttctgtggccacgcccgtgggctttatgcagcaggcaggtacataaataccggccccacgaccatgctacactcgaagcccgtgtttctatcgcccagcaccacgcagtatgatcttcggtccaatcgtgctctttctcgtcaagcggacgccacggctgtttgcactcacgttcaatgccatcgccattctgttggctgtgttcgtgcttctgggatgctacaacagtcaacagcagtccaccttcctcagccgcctacaatttaacgcgcagtcgccgctgtacactgtgattgaaaaatcgttgcacgagcgcacgaacacgactgggttcgagcagctccgcatcaaggtcggctacctcggagtgtgtctctcaaaccttcccgccgcatatcctggcggcccggtacagtgcttcgggcgcaagaacatcacaggcactcccctctacgatgctctcgacctccgcgtcttcaatatacccgctgcagccaacagctcctcccacaccgacctgaacatcctcggccttgcccacgcagccgccgcagacattgaccacccgtatatcttcatgatcagcatcatccttgccattctgatgttctgcatcctactttacgtcaccgtacctatgctgccctacaagcgacccctgaacctggcactgcttggactcagtccgttggtcgtcgtgttccttgctttcggctccatgtggacccacgttgcctgcaatgcagcttccgcattcatacccccagcaagcatgggcgtaatcaaggtccatcgcggccgcaaggccactgccatggtctggtcctgttttgtctttgtgctgcttgattgcatcattatctgggccatctacttcagggaccaggctcgtgacaagaagtcacgcggccaggctgattacgagcgctacgcgaacagcgactatgcgaagtacgcgcaaagtgaccgttctacactaggtaataagtattagtgtctatgcgctagttgctagctgcttgcattgtgtaatccttcgagaatgatgactatcggaattttgatgcgaacgttttttcgggaacggctgagtaaatagccgttgtaaaaatggcctcgactcattgatctcttgacagaagaactgcactataaagaccaagtaaagtatcagaatcgtgtaaacgtctacgtctaagattcaaaaatagcacctgtctatctagtgaagggattaaccatggcacagcaactactgaagcaagtgttgcggacccttgcgcttccggtgataatgccgcttttagcgctgaacaggaggtttcggatattggacgatattcggacaatcacgtacttcgttcaggcgttggtagcatacggatggtgcacactgacacaacggttcccaacatggtatgttttcgaggcccaggttgcgaaacatggggattcgccgtgtatccgatactgccgcccgcaggcgcggaagggcgacttcacggtggagacgtacacttaccgtgagacgtacgagcatgtgctgcggctgtcttacgtgctataccacgactacggggtgcgtgccggcgagcatgtggcggttaactatgcgaacaagccgatgttcctgttcctatggctggcgctgtggaacatcggcgctgtgccggcatttgtaaaccacaaccagaagggcacgccgctgattcactcggtgaagatttcgaacgcgcgcttgttatttgtggatgcaggaacgaccaacctgcccaaagggtccgaggcggagcttttgaaggagcttcctgagttacagatccaccactttgacgaggagcagatgttggcgattattaaaagcgacaagagcccctctctcctaatcaaacgtggcgagcgcacgccgcgcaccctccacgactatgatcctgcgatgttgatctacacgtcggggacgacgggactgcctaaatcggcaattatgtcctggcgtaaagctactcttggatgctcgctgtttggttttatgatgcgtataagcccagaaagtgtggtactcacggccatgccgctgtatcactcgaccgcggcgttgctgggtgtctgcgcagtttttacacagggcggctgtattgccatctccaataagttttcgactaccacattctggaaggaggcatatctgtccaaggccacgcatatccagtatgtgggagaagtgtgtcggtacctcatgaacgctccgaaatccgagtacgaagatatggcaacagttaaggtcgcttacgggaacggactccgccaaagtatctggatggatttcaaaaagaggttccgcattgaggcgatcggtgaattctacgcatcaactgaggcgccatttgccacaactgccttccaactgggtacgtttggcgttggagcatgcaggagctatggcagccttgtgcactggatactgtcgtaccagcaaactctagtgcgggttgatccggacgatgagtcggtagtataccggaacgaaaatggattctgcgaggtcccagcaagtgatgaacctggtgaactactaatgcggatctttttcccccgcaaaccgcacacctcgttccaggggtacttgggcaacaaaaaggcgacggagagcaaggttctacgcgatgttttcaggaagggagatgcatggtaccggtcaggcgatctcttgaaatccgacaagtacgggcaatggtacttcgtggaccggatgggtgatacgtaccggtggaaatccgaaaatgtctcgactaccgaggtggagaatcagttgctctcgttcaacaaggacctctttgactgtttggttgtagtgggcctgaagattccaagctacgagggtagagccgggtttgctgttatccaactgaatccagcgcgccgcggactggaccatgccagtttgttagacgaccttgtcgagtatttgaaacatgctcttcctcggtacgccttgccgctgttcatcaagttcacaaaccagctggaaacaaccgataactataagttcgccaagaaacagtacaaaaaccagcagttgcctcatggtgcggatggggacgagacaatttactggttaaaagactactcgcagtacaaagtcttgaccgacgaggactgggagcagatatcaaccggaaaggcaaagctttagaccagacaatgccgggattgacaccggtagggagttcaaaataaaaaaaatacctgggaagccatccataaaagccattatcaactatagaaatagaaaagtttcagtataactctaatatattgctgcagccatgctatacttgccaaaatattgtacagcgtacttcgtaaacagaaaggaggccgctgcgaggataagcatcgggactatcatgacgaggaacacctcagcggtgtcaatttcgcacagccctgaaacagtatgggtcaaatcggggtccagatcaaagctgcccttctggtagtagcgctctagcaatttatccttctccccccaaaccttgtagagccactgttcaaaggccttttcatccttgtatgggatctccgacagcttgaaggtgcggatgtgcacatccacaagctttggcccttgaccccggaggaagatgctctgaaggtcgtaaatctgctccgcgtaggtggtcttcttgacccccgagtatccgatcgttacgtcgtaaacacagtcgcagctgggcgccagcttttccagcgcgaagcgcaggcccgtgctgcgcggtagcagcacgttctcgaacggctgtacattaatctttctcgcgtatacattgctgcgctcccgcgtgttcgagctcatgttcgtgccctccgggaacaagatgagcgtgtacggccacgtctgtttgctcgcttcgccgtcctgtgattcgtattcctcctctccctcggcagtgacgcgcgacggcgcgtgccccgccagcggcccgagcccgcgcccgtcacggtccaggcgctgcagcgagttgcctaggtgcacccggtccaggttccacctccggttcatgaagatgaagccgtagtttttcatcccatagccaagcaccgggatcgccgccagcgacttcttgagcatgatgtacacccgtcccgcgagccccgacgtgtaagccagccaccataggaacacccagtccgtgtatatctggtggttgctgatcaccaccgagttgcgctccagccgcgaccgcagctggccctgccccttgtcccgccagaatgtccccttcgcgaccgacgcgttgtctgtcgtgacccgtacgtacgacggcgcaacaatcgtcatgatcgtcaccagaagcaaaataaagctctttttagaccgatccagctgcgattggagcccgatccgattgctccggtacatacacttcatggaaaactggaatatcaccagcgacacgcacccctgaataaaaacaaacgtgaccaacgcagcgagcaccgtgcggtgcgcctgctgtgctactgcactcatagtaatcattgcgtgcgtttactatgtggccttgactccttgcgttgcggctagaagctgcgtccgcactctgggtgcccaaatttctagcctgcgattttatatagggtggcgcgctaagccatcatccagcaaaacacgtcaagtagtccgagaagcgtgccgaggtctcccagcggatcagcccacccgatcgtagagatgctggagatcgtagtgctctcgccagtagctgctcttgcgtttcagtatgtacagcggcagtccactgcagacgagtagcgccgcaaacagagtcatggtccacccaggacccattctgtggagcatggcgtccaacacaaacacgcagaccgcggccagaagcatgcggatgaggttgttgagggcgacgccggtggctccacgggcaggcagtgagtcgacgaggtaggcggtgatggcgccgatgatgagcatggcggctaagccgaaaaaagcagtgccaatgagcgggactggccacggggccttgcagtgcagcggccagccgatagccagcagcgacagcggcaggagggctgcagccagcgcgacgttccaagagaggcgcgcctcgggcacgccaacgccgtggcggcgcgtgtagcggcgcagcagcgcgtcgacccatcggccgccgtagatcgcgctgaatatgtaggtggccgcgttggggatgtacaacaggccgaggtagagcgggcgcatgttgtaggggtcgcgcgagtagcagtactcgatggtcaggttgacgacgtagacggcggcaaaacaggcgccgttgtacaagacggccagcaggacgggcgggtagcggagaaagtagagcgagcgcagcgggcgcaacaggtagaagtgtagctcgcgggcgagacgctgatgcgggcgcggcgcctgctgcgagatggcgcgctcgaggccggtgcgcaagcgctcgcggtcctgctgcaggatgcggccctcgacgcgcgggttcgacgagtggatgcggctgagtgagggggcaccgaggtcgacgaagttgcgctgcgcgtcgtagagcgcgacggtgtcggtcagttgcgaggcaagatcagccgcggcgctatccagactggcgaggtcggcgtgcgtggagtgcagcgacggcggtaaggcgctgtcagccggcgtagccggtgccgaagccgacccttgcttgcggcactcgcgcagaatgcgcgctacaagctccttattatcctgggtgcgcagtgtctccggcagcgcgaagaccagcaacaaaaacgtcagcgccgccaggatcaccatgaaccattgcgtgctgcgccaggaccagcggttgaccagcagcgagctcacaatgggcgacagcaggggcgccatgagcgggcccagatagtagtagcccaggttgcgccctcgctcctcgggcacgtacaggtccgcaatcgtgcccgcgccgacactctggacactggcgctggccgcgccacacaggatgcgcaggatgataaatgtctcgatgttgcgcgagaaggccgtgcccacgctgaacaccaccagcagcgcgaacgacagcacgtacactgttcggcggccgtttttgtccgccagcgacgaccaccagatggggaagatgcccagcgcagcgaggtaggtgcctacagacacactgaccagaaaccgcgaagtgccaaaatcctgcatgatagtcccgatcgcaggatagatgatgctggtccccatgggacccagaatacatgcaaaggcgacgatgaccaggatcagctttttgacccgcgggggatagagacgtgcgtcccggaattcgggcacaagcgccagcctactcagcagtccgcgccgttgcgacaccggtacaacgtgcgagctatcaaacagcccggtggctgtcggggcagtctccgtggaaccgttctctgcggcatacagcggctgcactttttcgtaccccggcgatcctgcatggctgttgcttcgactcggctgcgatgacctctgttcgatgtccatgctattctgctcttgggcgcgttgcgccgacactgacatttcactcaactgtgcgtacttcgaagcggagcccgtttagttctaccatcgagtacggcgttcgattcgagtttcatgcacagtgacctgcgtgcttttatgctagcgcagcgcccgctctccgtcccgggacagggcgatcttacgtaattttacaaagcatagagtcagcgcttcgcgatgcccaacgaagcactagcttcggagggtaccggaaccgcagtcggttatgaggggaatcccgggccccataagctgctgctgcccgcttcctgtggagctccggggacgaagcgcgcggctgcgtaaaagtgcctgcgtccgtcaatttgatccaggcgggcctgcggttttgtggcacattgcgcgggaagctaagagcgcagccacccggcagccagcgttgagatgccacggacgcctcactgttctactcggcaagcaaaagatgaagttagcgcaagttgcatcgtggcttgccctgctcgggcggcttcaggcctgcgtcggcggcgcgccgccggcggcgcgcctgccgccagacctcgccgaggcttaccagcagtatgccccgatcttcctcgcggaactacgcgcgatgtcagcgtcggcgcgtgcgggggccgaggggggcgcagaattccaactcagcgacatcgccgagttcgagcgcaacatcccagatggcacgccgttctatgtgggcccgcccgtggtgaatgaattgacgacgagggcgctcgatgcgctcggcgccagtgtgggcagctgggtacccggcaaggccgactgcgcgcggtttttgcgcagtatcctagaggacgagcccttggtgacactcaagatttcggagacaaacttgtttgagggcctcaatgtgaccgcagggccgaccacctgagggcgccagtaggcgcgggacgccgcgcagagcagcgctcagacgccgcagatgtattagctcaaggccgctatggccccagcggaggctccacatgtgcatgccaagcgcgcggccccccactattgtaggtggcctcccgcatcccgcgccggcttttgcgcgcagagctcgcgactgtggtgcccggaccagcttcgtcggccccataatagtgaaaaaaatctcacggagtgcaaatgcattactgagatcaccagaacacagaagcacgcaacgctacaggacttccctgttcttttgcttgcacacgtccagcccagaggacgattacaccgccgtcagggttcgctagtctccggcagcacaggctccttatcacattttgcattttcacgctcgcacatgtcacaaataaccaaatacatccccaaaagcacgctttttctctgcccgttctttctcatcgcgtcagacttcgtactcgctatgagcggcaagggcacgcgcgcagggagctcatctacaggcatcgggtcgcggcccacgcgtctgcagcggctgcggcagctcgtagcgcatcgagatccggcaagaggcccgtcaggtgcacttacgagcatcgaagagtttactaggagatgacagcgcctgcacgtccctgaggctagcctcccgaggcgggcgggccgcttggtatagggtttacatagcagaatggcacgaatatttgctctaggcaactgcagggacggaaggggcttcatgcgaaatccttgcaccgcccgggtgccgtatataaggtgacgcagctgcgcagctggggcgggcatgctaaccacgacaggatggtggagtggtgcgcgattatatacgacaagcccggcgtggaccggtcggtgcacaggcaggagcacctggcggagatcccaaagctcgtggagcaggggaagctggtgcaggcgggcgcgatctacaaggaggtggtggacgggcggccgtcacagtttgccgggtcgcagctgacgctggtcgcggactccagggaggaggcgctggcgatcatccgcgatgacccgttcgccaagcatggcgtgtgggacgtggaaaacgtcgtgctctacccgtttggatgtgcagtgcgcaaggagaaacagtaagcatatatgtatagcttcatccattccgtatatcctaccagcggcgggcgcgccagcctttgcgaagggtaccgcaacatcaaaattagatacttaatatagtaaatgctgagaaaacatgataaaccccgtggggtcccgggatttagtactggacactgatcaagtagtcggccaactgctccacgatcttggtggcctcaccagcctgcacgcccgcggggtagtgcgcgatgaggatggtctgcttggtgcgcacggcaacgacgccctccgcctcatggcgcccgtagatcgagcgctcgtctgcgcgcaaaagcatgaacttctggccctggatgtgcaacccgttggcctgcaaccctgctgcgttgtcaaagccctgggatatctccttgatctctgagggttccaaggcaagcccgccggagcttgcccaaattgtgtcacccgctctcgagtagatggtggccttgtcgaccttcccggttgctaacaagttgtcagtgtaggctaaagctctagttagtacccacgaacgggccacgagcagaacacgtaaaaacacataccttgccaagacatgatgcgttccggatgaaatctgagttagtgctaacactcgcagatgctctggtgagtggaatctacgtatcaatagtattgatttgtcaataaatataccttggctttttgtaatctttttatataaggggttccgatctgctgacatcatagcacacgaattaagtatccgggtaacgaagtgcccgggtaatgcggggcacagggcaggtgccgggtaacggcatcgacataccgcagagatgcactggcggctacatactgtacacaggctcgcagctactcgtcgtctgagtcgagaacagccaccttgcgacgcttgagagcgacctcttcatctgcgcgcggggccggcggggcagcagcgtacttggctgcgccctcgcgtttcagctgctgcagacgcgcggcgtttaggtcatcctcctcatcctgcgaggcagtcgggctgcccggcagactgtcagcggcgtcgtcgttatccgacagcgcttcgaggtcgtcgtcgtcatcgataaagccgtcttcgtcatcgtactcgtcttccatggagcgggagtatggggcggcgcgcccagcagccttcttgaactcgaaggagccctgcgcgaggcctccctccagattgtcgcggtccagctgctccttgagctgtcgttttctgcgctctcgcagtacctggtcatgcttcttttgtagttctctcttttctagctcggggtccttgcggacaatatacgtggagggcccggaatgctcgcgcgcctctcgcctggcgatggcctttgtcagacgcttgtgtatcttggagtttgtagaggtgggtatgaagagcatggagttcgagatggtgccgccttcgacgcactgcatgatttcctgctgctcgtgcgagaccgtgagatacgtgttctcgatctcgttggtcagaatgtctgtgtactcgtcgcccagtttgagcgacagcgtgccatcggaccactcaatgacttgcgcgttggattccttgaaaacgcgctggtcactgccgcgggaatagcgccatctgatcgtgttctcgtcgatcaggctgtctcccagctggtcctctttcgacgaaaagcgggccatccgcttttctatctgcccctgaaagctgggcgggtcgaagggcacgggatcgatcgttagaaactgcggcactttggtgtagtatatagtctcttccttcgagtggcttgttgtatagtagggcacaacgtgcttcaccagctccaggtccgcctcctttatctcccgcgcctcgtcctcatccgatagatctgaggcctgctgcaggtcatcgccgtagaacttccggttgtacatttcctgttcttcgttgtcctccgcgcccagtccatgccctgttccccgcgaccgcctgctcccgctgtcctcgcttgccccatcgtcggcttcatcggcgtcgtcgctgcccgagacatccgagtcctctccaaacaagtcgttctcgttcgcgctgcttccgccttggtctgaggtgaagccatcctccagtttttgctcactcagctcggcactctctgtgagcgcatctctctgttcctcagccataactcaaccaaataataggacttctatattcccaatgtccagttgcccacgccaagcacttttataccatccaatcggctgttggtctccttaagcttggtgctgagcgttatgcctggcgcgcgaagtctgagttttggagagcaggtgaaatttcggtccttaaaaaagaaacgaagattcatcatttaaaacgtctccgacgccgagcgtgtcagcatggatgaatgtaacgtatttcaagtacctaccgggtagctatagactagtctagatattttgtggtgcttgagaatgttttaataataccctgagaatacttgaaatctgggagtttttaaatcgaggggcaaattggcaagggattaaagaggatgaggcggttccctactccagtgtataccatctggattctaatacttgtggcagccattgttttagaaatgacgttccttcctaagttgatcaaggagaaactaagcagacggatacgccctaaaccgctagaggtacacgaggagaccaggccagtgcccgacgcgccgtaccctgatggggaatacactgttggtgtatactactcgagctggtcgccctataagccacggctccactatccccgcaatattgacttccagcgggtgactcacgtctactatgcgttttttgttgttgacgagaaaactggaaaaattgggtccttggacaaatggtcggatacaaagatgccgatgaacctaactgggatgccgcgcggccttaatggggcaataggcgagcttaattacctcaagacgcggccagggaccgatttcaagctcatgatggccgttggcggctggtccaatcgggagccgttccataaaattgtgcgtgacgaggagaagtttaacaacttcatcgactcggcgatcgacgcaatgtttgagtacggcttcgatgggatagatcttgactgggagttccctaaggatgatggctacgaaccccagatgtatctagaaatgtgtagccgcttgcgacacaagatggacgaattggaagacaatatctggggccccggcgggactacagaaccgcgcttccacttaagcatggcagcaccggcctttcctcagacacttggcattttcccggttgaggagatgaacaagtatctcagcatgtggaatatgatgacatacgactaccacggtgcatggtcagagcgaacaggctaccatagcaacttgtacaatgctacgaattcgccgtacaaatcgcacctagataagcgtcggtatgaagatatgggtattgacaactttgatgagttgaatgcacatgatgcgatactcatgatgaccgaacaatttaaggtcagcccaagaaaaattgcactcggcatggcagcgtatggccgtggcttcaccaacgttcggggcgatggtgaacaactaattggccagaaatattctggtgtaggcggaggatcagaaggggaaccgggtatgtggctatacaaccaattgccgctagctcacggcccagagaagtttgacaatgtttgggtctctgcatatagctacgatcctaatactaaaactcttgtcgtctacgacaatgtggattcaatgaaaataaagaaggaatacgtgaaagataagaagcttgctggggcgttcttgtgggagtcctgtggagacaacttcaaggataaagataggaaccttgtggaggcttttaccgaaaatatgaaaggtgcgcggaaggcaaccgcgtacaaggattccaaacttatacaatactacttgaggaccaggccagaaggctttttggttcctatgtataggcacacgagtggttgatctcacaatatgtgcctcaaagtgaatggctcgctaaatataacgaaaaatcttcatatatgacatagatatacatatatatatgcgcaatatatgtcgacgtacaagcacgtatacatgtgacgatgaccaccttatatacactgttgctaggagcatgctttaccggatcaaatccaggcatttgtcgttccatgcttatagtaagtcatccattctagagtaaaccttcaacacacctgcaactacctctaagtttagggctgtgcctggatttctgtcaagctcctcttgtaccagtcgattcaaattcactgagataccagtctctatatccttatctaatgcgaatgggtactgagaaaactggacaagtaattcttccgcacgggaaaagcccctgtctcttttctcatagtctagggtcgacagaactttttccaatacattagctccatgcgcactgcatattaacgctattgtccgcaagtatttgaacgccacggtctcggggaacagttctgtgtactgcaattcaacattgcggggaaccagcaccgacagaatgcgcctcttgatcgactccttgcagctggtgtccgcgacaggatgtgtaggcatatcaaacagaaagaagttcttcatttctgtgcgtaacacacccttgtctacgagccccttggcgaggcgctcccgcacctgtctcaattggtagttaatcttcaagaaattccacgtctcgccactcaaaagatccatccagttcacaatggtgagcggctcgctccccttcatcagggtcagtgcctcgtccagcagcgcctcgccggtcttgctgccgtccaccacctcgatcagccgctctgacgggtcgaatcgccgccgcattgcgtcgtccaccacctgtatccgtccgcgcagcgccaattcgatcaggatgcagccacgtagtgcgtatgagatattttcgttcagaaaggacaggtatccctctttgtccttcagccccatcagtagcacctcctccatcaacgtcaacgtcggctcccgtgtgttttcgcgcagcttctgctcctccgggtcatatgccaccttgtgtgtcattccctcttcctcatccgagcggttcagcgacgcccctccaactgtttcattgcctgccgtcttgttgacacgccgtctctgcaatgacattattcctagcaccggctactactcaagccctcctgaagtctaaagactgttcttgacgctggtactgactcgaagccgtatggagcacaagctggatcttccaaccatgccttcctatgatcagttggcagcgtagcatatgctcactcctggcgagtggaaaaagagagcgtttcccgcagaaaaccacggcgtatataatgataaattaaaggtcgacagatatgtacgttggatggtcatcgaaggcgatccagaggaagatgcaaaggccatcaggatagaactagcgctgattcaggccagtaaacgctttagtggctctatgtcgagctcatgagcttctttgacgtagaccaggaagtaaggggtggcggtattctcttctgaaaaatcgaaaacctcggactccgggacctcggtgacagactcgtcgttgtacttgcgccagataccgccattctgacagtctttgatatagacccagtagtggccgtagctggcctcgcctctgtggatgaacacggcgcccagggagtagccataggaggagaaggcgtcgaaacggtgggcgatggcgtcctgcaccgaggcaatgtgggcatcgagagcggccagctcttcgtcgagggcgacacggagggcgtccaagtgggaggtcgtggcgtggtattgctcctggagttgccgactgccggaggtgagttctgcggcatcgaggaagcggcgggtgtctgcgagcgcggcgctgagcgtgacgccgtggtcgtttttggcaagcagcctccggcggcgttccctgaggcgttcgagctcctcgcgcaggccgatggcctgctgctttttggcgttcagctcagcgttatcggtagcgagatagcgatccatgtagagcttttcgccgaagggcagcggctcggtggacttgaatggcatgaatttctcgcggtcgtagtagactcgctgtatctgaatctgcagcatgatgggcaactccgcaacggcaacgctgcggcggacctttccgtcgtcttcatctagagttagtaggtcgtctttgaagtaggagtccaaggcgtcatatatatcttttggatgatcgccgatattgaccagaagcgacataaagcgctcgatcttcgtccgcttgcggtcaggaaattcaagcgggatgagctcttgtttcagtttaccataaaagagctgttttacaaggtcgaattgctcgccctcttcatccaagctgagcgggacggacgcactctcaatttggtagaggacgttcccaatgcattccgtcacatcttgctgtctgccaatctccaatgtgttttctagctggtcggaactaattttcgcaacataggtggaagtttcagggccttcggcctctggactcccgaccatggtgatatctttacctgagtcatcattctcaacagcctgcctatcctcaagcggacctgcgctggtgtattcagcgttggcggctgaatccgatagcccactttctggcgtactggaaggatttggacgagtactgccggtattagctgtgtcggaggacgcttggtatctgacactgaagtcatctgggctcgctgctgagttatttgtcgaaagtgcagaagcagcagttttagcgtagccgcttttagggtaagcgcttaaggtatccttggaagtaccaaggtttggaacaacagactgatcgtttccgataggtttgtctgttccttcgtgcggagctggcgtcatgagatgctcaaagttagcttcactgttaacgattcctttgttcggcgcggtggcattaccggtggccatatttatggcagtatcattaggcatacacgttcttattccagtgttgagatcagtgtgcccgtccaggggtatgcctgtctgtgcaccggtagcaagattgctattgctatccgttccaatatcgctgtccaacttgacggagatgttagaagcaccaagttcattaatggcgctgtcttcatcacactcctccattgagatatcgatcacctcagtatcttcattgtatacttcatttgcaacgagtgcatttgaggccgtaccaaccgcaggaggcactggctcaaactccacctcggtactgcttggagagaaggacaagtaggcgagttctcgggtaggggtcacatatctctctctagaatgaaccatctcatggaagagagaacgcagctgataaacaaactgcacagatctttccacttctgcttgggaaatggctcttccacctattcttcttctgcccatatcagaggatgaaaccgcgttgtttagtaaatttgacgcagtatgatcatacgccaagatgtattcccttaagggcgatattgtaaagtagtattgcagcaatgagttcaagtagcatgtgttaccgatgttgttaatgcccgtaggccaattacccgctggtaggtagttgatatccaccaagcccgtttccagaaagtggttaatcagcttggagtttctttcgaaaccaatcttggtgagcgcgatctttaaattcaacagctgctccggagaaacaaggggatcataactccactttctttggaatatttccaaaatcaaatcatctgtggcatttacatttacatgtaaatactgcagggcagattgataggacaagtaagacatatggtagaattggtgaaacttgggacattgctgaaacaagatattgaaaagtatgatgctcctcttggcaactgccaaagtgtataaagctcgaatacaatccatctttagcccaggcgcatctgaaactttaatgctgtaagctgtttctataatgtcaatatcgactgattcgtcaatttccaacagcttgtatgcctgtaattcattgggaaagggttcgacttcgacatagaacttcagcttgtcactctctttgtatctcgccaagagtctcagcgcgttgcggagatcagcgtgcttctgtgggccagagtccttgcagacttctttataactttccagtaaaaattcgtcagagagctgacggggatcagtagagctgggatccaaatggaataagcgcaatgcactcattaatgcctcatggccaacaacattctgtttataggtgtatgtcagcagctgtttgctgccttttgaatttgcgacaaatgacaggtcatcgtagtagatactagcgttcgcgggatctaacgctatctgagcttcatagttctttatgatgtccctatcgctgtagtagtaattcgaagaaagatgcacaaagtggtaattggtatcatagggatgcatctgctggttaaagtcgttatggtcgtattcacccatcaggtggtaccagaaactgtgcgaaaagtgagtctgatagagctggaacgagcgtagcttgctattcgaaaccacgacatccttaggcactaagcgcagagactgcttgcccaaaaagataagttcaagcgacttcctgatatacgactcacggaaacggcggacctcccagttctcgacatgttctgtgaagtccggtggtttgtattcatatattttctgcccatcttcctcgatctcgcagagttcaaagccaaacttcgtcaccagccaattagcttccagctgggaattcagcaccttgttgtcggcagatatcgtttttagctcatcttgcgccttctggcggctgagtgggtttttgaaaaccttgaacagcgtattaaggcactctgcctggctcgggatatccgatgggtccagatccgggtgccgcttgcatacctcgagatatcgcgcgcggatacgctcgccggtaaactcttgtaactcatcggggccgaactctggccggaggacttctatccggacaagcctgttggtcccacttgccacgtaggtcgcagaatcgaccacagcagggtcgccgtcctcaaacaaacagaagtcgggtttgtcccatgggtgcaattcgtcgaccaggtggtactgcgcaacgccgtagtgctgccgggcccgttccagctgcggccggatcttcactgtcacacgcaggtggtagatacggtagttcaccagctcgtcttggctcgcaaaccgctgcccggggtcgcatagcacccccatgaacacgtgcacccggttctgcgcgcatgtacgtgaggtgtactcgaagctcgtctgcagcactacctgatcaagcaggtaccccacggaccaggtgcgcgcgttcgcgcgctgccgcgcatactccagcatgggcgcccgcaacacttcgcgcccctcctctgaaagcgacaccgtcaccctcacgtcgtccagaaggcggtccgacgtcttgaccggcccctgccgcgctagattcccatagagtactgtgcgtccatcgtctccctgctcgagctcgcaattctgctccgtctcgatctgttcgcgcgattcctgattcatcttgacctgctggcacggcaattcgctctctgcctgtggctatgcgctccggtgggagtgttaaagcaagggcagagatccgaaaagcataccgcactacacacgctcgaggctccacagaggagagtcattatatacgcgcctagtcagaagtctggacggcccattatctgcacccactcccggtcactcgcggggcttgggcctgtgccatggctgtaactgcctgccgctgccggtgagcttcgccaagacctccactgcaagctgcagtgcaaattgcgcaggcagccaagtccctggtagatagtccttcgcgaccgacagccatgagggccggcatcgcaccgcctcccagcgtcacatccggaccggaggtcaggtaaccggcatagccttgggtctgggaaagtggacccacacaccgctttcagaggacataatttgagcagctcgccgatcgtggcttatggcctctcacgcttccaagagttaggcagtaagataggcagcccgcacatagctgaggcccgggacagcgttatagtagacatgggagctaaggcatcgaagctatcaaaagacgacctgcagagtctcaaacagtcgacgtacttcgaccggagggagatcctgcagtggcataaggggttcctgcgcgactgccccaacggacagctgactcaggaggagttcgtgaagatatacaagcagttcttccccttcggagcgccggagaaatttgcagcgcatgtgttttcggtgttcgacaaggacaataacgggacgatcgacttcaaggagttcatcacggcgctgagcacgacgtcacgcgggacgctggaggaaaagctggtgtgggcgttccagctgtacgacctgaaccacgacggatacatcacgtacaatgagatgctgacgatagtgacgagcgtgtacaagatgatcgggtcgatggttaaactgagcgaggacgaggcgacgccggagctgcgcgtgaagaagatcttcaagctgatggacaagaatgaggacggttacataacgctggacgagttccgtgaggggtccaaggtggatccatctattttgagcgcactgaacctatacgatggtttggtgtgagtaattgattgagcgagccgcgcggggacgtcagggtattgaatcgtgactatttatacttttgtacagtcttcgtcgtaaaatgtaattctaataatcgatgcggttacacgcgctctgcagtccagatagccgtgcggcagatggcttttattgcttcggtcaaagcgatgtaggggaccgccttgtgggaatcgtactgcaccgcggtgtcgaggtgctcgagctcatcgtcgcggaattggcggatggtgctgatcaggttgcgcagttcgtcgctttggccgcaggtgccgtccgacctgcgcatctcgtactggctgttgaggcagcgcagctggtcgttgtagtgcccgccaatcacggtctcgacggcctcggtgcacgccattgctgcctccggcgacaagagtgccgtgacactgcccatggtgaacgcacccagcttccagagcggcgtcagtagggagggccgcacgcgacgcctcagttgcaagtcattaaaagtgtcatggtggtgtatttcctggtcccacatatgctgcaagactggctttagatgggggtgtttgtttgcgagcacaaagaactgccccgcgtagatatagttggcccccagctcgccagcctggtctacccgcacaacgcgctctaagtacgccagctgcgggtcggacatcgcgtcgaacttctggccttcgcctgctttggcggctgcggatgtcttgagtgttgcgagcacagagaatgatcgtttggtagcttggttcgtagcaaaggggagcatttggtcagtaacgtcttatatcctgggacgcaatcggatgcagtggcagcttaagctatgtcgcaaagacacagtggcctaataattctagatgagcgacttcaggcttgccatgttctggtatgtagttgcccgcgcgcccgctccggaggctaaaaaaaagcattaaacgaacaaatatcgaaacactcaaccactggtattaatcctcaaggaaagatgacctatttttcttggtattcgtgaaaagcttcaggatcgtgcgtccaatttcgatgtcgacttcgtcggcatcgcgcgcgtgtgttacgggtttgaagctgccctcagtgtccattatgttgaagtgtttcagcagccggttgtgcacatcgcacacacaggtccactcgacgaggaagaggtcgttgaactggtgcccggcctcacactgccaaattttattccgcgagtcgccctgtagaatgttcgacttcatctccgcgacgccacaaaatttgcccgacttgttgacgctgaagaacaggaaaatgcgcgcccctgccggcagccccacgtacgccttggagagccgcttgttgccgcgcttcgtagatgtccacaccccgtgcttgaatgaggccttgatgttttccaggttgaacgacttgatcacgaagaaccgcgacccttccggcactattgccgccgcccctccgcttacgcccgcaggcgccggcatgcgccggtacatcggatacgcctctgcatatttccgtgcttgcgacaccgtgcccgcctctacagcactacccgggagcaggtcttgagcgttgcctaccgatgtgttcccctgcgtggtgttagagacggcgaactccgcgtcgctggagaactcagaggaagacgtgtcgtagtcactgcgctggatgactgtcgtgaggccctgcagcacgtcttctatactcctaatgttttcgttgaattgctccacgtaaaatcggctgtttacaccatcagcggctaatcgtgaccactcctttgaaaccgagctcgtgtacttgtaggaccaaatatcgctatactgccccgtagagtaatccattatgtccgaataatgcttgaatcagagctgtgcacgcaaagtagacttatctttctaccttatgctgtttgtcttgcgcttaatgtgagtggtgttggtgaaagacacagaggacgccagtcagcttataccaaaacaacgcaaacacccgcagtcagaacaaagagaggaacggtatatatatctaagacagtataaatgaggtttacaacattacatagaactctattctatggtttttgccactacagagctgttaccgtgttttggtgcatatcaacgtgcactgatgcagacaccgtggatcgggccgctatatcgtcagccagttccagaggactctgaagctgcgaataagcttgtgtagccagatcgcagagtggaaccaggccttgactgtcactttccagacgagaagcttgcccgccatgctggtccatggaacaaattcccttgtcgcggcttcatagtgctcggcggcaaggcggtagtcgcggtcgacgcccaggccatgttcgtacatgtagcctagagtcaaccggctgaattcggtacagcgactcaggtgcagtaaagcagccgtctcgtaggagccatttctatagcacatactacccgctgttacagctgcgaacacactgcccatcatgcgtgcccggtcgtagtagcgaaacgcggcgtcgaggcgcgggggcgagatctgtggtgaagcgcagatcagacagggggctttgtaaaggatgcgggcggcattctccatggcagacagggtgcctagctccgcggaacgggcatatagccacagtgcgttttcgaagttgcccatcagggcctgcataagagcgttgcgcaggtctggcgactgtagatggttcgcattttcaaggaagtatctataactttcagcaattgcagcggggccctggaaccccaattgaagctcaagtatctggatgcgtgtgaaatggctctcgagattgccatcacggaagcggtccatagccgcaatcagaccctcctgggagaggtcattttgtatgaaattgagcatataaaggctcgcttcatcttctgcgagtttatagaactccgcagcccggttatagtccctatattcatagtggtgcaacagcccgaggtccctcaaggggaacctggaaagaactttgttcgtttgaagcaagacatcacgcgcatgcaatagtatttgctctgcctcctttatcctaggttgctcggttcccagtccccgcagcaataaatggcctagtaacgccattccagagccataacagcccttcgctacgtgatccgcattggcaatttccccttgaaacttctcgtgaatttcaaacatcctgcgcagtacaccttcgtgatccccatactgggtatacgtattcatgcttagtttgaacgcttcctcgaccgcatcgcaaattccgagatccatgtactcgggggagccaggctcatcggtgatctcaataaacttcaagaaataatagtaaaagcgtaacagcgggctcccccagtttggaagagatctgggcgcaaatttctcactgacttctgctcccctgtataaaaaccctgggttgccatagctgtcgaagtattcatcatggtagtgccagaaccgagctggatacgagtaccacagctcatgtgcaactttgctgtacaggatcaacgcctttgatgcatcctgagggacgttatggcccattaagtaacgatatgcgagtgcttgcattgcttccagagagcccagacggcttgctttctgaagatatattagcgtcttctcgggcgacactggcagtacgccgaaaaggccagtggcgtgggctaccgctgcatcatatagtgatgttgtgtttgtttcattgctcaaaacattgaagcgttccaggtacttccatccgagtaaccaattatgcggtatgccccactctccatagagatgcatgcgatatagcatatatgtggcctctgggtgagctagtcgatcactgcattctttaagtagctcgtaaagcagccgctggctgtcatttacactttcagtccagaaaacttcgtatcgtgctttgtattcctcctcatcgtagtccgtgggagggtttaccaccagtctccctttactatcaaggtacggatctttctctagtcgcgaagtgagtggcggttccgtaattcgttccaaagtcagagatagggcagttgcagcttcccaggggtcacgatcagctataaatgctatctgttgcagtgagtcttgcacttggccttgccctacagttgtcaggaatgcaatagtagccaacagtaagccaagtgcatttgccccagagcctaaattcatactagcaatgttcaaaataacacttagaggccacttctaaggtctgtttgctttaatagttgctcaacccactgtgcggtgttacttgtaggtcgacactaaggaacaaaaccgctctcttctcatagcaaacctcacgccacagagggattctgcaaaacgctccagagtatggaagtacgttaccaatgcgtatgccagcaactggttaagtggagtgacctgaattcctgtaaggaatgccatagcataagctgcttccgctgccaagagtttgaaccagtcttgaagtattgccccaaatgcctagaggaacctggcaaaatagatcagatattctgcaatcgcaactgctttcaatgccctcgttgcaacatatcgcttgtgatatcgagcgagaaggtgaccgaagactccaagagctatgtgttcacctgtaccggatgcaagtggagctttacaaccccccctaccggcaagatcaagtcattaaccaagtacgtgctcgaactatacaactccaagaactcgcgggcctatgaacttatgacacatttacacaacaagaaacagctgctacagtgggagggcagagcattcaagtttgacgagatcgtcaacgcattggaaggaaatgcgccacgttcattcgtccaacgtctagcggcaggtgagaagctgcaccatctgatcaatgaagaattggcgcaaccactgcagcaggacatggaacacgttctgtatccaaaacgtacacacctaaagtgccgctaccgttacatgtgcccgaaatgccatcacacgttaagcatgcccgatcagactccagcctcgtcaaaactacacaaggaatccttcgcgatgaacgtcctcccgcatatccggattgaaacagaggcgcgggctctaggagtcgacacccaagacccaacagcacttgccattatagttatgaaccctataccgatgcgcgcagttgactttgttctttctgcctctgatactctctttctccccgtccgaaagtttaccatcccatcagtggccccggatgatagtcaactagatcgctcccagggcaaagacgtcaatttgcaaattctggagcactatgttaagttcatacccacctgtatgctcggcaatgaccataaactaaatcgagcggaacgcacccgcagattaggaaaccgatttcagttccaaggaagtgcgtcgcctactccgcccaatcctgtcgactacgatatagaggaagaggctcgaccgctcgatcagggcgatgcatggtgcattctcccattgaagttgcttcgcgatgggcttcacctgcttaatgtcctagtcacaattggcgattggcaggtgaacctgaatctgcattttaaacaacatatagcaactatcacctagtatgtgttgttagatagcatttctagtctaacttttctctttactgtaatggatagtgaaaagcgaaccttgctaccttatacgccgacctaaacttcgacgttcagtagagaatgtctgagaagatagagctctctcaagagcccgccatcccaactgataccattgctagactattccatacatgctcatttacgcaagatagcactaagatcaccgaggatgccgttactcttgttgaaagatacatgaagctatttatacgcgaagccgtgctacgatcattggaaaacaaggagaaagttaaacaagaaacgagggcggattcttttgcggaaggaccggttctgcaacacaccgatctagaagagatctcgggggtactgatcctcgacttttaggtttcgcttcaaaatttgttatatattaaagtcatactacatacgtgaacttctagtggggttcaactcccgactaagggggagccacgtggtaggctctcgacccgctgaaacttaggcggaatggacgcgcgtaggtcggaggtgttgttatttatatgggggaggacatgcctatgatgagttcagatgtcgatcaagctaatattctgctcgtttggtttgttgctgttaccactttgctggaagccattgccggcattaccgaaaccataccctgtatgggaaggaaccatatttgtactaggcagaccagtgtattgcgtggcaatgaaggggttatgcttcgggggttcattaccaacctgcttgtagccagtaccctgggaattgataaatgtaccagttttcgtgtgttgggctggaatacgagtctgacctgtgtttccgaaagtgtcgagccctgtgccagaggccaacaaagtgttgagttcgctgtacttatctgtgatcgactggttaccagtgcgtgttggctgtaactgcggaccaggctgcgactgaggccgtggtagttgtggtactggtgaagagtgctgaccgggctgttgcaaaacctggggctgttgtttctgctgcggcaaggatggcgatgagctcgcccggtcggggaagccacctgctgtagagatatatggaccagaggcctgcggcccatccgaattcagcttgtgcatattttcgagtgagaaaggattgttaggaccggactggaattgtggctgttgttgttgctgtgccaaaaactgctgctgtgccaaatactgctgttctgctagctgctgctgctgagcgaggtattgctgctgagcataatactgctgctccgcagcatactgttctgccatctgttgcgccaactgctgctgctgctgctgctgctgctgctgctgctgatactgcaagtattcctctagtgaaattgggttcccgaatatgtcatagtacattgcctgcggctgttgctgctgctgctgctgccagagcgccatctgctgctcacgctgctgttgtagttcacgaagcttgcgtagttcctcctcttctttgcttaactgcaaggctacctcgagctcttcgttgtcttgttgctggttagtcttctcgcgcctcctacgctcttcttcttcagcggttatacgcgactcttccaacgcccgctgtaaatctggatctaggtcttctgcgggaggtggcaccgaagcctgcctgttcctcggattgcgcccaagccgcatattccgctcctctcgtagccgttcctcgtccctcaacaaggcaacaagctcacgtgccttaacccgaattatctgcccatgatcaacacccgttgactcatccacatggtagaattccgtcaagcgccggaacaagtacaggttttcccgtgcccagtcaacacacgtctccgcccctgtcctcacaagaaaatccgtcaccgtcaaagacttcgccacgtgcctccaatgcttcggcttatcgctcaaccgtttgtctaacatcaccactatttcgaaaaactccactgcactgtacgagcgctctgcaagttcctccatctggtccatcgacgggccatactcctcgttagaagttgcattgcgaaccagtatctgtgcgggcgagtacccattcaccacgttcttggcactgcgcaacaattgtttcgacatcctgctggctgtgtccgtgctcacgctgtgtcttgtcccacttgtacaagcgccttagttattccaggccaaaccgcgaccagatatatgtccagctaatctcctcagtgaaagtatattcagaacaccgcacacaagtaatatatatgctggccgaacctgtttacaagccccttttcagctatgtgattccagaagtaccaagtacagctttgcataacgccaacgattcctttttaacgactctacataggccgggtaacaaaagatcatgtgatttaatagtcatctttaacgacgatcatgcgtggttatggcagcacgccccgcagaacaagtcgcgttatcgctggtcacgtgacacttactcagttcaaggagtggagaatacgaagactacggtattacatctcgtactatgtgcgagacgattcgttagcgtaatgtcatcattccttcattcgcgtgttgcgtctcgcgtctggcgttacacggccttgaaaagcagtttcgtcttgttacgcgcggcctcactacaaccaatggcagcgtcggaagctgctgtcgcgagagcaaagtgcagctatttaacaggtcagtaaggtttcacttcaggtcaatgtctgctccaaagaagcaggccacattgggccgattcttcactgcgctgaagaggcctcaagatggagcgacggcagcagcgacggtcaagaaatcgaaggtagaggctgccgagtgcctagcggcaccggcaggccatgaacaggacgccgaggtgaagaacagcctccccgagcttgcagataagcccgcgccggggggggtgctgccacaggctgccagcgccgtgccacgcgcacaaagttctccggttaagcctgcagcaagcaccagcgtgatgtatgcagacctgtgcgctgtgtttgaagctgtggaggctacttcttcgaggctgtcgatcaccaagttatgcgcggacttcatgtatagcgtgctaaagtgcgacccagggcacttgatcccggtgacatacttgttcatcaaccggctgggtcccgactacgagcctgggctagagctgggactgggcgagggcatactcatcaaaaccatcagcgatgcatgtggcaagtctgcggctcaagtgcgaagcagctaccgcgagtgcggcgacctgggcaccgtcgcgcaacaggcgcgtgtggtacagccgacgatgttcaagccaaagcctctcaccgtgagggacgttttcagcacgcttcaggcaattgcacaggcagagggtaaggactcgcaaggcaagaagattcgccttatcaagaaaatgctgacggcctgccaaggaatggaggcgaagtaccttatcaggtcgctagaatcgaaactgcgtatcggactagcggaaaaaactgtccttgtagcgctttcgaaagccatcctgactcatgagcacgatggaaaggagccatctccggaacaagttgatgccgcagaggcgcttgtccgtgacactttctgtcaggtccctaactatgagatgataatcaacgctgcgctgcaatacggtataatgaatcttccgcagcactgcgtgcttacaccaggcattcctctgaaacccatgttagcgaaacctacgaagtcgatcactgaggttcttgatcggttccagggccagcgcttcacttgtgaatacaagtacgacggagagcgcgctcaggttcatctgatggaggacggtaccatacggatatactcgcgcaatagtgaaaacatgaccgagcgttatcccgagatacaatttcaccaatttctggctaacccacagactacacgcagtctcatcatagactgcgaggctgtagcctgggacaatgagaaacaaaagattctgcctttccaggtgctcagcacacggaaacggaaaggcgtagagcttaaggatgtcaaggtgcgcgtgtgcctctttgcgtttgacttgctttatctgaacggcgagtctctgttgaagtgttcgttagctgaccgccggaaacatttatattctgtgctaaaggtggtgccaggcgagctgcagtttgcgaacgaaatcacaacgatggagctcagcgagctgcagacgtatcttgaacaatctgtaagcgcctcatgcgaagggttgatggtcaagatgttggatggagaggagtctcagtacgagcccagcaagcgctcgcgaaactggctcaaactgaagaaggactatctagagggcgtcggagattccctcgatctcgcagttctaggtgcatactatggacgcgggaagcgtactggcacctacggcggctttctgctgggctgctataatccagaccttgaggagtttgagacatgctgcaaaattggcaccggtttcagcgaggaggtcctccaatccctacatgcgcagctcaaggacaccgtgatagctgccccccgcggcgacgtctcttacgacgattcaagcccaccagatgtctggttcgagccggcaatgctttttgaggtcctcactgctgacctctctctctcgcccgtatacaaagccggtcgtgacgtctatggaaagggaatctcgttgcgcttcccccgttttctgcggatccgcgaagacaagagcgtcaccgatgccaccagttccgaccagattgtggagttctaccagaggcaagcaaactcttctggctagctgccgtctgtggccaggccctgtcatcgaactgctggcatatttcgcaatgattacttctgcgcctgtcacgccggggtcgtgtgcccgatatatttcggttccgcgacgcataacgtccggaccgatctggtgaagtcacgtgacagatatggacttatcggttttatcggtatgctgacagcctgcgtcagcgagttgcaccccattacccagcggcaaagtgagggaggtaggcttaggcctgcaccctgctgaatgaggagtctgttctgatacccctcagacgtgcgacacgtccgcgtctcgcagatatatatatctcgtatcttgtcagaagagcacccaaaagctggcacatagagacaactcccaaatggccactaagtccgagaacacccccatatatacacaagcgtcccccgtggtgccactgcccacagacaccggggcgctcgccaaccgcattaattttcacactcgtgagttgcatagcaaggcagacgccttcgtcagcgccaagttcgcagttgccctgcggcacccctcgatttaccgccaggggctcctcgccatgtactacattttccgctcagtcgagcagcacattgaccgcctactgcgcgcaccggcgactgccgacgaggcccgcatcggcgaaatcctgcgcgccttctggcggcccgaatttgcgcgcgcgccagcgctcgtgcaggacttcgaggtctactacgcagcagagtacagcacatcggcgcagctgcatcaattcctcgacagctacgagctacccccccggctggcggccgccgtcgccgatatcgaggccgcggcgctccgccagccgtggaccatactggcacactgccacgtgctctacctggcgcttttcgcaggcggccgtgtcatgcgctccgcgctctcacgccagcttggcctcctgccgcgcgccgcaggcctttcggcgcgcgagacccagctccgcggcacccacttcttcaccttcggcgccggcgctggcgaggagaacaaggcccgtgtcgcctacaagcgcgcctacgagctcgccacccgcacggccctctccgaggcagagaaggccgacgtcatcgacgccgcgcgcgcagacttcgaccacatccaggccgtcatggctgagctcgccgtccgcaaccgccaagagctgctcggcagcccgtcctaccgtctgctcacgttcctcggcgaggagtggcgctaccgcacaaagaactcgccccagctgctcgcgctggccgccgtgctcagcgccctgttcctctacgccgccgcccgcgtcctcgtcgcccgtgcataggcacatctattagattaagtatgtacaagtataccctcaccgtccctgcgaaagcttccgccgctctgcgcgctgcgcctttctgcgtttccgccacttatgcttcttcatcttggtccgccgcttgcgcatcacgctgtccgcctccagcggcgccgcttggcccacgctgcgctcaccccacaccagcacggcttgcgtgcacgccactgccagcggcgcgctagctgccgcgcgcatgctgcgtagctcgctccacactgcgctgccgccgcttttgtttaccgccaccgcctgcagcgacaacggccgcacaaacggcacgcgcgccagctgaactgccctgcacatgttccgcactagccccagcatgtcctatgatgcctatagactgccctcgatccttatatgccggctgctgcgccctcgtgtcgtgtgtggcccagtggtccccatcagaacgagcataaaattttccccggcggcgatcgccctccaggccacggcggcgggcccagccgatacgcaaacagcgcgcagcgcgaagccgcgaagcacgggcgcgaatcgcggcccagacgctcagcatgtcgatgcccggctacaagcgccgccattcgcttgcagtgtgtagatctccgtttgtaagcacccgtacaccacgtattattggtatctggcaagggcatcacggcataaaatttttgtatagctgatacgccataggatgacaggtgaggcaggcagccaagtcgagccagttagttgctgagagtgtgatgctagtgtcgaggttgccacagttagcggcgaggccatatgcagtcgggcggggctgtgcggcgggggcgtgcgggcagagacggccgatcatgggattcgtgcggaacgcgctggggttggaccctccggcgtcgccagatgagccaacggacgagaaccggttccacgtgtgggagcagtcgccgtcgccggacctgcgggagcgggcggcgcggatccgggcgttggcacggtgcccggttacaggcaaggacatccggtacagctgcgagcgctcggggatcccgacgcaccactcgcgcgaggcgtgggagcaggacgaggagtaccaccgcagcaaacggtgggcgacgctgcggaaggtgaacgtgtacgagcacgacctgcgcagcgggcggccgtttgcggagtttgattttccgcaggaacagggccgcgacagaatggtgaacatgctgaactgggacctgttcctgtatacgcggcagttctactcaatggacacggatttccagctggcggcggtgacgaagatgctgtcgtacccgatcacgatcgggtcgctgctgcaccaattctcgccgtacgccctggagccgcgggggccgatcacgctggaggggctgaagtctcttgcggcgctgcgctacacgctgtacccggagagcgagagcgcgcgcgccgtgcgctcgaagcccatgcgcattttcatcctcggcgcgcgcgcggaggcgcagctgccggggcacgtctggaagcagctgcagtacctgttccccggctctaacatggagatacacttcatcggcccggaggcgctgtacgaccgccagcgcaaggagtacgtccacagtagcacgccggtttccaagcgcgtggatggcacgctgaagcttgtgcaccacactgactacctccacgtcttccacgaggcacaggacttcttcccgtacgacccgtacaacgacgtgttcttctgcttccacccgggctttgcgtcagccgagggcaggagctcgtggatggacaagaccgtccctgcgctgctcgagaccaagtgtgccatcttcgtcaccggcttccatcgcgatgacatgttcggcgactttgaagcgctgcgcgccagccacgacgcggagatggacgtcctcatgcacccaaccaaaaacatctttggcagcaccaagtgggagctgaacgacatgaacccccacgaggtctatcagttcaatatgtacattgccggtttccgcggcaagcgttaccacgccatccaggtctaatccttcctgtaaatatttttacgtaccatacatctatgtgaatactccgctacattatcgcgctgtagttgaggatgaagtcgcgctggcacttctcccaacgctgagggtcgaagaacacgtacgagccccgctcgctggtggagtcctgcgacacgataggctccattagcgggtccttcgtcagccacaccttgagcgtcttgtggtagcgccaattccgcttgcgcagctccaggtacgtcagctcctgcagaactgtgccagggtgcttgtagaacaggtagaacagcgtctcgtcctgcagcaacgaaatccgcgggtggtcgcgtgccacacttgtgaagtctgtagatgcctgtcccagaaccccgccgatgttgcagaaggactcaggaatgaagaacttgggctccacctcgctgcgcgacgtctccacccacggcgaggggaacgtatcgagggcgtggtgcccgttactcagagccgtattgtatccgtccttgctcgacacctgaagggagtgtagcagcgatgagacatccaccccgagggtcatgaatgcatcgtactgtttctcatgctttatcaccggtagcagtcccttgagcccgtatttgtccatgttgagttgctcgacagctttggagggcgctacatgtggcattgggaccataaagatttttcggcgtaggccatccaatggcaccgacaccaccacttctcgcaaagtatacctcaccagagcccaccaaagatgcagcagaccagatgcaggcccaatatattggtgagtggcacgccagggtgcgggaaatccaccacatgcgagctgctacagcggcacttgccagactaccagtattttaatatcagcgacttcgctcgcgagcacaactgctacgacggctacgacgaagcccgcaaatcgcacattgtcgacgaagaccgactgcttgatgagctagagccgctgctgcggcgcggcggcgcgatcgtggactggcatgtgaacgacatctttccggagcgcctcatcgacctcgtcgtagtgctgcggtgcgacaatgcgatcctgcacgaccggctacagaagcggggataccactcctccaagatcgaggagaatatcgacgcggagatcatgggcgtcgtgctgcaagacgcgctggacagctacgtgcgcgagatcgtggtcgagctgcagagcgacgacacagagcagatgcagcagaacgtggaccgtatcgctgcgtgggaggcaaactgggtgtccgagcaccctgacggtgtgtccaacgcgctgcagcagcatgccggcagcgacgccagcagcagcgaggctgacagcgacggcgtcagcgacgccggcgacagcgacggcgacggcgacggcgacagcacgcaggacaactagtatgtacgctggtatatagcacaaggagcccggtaaagcaccccagtggatcccaggccccaccagcaccgcagggcggctggcggaccaggtcgaggcagcaggatacacccagacacttggtttagtggtagttgcagcgccagcagtgaaaaatttttatgcgatgccctggtggccttgaagaaacggtttcatagaggcagagcaggacccggcagactgtgtaagcggtcgtaaacgtggttaatacggcgagtgcagcagaggcgcggctaagtcgagcataaaggacgatctcctggtggcgatgtactatgtgctgtttgagtgcgatgtcgcgcataaggaggacacaccgaaagaccacgcgcgagtgagcaagatctactaccagctgattcatgagcccgagctactaccattgtacgccgacgcgcgagaaattgaggtgggcggcggcggcgtgcagatggcaacagggcagctggaggccgctttgcaggaagccacggccagcgagccgttcgtgctgtgctctctccactcgacatggcaccttcgcgttaccctcccacgtcaggcacacgacgagggcagcatgctgcccatgttcctggcccatgccaaggtctttgatctatggaaagagtgcgataggtggtgcgctaatcatgtgtcggagcgggcctgcaacgctggcgccaaaggcgacgttgcggagctgttccgtgtgttagatttggatgaacaactggtttcacatgcctacattcagcaggcgactcgagtgcttctgcagctgcacaataagtgcactacggcggaggaccagtctttggtgctaacgcatccatatgactcttatgcagatatgacaagttttattcaggagcggtccgaagtgctgtatatgaacaacctaccgccagatacgacgcaatctgagctggagtcatggttcacacagttcggtgccaggcccgtgggcttttggacggtcaagaatgtggtggaagacacttcgaacgttaacaacaattggtcctccaataactctcggtatgtggaggagcacgacagcatttcaggatttgtagtattccaatcgcacgaggctgctagcgaggcattgaacctaaatgggcgctcgatcctgtcaaatatggccaataccaagcagccgcgtgttgtagagcatgtggttgaactcaaaccctcaagcagccgggttttggactgtgcacaggagatattgtctccatttccacagtccaagaacaagcccaggccgggggactggaattgtccctcttgtggtttttctaacttccaacggcgcattgcatgcttccggtgctccttcccagccactagtgcagtgacggtcagcaagctgtacaagccacagcagcaacgccattatcagaacccacaccacgtcccatcgaaacaacaggtgcagcacccgcagattcacgaccaagacacacagcagcattctcaacatttcaacatccagcagatgccgcagcaactccaaatgcaacagcaagcgcacggtaccgttcaagggggcagtagcatgcagcagtacaagcacaggcctcagcacggcttacaggcgtatcttggctgctaccaacagcagcaggcgaagtcacagcagcagtaccagatgaatcagcaacaggtgcagatgatcgctggcgacgcccagagacggtataaccggtacaacaaaatggtgcagggcaacgggcagaacggtaattcttgtaacggaaatggctccctgggcagtagcaacgtgcccttcagagctggcgactggaagtgcttgaactgttcttaccataattttgccaagaatattgtttgtctgcgttgtggtaatccaaagacggccaatgaagacgagacgcaagcttctcttcagggcctacacagctcttctggccccgtaggcgcccaggatagcgctatcagctctgtaactgtttcgatcgacaggcggtcgaagaatgagctaagtaatatgcggaatggatctaacagtagtaatagtggcaacggtaataatgacagcagtaccaatgaccacaacggttatcctcaacaatcacaccataatggcgcaggcggtagcaatactcattggaatgctggtcccttgggagggactgttaatatttagggttaggtaaaactagtaggcaagattattgcatgaatgattgccaataggcgcacggcataatggagaggtgcctgcttccactcctaaaaagtcaatgtatagagaagcgaacattgtattcacccttcgattatttcaggcaagtcaactggtacaccgccagctggctggctgacaaacgatgacctttgcagtcacttctgagatgtataatcatggctaggtactatacctatagataaaagatggcatgagaacaaagaaagtcaacgagcccgcaagacgaactatcagttctgcaagcataataatggctgctacgtgcgcctacaaactcaagacggttctcaagcagtcaccatggtgaagatcttcgaatccgctgttaatttcctcaaagggcctcttgtgggtgacgaactcttgcaccttcaatgtaccgttgagataatcgcgcactagaccgcccatctcagacctacccttgataccgccgaaggcagagcccttccacacacggccggtgaccaattgaaatggtctggtggatatttcctggccggcagcagcgaccccgatgatgatcgactggccccagcccttgtggcaggcctctagggcgtcacgcatgaccttggtgttgcctgtgcagtcaaaggtgtggtctagcccgccgtccgtcatctcaatgagtctggcgacaatcgtctcgccttccttcaaatcagtctttgggttgatgaagtcggtcgccccaaacttggaggcccactccctcttggcgtcattgatgtcaacgactatgatgcgcgaggcattgcgagccttggccccctgcacaacgctaaggcccacggtacctgcgccaaacaccgcgacggtgtccccctcctggacgtctgcggtcttgacggccgcgccgtagcccgtcgtcacgccgcagccgagcaagcacaccgtctcgagcggcgcctgctggtccacggccaccacgctgacgtcggctaccaccgtgtactccgagaaggtagagcagcccatgaagtggtagagcgtctcgcccttgccgttccggaaccgcgacgttccgtccggcatcacgcccttgccctgggttgcacgcaccgctccacagaggttggtcttcccggacacgcagaatttgcactgttggcactccgcagtgtagagcggcacaacatggtcccctggcttcacgttggtgacgccctcgccgacagactccacgatgccagagccttcgtgcccgaggatgcatggaaataggccctctggatcggacccggacagtgtgtacgcatccgtgtgacagattgccgagttgacgatcttaatgcggacctcgtgcgccttgggaggatccaccgttactttctcgatgcgcaacggctcccctgcggcgtatgcgacggccgctgtacattggatgggctttccctgagtctcagacatggtaattctaacgtagcgtcactggtgacaaaagctttctcggggcttcttctagagtaacgccgaagtggttcacttaaatatcttagcaatttttattaggtagccggcgctcacgtcagcttatgcaggtctaccgttgcaatgaaaacaggaaacggaacgtccgcagccctacgaaagaggtcaccgccgagctaccacagatgtggttaatatactcgagcaccatggccggcggcctctgcaccggctgtttcagccagtgtcattgctgagtaagttgcgtagaaaaaacttcaccactggcacacccacgaaacccacatcgcagaacaaacggtctgcggctgtcgttcgaggcgctttgtagtgacgaggaaatagtagacaggcaggatgttcagagtctgcaggaggctataccaccccaacacgctggaacatgccgttggcaaccgtctacgcccgctggcctacgagcaggattccccgcagtacaaggtgctgcagcgcgcgctagaggcgcacgtgccggtcctgggcttcaacgagcgcgcaatcgtgcgcgcagcaggcgacctgggctacggatccgcggtactctcggcgctggctgcgccgaactcgccagcgctgctcaacgtgccctccgcggtgctggagctcgtcaagtttcacctggtgaccaagcgcgtggcgctcgccgacgcggccgcgcagggcaacgtgagcatggagcagctgttcctgcagcgcgtggaggccgaccgcccgctggcagggcagctgacgcagctgctctcgatcctgtcgctgcccggcgagttcctggtgaacaccgcgatgccggagctgttccgcctgagcgacgacctcatctactactccggcgagaaagaccaccccgaccttgcctggtactccaagcgcgccgccgtcgccatggcgtacgtctccacaaacctgttcatggcgcgcgaccgctcccctgcgctcgaggaaacgctgcactttgcccgccgccgcctgcagcaggtcgatagcctgggcaccgcctacaacaatgtcgaggagttcgcgtggtatcagcttctcatggccatgaacctggtcaaatcccagctgacgcgcggctagactgcccgccgcgcacagccgctacatatctatatccactacgtaccaacctcatccgcgcagcttcaccagcgccgcccttgcgccctccatctcctcctgcttctgcttgatgttctgctcgcaccgccggatctcgccctcaatgaactccagccgcttcgacacgttgccctccgcctcctcctgctccacaggcagcagcacaccccccgtgagcttgtacacctgcgtttcgggctgcagcgcctgcagttcctcgttcacgatcttgttctcctgcagctgcgtctccagcttctgtctggtcaccaccagctcctccaattcgccctgcaactgcgtgtacttggtcgcaacctgttctgccgacatcctagctaccgatactaatgcctaagagggtctttggctcgcgactcgctcttggtcctgcttgtatgagatgtgctgagcaactgaacaatttttcgattatacaaaccattggaatgcatacagcaacagccaaaaccaagtctggtactcgttagcttgagttgggactcgcagcaagtactgagttgtgtgaggatgatagtatgtgactatggggtcgcgcaggcgccgcggaggtagcatagtgcaagttctaactgtggacagttcaaacaatggcaatctgagcgtcttcccagacaccaactggactgcctcggccctatggacccgcattcgcttctcgcgggggccgagccgcaggtcgagttcagcgggaagctcggcgagcggtactcggccgcactggtggtgccatcgacgctgagctggctgatgccccctgagatggtgcagctcacaccggtcgcgcagctagtggggacgctgacgcaagccggcggcggggagtgcgcgacgcggctggtggctgcggatcagttctacgaggcggatgtgccgcaggcggagcgacatgttcgcgtggcgtaccagctgtatgagcgcgggcccgggcagctggtggtggtggtggaggagaatgacctgaagtacccgccgatcgtgcacaaccggctcgcgcagcagctggcggagaagctgcgcgcggtgggcgcggagacgacggttctggtcaactcggacaagagcacgggggtcaaggacctcgaagagctggtgccccctgagtttatcacgggggccctagcggcactcgtgtgtgcgctggcgccttccggggcgggcagagttcttgtggtgcagagcgagggtccgcacgggttcgagaagcataacttgaccgtggtggacgcgctggtggagcgcgtgcgccagatcctggaccagccgccggagtatgtagctgcgtgcacgcgccactggaagctgcaagccgggtcgcagttccagggcggcctctatctctagcggcggcgggcctgcgatatatcacttaattcacatttgttaaaacaagggaaatatacaactataaacgtgaatattactccagcagtggctgatggcggtgagcagtgggttggctgggtaatatagggttttattttcttaaatgtacatgcagaatagtaattaaaacgatcagtttcatttaatccttcttcttatccttcttctctttcttctctttcttctccttcttctccttcttctccttcttctcggtcttctccttcttctccttcttctccttcttctcggccttctcggccttctcggccttctcggccttctcagccttctcagccttctcagccttctcagccttgtccttcttctcagccttctccttcttctccttcttctccttcttctccttcttctccttcttgctgtccttcttctcctcctcttccgactcgtctagctttctcttcttggacttggacttggtggcgccctcggctgcctcggaggcctcctggggtttgtccttgttgaataatgcaatggcttcctggatagcaatctcattcttcaacgttggagagcctgtagcgtagaactcaagtctttgctcgacctgcttcttcaagacctggccgaaaacattggttggatcgtccgagtagttgtcaattctagaggccatggaacatttgttcgctaggtatctagatattctacccttgttcttcgcactggccttggagatgaacccactgtggtagatgagaccgtatttaggagtgttacccttcgtcttcaacgccctgaacagcgccttctcggcaccaaggatctggacagtcgaggcagcttgcttggacaggttggtcaaggagccggcatgggaaatcaagcgggcaccaataacctcgccgataagctcggacaagtttggagccacagtgtgcatcttctcgcagaggtattcgtacagttgtcttctgtattctaccaggttgaccactctctcagcaaagacggacacgttctccatgtcaacttccgataggtcctggcccatcgagattctggcgttgctgatgaccctttcagcgattccagcgtcctccccaagaattgcggacaggtcatgcagcgactcgtcattcagcgacgccttgtctctaatgaacaagacaagcttcgcaaatttgtaattgtctggcaccaacttggccaactcagggaagtgccagccgtaccactccttcactctcatcgcaaaggtgttgatgtccttgtccagctggtctagcagcgcaatcgcctggataatgtggttgtcgttcttctgcacggagaacttcaccttagcacgcgagtacgcgtgacccagccccagctgcgcacgctcaaggtcgccctcctgcagatccttcagcaacttggcgccgtgcaatctcacaccgcgcagcaagtcctgcgccaactcgttggagatacagtccacgtatggaaactcctccttgatggaagggcccaggttcttgtccgataccgccagcacaacagacttcttggcagagccctttggcaagttcaagtcaagcaccgcctttaggtgctctgacagcaatccctccgagatatcgttggcattctccagtgcgtgtgctgctcccttgaaaggcgcaaacgacaccaactcaaccaacttcgtgaacgacccgaagtcattgatctgtttctgtacttccttcaaccgcgacccgatgtcatcctgttgcagcttgaccttgaagataccgtatccggtaggttcttcgaacaatagatattcgataggagccatgataatcctgaatgatttggggtgtcggtctatgtgtccacctaaaagagacagatacttctttaatacgtgcgctgagctctaatgttcatcaccgaccatcagaaaatttttcagacgatgagctaaaaaaaaaagaaacgctttcgcactcgagcgtctctcgagagccccgcgatgaggatttggagccttacatattcgacgaatctaagaactccgcgaggacttcatcggtctgtgaggcctactgctgtgtctacaactatacttaatatggggcagccctttgtaggtcgcgccccagccggctgccccgccatcgcagtctgtactcggcatgatggtcttccatagtacgcgtgttttatttagcattggtcgcaggaagccctctgtaaacatattagagcaatcaacgcggaatgggcccattgcgcgcaagaagacgcatacgaaccgactgaggaagctgcctttccaataagtgcatgttcccgccatgccagcgaacgctcgctgaggccgcctaaagcggacccgagatgttattcgcattctatggttgccattacggcctgtggactgggatatatccgcgtcgcgcacgtgctgtgcttatgtgatgtatgccatttgtgtgcccccactcatcaaaagcgcaagtggtttagtggtaaaatccatcgttgccatcgatgggcccccggttcgattccgggcttgcgcatctttttgctcgcggtatggctaactattgaaactaattatggaacaactaaataaaaggtctttatacttactggtctagttcgggatacttgggaggtcgtatcaagtctcgctgcgtattgtcggcaggcgtgctctcacggtcctcaaatgggtttgaatgttgctcactgggagaccagataaaatggtcctccaattgaacgttattgtcaattgaccgctgagctgggctctcggatggggtgcgcattatcgccacatgcattcttggaggtggtggaatgggcgtacgcggccgcgatggcgacttccgtttgctcatgacatacttccagcgcgtcacgaccatctccaacgcatcgacgttacgctcgttctccaaaaatttgtctactttactgattgtgtacaaccatttgacatattcgtcgattcctaggcactcacgcggattatactctgtgtagagaggaatctgttggaggatattggagaacttaatgcagccatagtaggcgttcgtcatatgtacctcgcgcacaaaccgccgatagtttagccgtctttgtataattttagccacgtctatcgtgtttagctcgagattgaggcctacaagatccacatcaacatcatagggatcagctgggttgacctgcatgtaattggcaaccaagtttttaattgataaacgaccttcccagatcttgaaagagacggcaccgtcgaaagaatgcattaatttcggtaggagagagaactcaagctctcccgtcccatcttggtcaaacttattccatgcctttttaaattttcgtagttcgtctcttctcgcaacatctttcttgtctccgcgatgatacacgtagctgaagttttcaatcactaacgagatgaacatgttcaaaaagatatacatagaaagaacattccatgacatcatgagaaagtatgcgtacggtttggatccacagtccgtatacccagtctgtgggtcaataaaacaaaacggttgactgaccgttatatcatgcatgatatagttccagctttcaccaaagctacatctgaataagacaattaagctcttggctacagtccggaaatttagattacctgtggtgttagttccaagacgggtcaatccaaagatttggttcattgcaatggcatacacaaggaaaaggatgccccatgtgtaggttaaagaaaggatggagggtaagcttgccactgcagtattaaccagctcactcaaaatgtcattatgaggaataacaaacgtgaatacaattagttggaaggcggcatgtatattcgaaagcccattgtcgccacggtaataattgtacgtgatgttgaggagaaagtagagcaacaagaccaaaaacctgaagacatcccacccgttagtgcgcactagcttaaagcccttgccgtaaatatacagtatctcttggcagagaaatatgcttccagttaaaataaacatcaaggacgcataccctttaagagctgctgactcgtgatatgaccgcaacatgagagttaagatgtgaaggaacatcataacttgtaagaatgcagcataccaaaagtaatccatttcaactgctaatttgtgacagaaccttctagctttgctcatttcaaaaggatcgggtgttgcttccggctttactcgagaaagcagtttcttcacctctaaccaggacttctcctccacggttaaaaacgcactaccggtagttttggcatggttactgataataaacgacacaaagagagtcaatatgaagaccatactcaaaaagttgaacagaacgaggaaaatcccattttctgttgatgcaaatggcgaacgagtcattcccacaccctgggtactcaccaaatccactaacaagtcgacccatccctctaaagagacgatttcatacaaggtcctaaatgcgctggggaaattgtccatattgagcacaggggagtggtatacccgaggcatgagaacttcccagttcccgacagttgagctaaactcattgtaacattggctcattcccgcatcgccatcattgcacactccaagcattcccctgaatagcgataacccccatacggtgaaaggaaataacaaacttagagcaataagacaggcaccagcaatctttgttataccatcaaaaaacacttgtttaaatgtagatctagctgtatgactgatggttagaaacctcaacgccctcagtgcatctaaccctctgaaaagtctgggcaagttactactgctctgtaaccaagacagcagatcaatccacatggaaattaaaacaaccaaatcgatacagttccatggattcatgatataagcattcggggagtataaaaaaccatctgcaatggtctttatgagaaactcaagggtaaataaggcaacaaacgtgcactcacatacgttcagccacgaccagctgcctgtctcataccgcatacgatataaaggtgtaacgtagcatgaaaacataaccattaagatggtggcaacaaatgttatggcaacaaaggtgtctctcttgatatgataaaagtacttgtttccccggtagatatcggttgtatcttcgtagaattgcttgccgtcggtacgcttgcccacactcggtggtacaatggtctgacaaaatttcctcaatgcattgttaggcggtaaaatgaagaaactattattgaatgtagaatgcgttctgaggaactgcaacttttcttcctcccactcattcaactgaagagaatattttttattggtctcactcagctcgtttgtctctgcaaagacaacgactggctttttaaaaaatggattagcttggaaatactcgatcaccctgaactttttcatgaagtacatggacatattgaccaaatattgttgaatccacgcagtattccctgtttcttttggaattcgctgtaattcttcgtaattttgtgatatcgctaagattgcagtaccgcggaacataaactggcggaaatctctagttgtctcctccaccttacgtcccagaagttttttcttaatccttgaaattaaagttgcgttggtatactgtttgatcctctcaggatacacatgcttcaagtaatgtctgatttgtaactttctcttgtcggcctcctcaactcgtaagctctgagaaataacagcgatgaaaatatttagcaccaccgagttagcaagtacgaaccataacatgatgaatccagcaccgaaaaatgcatatattgtatttggggattcttcctggagaagatataagatgctagtccaatcctccgtagatccgataatgaaaagggagagaaatgtatttggcaaggagtacattgcaaaaggctcctctgccatccgatccagcgccacagttccttcgaagtagacggaaatgatgagcgatgctaggaataaaaataggaagtagaacccagacaaattccatatcataagcgcatttcctaatacgcgcttccatagatttcgggttattttgaacgcgagtacaacgcggtagaatcttgatatctggaagatactgagccaataataagtacgccccaatttatcgtgaaccaatggttgtgttataattatcgaaataatggcaacaatcagatcatatacgtaagtaggttttgccaggaacttccaaaacgctggagcatataggaaaagtcgtatcaaagtttcaatcataagtacaaaactgagaattcgctcaaatttgtaggcgagtatcatgttgttgtcgtcatacgctcgaacagcgccatggataagtaggtcgacaaatattagaagcacaaagatgaattcaagtttttcgtatacttttatcaccttcttgaatatcaacgggaggctggactgtccggccttctgcttaatgttattgcatatctgcaggatttttctcactataaggttctgcatggactttgattctttttgtttttgatacaggagttcattggctatttcaaaagaagagtatagcaccgcgaccaatagattcatcatccacacggtcaagaaaagagtcgatatgataaaaaataaggaagcagccatagcgtctgtgtccatggtgtaatacatgaggtctgtgaaagtgttcgcgctcattataatgaaaattaactccatggatgaaatgatattgtcaaagctgatcctgccatggtagggattcgcatcagaaatgcaccttgaataccgagggcatatgaaccccttagctgcaggtcccggagtcccatcggcaaatatatacggcatcggtcggccactttcggcatcatagtggccaccgcagaactgcatgtcatagttgtaggtgtttgatggatcatttggatcgatccaaacgcattgtctgcgtagagagccctgaaagctctgcactccaaggatggcaaaaaacacccaaaagtacaacaacatgaaccccacattgatcaactgcggtaacccgtacttgatactcttcaaaatggacgataggccggtgtcggtgtcggtcaacctcaatattcttagcgtcgccaaggtcttgaaaatgcggatgccgttcttcaggtcgaaattgttgaaagataggacgagcccgatccaatagcacacggtcgatatcagatccatgcggttccagctattccgggcaaaagccctcggcatcgtgatttcgcgcttctcgaacgagctcgtgtaggagatcgagctcagtttcttccgcgctctctcggcgtcctgcgagatcgccctaaagggcacgaccttacgcatgaattcgtgtccgtacttggattccaaccgcctgtagtacttcccaatgccaaagtactgccagaacgtcatgtagtcctggttgtgctcgcggaacatctgcgagtcgtcccaaaagccaaacgcaatgatcttggcgaacatctcggcggtgaacagacaattgcagagaatgaaggccgagtccgaccagttcgcgtagttccccatcgtgccgcttgcctgcttgttgtactgtctgtaggagagacacacggtgtagagaatcaagagagcctgcgagagcatagagtatcggtagtgcatcaaccaccgggcaagcctcagtcgcacccggttgtccggcgatatgaaccccatcgaattcccgtaaaggcgcagcggctcctgctcgaccgtcacctcgcattccgccgtgcccgtgctcttgcgcgagccgtccgacagccgcggccggccctcgcccttggccagccccggtacctgcaggtgatcggtcttcgccgcgtccccatccttgcccgcgtgccccgccatctccacaagctcgatctcctcgaagtgcggctcgccgtgcgccacggccggcgagaggtacccgctcgagtacgcgagctcgtcgttctcgctcgcagtgctcaccggccgcgacccgccctccgccgtccgcacccgcgacaacttcggaagccacgtgtggtcgtgctcctcctccatcgccgctatgaactcgccctgcaagttaagaaaatcatccacctcgttgtcctcgatcatcgagatcacccgcgcagaccgcggcggctccatgctctgccgcaccgggctcacgtcgaagctgcgtgtcccggacgccgtcccgggcaccgggctcgcgctgccccgccggctgcgccgctcccatagttcccgcaggtggctccgcacgctcagactgctcgcggtcttgtgctgtccgcccagcccgcttgtctgcaccgtcagctgcggccgtaccgcccgccgctcctccccgtccgccgccgcaccccgtgtcggcgtctccacccggaacagccccggcatcgcgcgcccacccgcgccctgctcgtcctgctcgcgcccgtccgccatcttgcaatcctgctcggctcctgctcgctctgtccgcgtccgccactgctctgcaacgctcctgtccctgctctcggccgcagcgctctgtgatgtcgagtgcttccgcagatggccagcgcacttatgtggatttgaaattcatcaccgcaactacggtcaagtccacagaaacgaagctccgcacacacacgcatagctacaccactcatcctccaatggtctatatatactggcctaggccattgctactgatgcaccaccgctcgcaaaagctagtcgtcgtggcgtacgcagacaagggcgcagatcctgtggtgctacatttgatcaaagaggacatctacaggcccgtgcaggcgccgtacgctcgcatcgggaccgtggactgcagcggcaacttccagtaccagcgggaaggcggagcagcgggcgcagagcgcgcgatggtcatagagttcacccccccgaagctaacactaatgcagtttttttcgatggaccccatctcgttgatcctgccggaaaagctgcagacggacccgttcgtggacgagccggacgggcccaacaacatgctggagctcctcgccgggggcggggtgagccgcacgcggttgcgggggacgttggacgtggtgaacatgtactaccggcacgtggagcggttcgaaaagcagtacccggagtacgcggactcgcggatgagcctccggcagcggtgggggcgggcgaagcggtggctgggcgggacgtgggcgttccaagtgatgtgcactgtggtgttatacgtggtgatgatggtgcgggtggtggcgggggcgatcacaaccatgttgaactggcggcacctgccgctgatcgcggtgtcgacgacgatgcagcagatcgacctccgggcgcagcagctctgctacatgccagtccagtacctgcggatccacgggcacatggtggcgccggcgggggagccgcggatgaaggcgccgggcgggcgcgggcggcggcgcagcgtgtcgttccagacgttgccgtgcgagttctacccggactacatccgactgtacaacacactgtggctcatcgcgaacgacgtgtcgttgggcgtcacgttcggggcgctcttggtggagaagcgcgagccgctcgcggcggcgctccagcatgtgctccgagcggcgttgtacgggctaccgatgcggatcacgcgcttcctcaacgagagcccgttcgggatcaagctcaatggcgagctctcgaagttcttgagcgagctgttcacgtggatcatggactttgtgttccggctcttcatcgtgcgcttcaccgaggtgccagcgctcgagcacgtggtcatggtggtggcgcacgtgtcgtcggtggtgggcgtgacgtttgcgttggcgttgatcatcgacggcatctctgtgttctcgttgcacatctcgttgttctacctcatcagcgcgaagttgtaccgctggcagctccacgtgatgacctccttcttctacctcttctgcggcaagaagatcaacgtgctccgcaagcgcattgacaacgacacgttccacttggaccaggtgttgatgggcacgcttttgttcatcgtgttgatcttcttgttgccgacggtgttcgcgtactacttgacgtacacgctcatctgcgtcgtgttgaccatcgtgccgctcttgttggaggcgagcatggcattgttgaaccacttcccgctcttcgcgctcctcttgcggctcaaggaccccatgcggctccccgggggcatttacttccagctgaagcacaaccgcttctcgctcaactccaacccattgaaggtggcgatgatgttccagccctacctggagatcttgacgatcatccgtgacaaattcatgtcgctcaacaccctcagcagcatcatcgcaggcgaacccatcatggtgcacagactctacctctaccaggtcctatactcgtccctccccataaggcccatcgacgcgaccctactttggacagagctccaacgactaatgacatggaaagataatcctttgtactatacgcatatctaatctgacattctatttacaggtgtccacacactcctgccggaaccgcgcccggctatttccgcttcttcttggtgtccgtagatgcctccttcttcttggtgggcgcacccttgcctctgcgcttgcgcgagtccaccatctgcagccggtactgctcctcggggtcggtaaacttgaaccctgggtacagcgacttgagctgtctgaaccggagcaggtcggggttcccgtagtactgcaccatagcagggcctctaagccgcttcgtcagtatcttggtacctattctagcgccagatgggttgtagcactggtcgaatatccgcgcagatatctgcgccacctgctgcagcctctccttcggaatcgacatcacgtcctgcacccagtagccttgcctcgtctcgaggtgatgctgtgccataaccgggcgctagcaaattttgagccagctgaggggcgcacttccgacgaagtccaccatcaggccagccgatggaccaaacggcgcagagtattacgacctctaacggtaaatattcatcatattatactgcgtttatataattgacaaagagagatgaagcgttgattatacaaagattctgttaaaataggaacggaagtgtggtgtagtggttaattaccaggaagcaacctcttcggattgaccctcagcccagtcagcagcctcggtctgctcctcggcagcaacctcctccttggcctcgtcgtcctcctcaccggcagcagcctcctcagcagcctgttgctcgatctcttctgggtctctgtagaagtacaagtctggcatgatggaccatggctgggttctgtcgactagagcgcctcttagtctcaagacttctctggccaacaagtaccagatcaagccgatggagtgcttgcccctgttgttacatggaatagcaacgtccacgtattcagatggagactccaaatcggtcaatgcgatgactgggatgttgacgtacgacgcctccttgatggcctgggcgtcggatcttgggtcggtgacaatcaccaatcttggctccttgaaggatctggtgatgtagttggtgaacgaacccggcgtgaatctgcctgcaatggccgtggcgcccgtgtgcgcggagaacttcaagacggctctctggccgtaggttctggaagagatggccacgacatcctcggcgttagggatggcagcgatgattctggcggccaacacgatcttttcccaggtctttccgatgtggatgatgttcacgccgtccggtctcgtcttgtacaggtatggctcttggtgcacctgcggctgggttagtacgggtcctgtggctgccgctcgcggccgcggcgcatgcgccgcgtgtcgcaatcggtcatctagtcatctgagaagcacatacttgaacgttcttggagcccaagtggacgttagcggccaacaacaactgggcgtcttctggagtcaagtcaaaagtagctggtagggacatattgctatcgcttcctgaaattaatacctgggatacctcttacttctgatcaggtcgttatgtataactacactgctctagatgctactcaaaaaccaatattttttcaccgccccaccgctgtgcgccgcccgcgcgcctcgcgggcccgcgcctgcctggccgccggaacgccccgccgccgcggcctgcgcgctgccccgcccgcgcgtgcgccgctggccggcacgcgcgctgtgactgtcacgtgcacaaaacttttagtgtgtgtgtgggtgcaaaaactttcgaatgtatgggtgttagtcacaaggctctggcacccagatttttattaggaacgaagcgctcagaagcttggcaccgctcatggcttcccacttctagtcacagggggtcttctggcgatgaaccgagtgctttgaagtcgacaatcacaaggtagcctgaaactatttagctgccttttggacaggtcggggactgagcggagttgtcaaggagcagcatcggagggacgcaaatgggaggagcatggcaagaagcggtggtgcggtctataggcgcggccgatgaacggatggtgcggctgtcgggctgggcgagcctggcgctggcgctggggttggtgtgcgtggtggtgccggttgtgaactacatgcggctgaacccgtgggttttcagggtgatgcaccactggcggcatcacgtgatgcggcggcacggtgcgatgtgccggaagttggtgcagcagcggacgctgtggctagcgctgctgtggtgcatgttgggcggggcgtgcgcagtggtggggagcgcggacgtggtagtggtgacgaagcggctggggcgcgtggcggcggcgttcatgcctgcgctgtttctgttgacgctgcggccgtcgccgctgccgtatacgctgtacctgtcactgctgccgatgcacaagtggctggggcgcgtggtggtgctgcaggcgacggtgcacagcgcgctgtacacatggtactttgcgacgtcggggaagatggcaaagatgaaaaagacggcgaactggatgggcgctgtggcgctgctggcgtttgtgctgatcgcggcgacatcgctgcctgcggtgcgcaggcgccggttcaggaccttctactacgtgcattatgtggggacgtgggtgtcggtgcttgcggtgcatgtgcactcgcggcccccggtgacaacgtacacggtgctgaatgtcgcgctcctgctataccaggcgtggtatcgcattagcaggatgagcacgactaccgtgacggtggtgccgatctcgacgtcgctggcgctactggaatttccgctagcggatctggtggaaaaaccacagctgccttccgggcacgtgcgcatcaacctacgagcgccaagcatcttggggagagtatttcagcatattatgccgatgcagcatccatttacagtcgcatcgttgccaacggatacgacggtgcgcctgatcgtgcgaaagtcccgcttccccctggtaaacaatgggaagtattatgtgaccggagccttcgagcccaaggttgattttctttctcaccgaaaacggcgcatgcctggttcatgggctccagaaccggcttctccgtttcagtgtcagtcgccgtcactacaatcatctcctctccattataacatcaaggcatcgagggtgcttatggtagttggtggcagcgcaatttcgtttgggctgccatttttgcgtattctgaactttaacggtgtgaacgtgcggctaatatgggtctgtcgagactaccacgatttgcgtatcttgagtcaatttagaagcaatttcaatgggctggaaatttatgtgacgggtacaaattgtgaagaacaggatcttaacatagattacgtggactatgatgaaagaagttctgagggcgagcgcgatcctgaacgttgtgcgttgctctctccaaaagccagcgaatataattgcctgactcccacgacaggtgggagcacgttatcgggcagagacgcccataactactcaaccttccagaatcgatgtcacagctgtaaacatcttgaccggggttgccgagatttggaggatcatgcaatagctgacatcaacgatgaaattgattttacagatttcttcagtacccgccacagcacttctaaataccatccaaaggaaaactccaagttgcctgttattaccaaagactctgtttttcgcaagcctaactacgtcgttcctcctgtctttgataggtacgatctaaaaactggattcaccacatacactacgagggaaaagctgagcatccccaccggagtcaaattattttttggtaggccagtattgtctcccagagattatcactggtgtcttcagaaagagtgcattgggccatcagaaactaatgaatgctgccgggcggacattgcaaatagtacccatgttgatgatctagctcgcgtatgggttttggcggccggtccccaagcattggtagaggctacccgtatctgggctagcgatggaggtttgcatttccatgaggagagcttcaaagtctgaatcgtcggctcgacttgggttttaaagtctgttgctttgtcgatctgggggattatatccgtttaaagtttttatctattagctgacgaaccattggcagtattttcaagatcgttctgggagcggcgggcctgagccagcagctcacgacaatatagtcttccacacttcctatgttcccgcggctatagacaaacttagaacgagataaggaagaacgagtacagaataaactgttccgtgatggttttgaccaatattaaatcctgcttgtgcgctggccgtcacaattttcatgtgctatgtaatcccaaatataaaccaggtagagcatatccccttatggaaggatattggtatcttcagtcaccgtccacaaaagatcaacgtgtctgcttcaagtcacaactgaaagtcctgggctctggattcttatttggaaattaccagttgcagcgcgtctacttcacaatcactggcaacctccggtggcagagatagtgaaatatggcagccgcccagtggagtggatatgatataacatgtaaatgcatttgataaggtttgaccaccccggaacaccgcatcagtcacataataagtatcgcttgtagatgtcccaaatgcttggaaccctaggttggttatttcaaatgttgaaggagggtactttagttgcgacagcgaaatgacaaagttcttaacatccaccaactccaagagtttgcatttctggatacccacctctgtatctctattgcggcctaggtctttactaaactcagacgcaattttccatacgccctcatccccattgtccacgttgtactgtagagtagatcccttgacaaagaggcccaaccgaagtgcagatttaggatatgtcggaattgcgcgcgagagctgctgccttgtattaaatggcacttcaaccttgactacagagccagtagtactactctttttagtgaaatttttgagccataatgtaattatagctgcaaaccatgcagttagtgaggtattgtgttcccggcaccacttcacctgctgtttcagctgatctggggctatgcgaaggctaaaatggcggttggtatttcttatccttctggaattgtcatataggcactcagggaaggtgtagcgcttgaattgaaagcaggagtggctgttaccaagtgtaggaatatagggttgcaggtatatgtgccagatgaaaaggacgatccgcaggattttccacgccaaggaagagggccacatgctgtacggatgtgctggcatagcgtcgatcccgtctccaaagtacagcactccgtcctggtctgcctgtgctggtgagtggtcatcgctattcaattctcgaaggacgtcctcccagaatagggcaccgctcatgccatctagaatcaaatggtcaaaacaaaacaataactgctggcctgcctgcatgctaacaattttccacagcggacactggcagtgatacttgaaattgatatttttgaatatccaatttgatgcgtcttcatccagcttgtcggactcggccaatccaagtacatcgccgatgtaaatcttctccgacaatggcctgaggcaaagatcccctgacatatcatcgtagaacacattactgtacaattgcgggtagttatttactaccttccgcagtgcaatttctagcttggccctgtctaagggtacattcaacgttacgccgacaaaaaagcacgagtataagccctcggtatttttgcgataatagaactcttcgaacggtgtcactcttctcataacggattataaatcactggccttatcgtgtgcttctgcaaggctcaacactttgggcctgtaatgacgttgaaggtgtgaaaatactttaagcgagctattttatataacgtagatcagaatatatcataatagtgcatctttctcaggagattgtaggccatcgcatataaggtataagggttttacattttctgcccatgtctcgtggtcgtttaattgcgactcggcgtggcacagcagggggtttcactacggcacaatgtccgctagttctgccggattcctcatctcaatcacgccctttattccagagatattagagcgtcgcggcttcggctagcctagttcatgattcccaaatagtcatcaatacattattccaagcggggatcaaaatttgactaatatcaactacagacggaggtaatagtctaatggagaccagcaagatggggggaacgtaattagacgatatactgaaacgctccgatgcattccaagtagttatttagtattatatacagagagctcgctcagtgttcgcctacatcaatgtcgttcaagcccaggtcctcgttttgctctgcagttctttcgtagtcctcgatggtcatgttagggtcagcgtcaggtgcatagacgttctgtatgtatgagcctgccaatggatcctccatgatgacagtgaactttatcttgccgtcgatagcctctcttagcttactgaagaaagaggtccatctgtttcttgtggcctcgtccatcgaatcggatgtctgcgtgaagacccgggattccaactcttcatatacctgtgttagcaacccttccagagtggtgaacttgccaccgagagttccctgctggatgtccaagtgcagctccgggatgctaacggaacaggtttcggacttcaagatgtcccgtgagagatcctcagcatcatcacagatcagtgtgatctttctgcccttatcagggatggcaccaccggtcttcacctcgtttgacttgtagccacagtgctcgcagaccgtggacatgatgatgacctctttgaagtgtgggatgttgaccggcttcatatgcgtgtcacatgggtgaacacatgatgggcacgtggcagtgaaggtctgcacctcgttgtggaagttctcgatatccgtagcgtcagataagagaccggcctgtgccgcttgcgatttgttgcgctcgcgctgcgacagctccgcgcgcttctcttgacgccgttgctccaattggtcgcgcgtaatgatgcccacctggacgttttgctcatctgaacgcaggtactcggttttggaccattttggcgcagcttcgcctggcttgtattcgatccaggaattgccagcagggtcgtccagcgtaaaagtcagcggtagagtgcccggctcgcacgacagcgcagcgcggaccttggcaatgaactgcgcaatctgatcgtacaggttctcgtccacttccttccgcgccgcctggtcggcgtccaggtcctcgatcatctcggtcagcaggccctccacagtcgtcagctggccgcgcttgggaggaatctccaggtccaattcaacgaagcgggaggccgcagtttcggccttgatgacctgcctgtcaaaatcggccttctcctcaaccttcagctgatagcgggcgcccttctcctgtatttcacttgcaggctgaatctcggaattcttcagcccacaatgagggcactcaaacgacatgataacaatctcccggaaatatggtatagatgtcaacagcagtctggtgataccatcctcatggcagttcatacagagcgactctatctcctgcactgggtggcccatcgcatctgcggccccggtgtcgcgaagcccagtctcatcattcacggtatcctccacagcttctccaacgggcttaaatagctcttccttagcgctctggtctgtcatcgttctgctggcgttcaaacaatctgagtagcctagatgtctgcgctataaggtaggacatcttcgaacagtctttaagaatgacggaaaattttttctacgaaactaccataagctcaacgtttaatgcatagagcactgacatctgtgacagctgcccacatttgcatatatcacaggcattaagttgtgccgcatgtagctggtcccgggtggcctcttgtctcttgtcgcagtccaaggctgcctgcacgtagtcctgttgcggcagaaccaacaccactgccgtaagggcgccataggtgcagagcatccaaagcggctcggtggaccgcacgcaccgcctacacaacccgtgataggggattgtgccttggtaaatggcgatacgtctttggtctttggcgcgcggtgtccgtcagaacatttttcgagtggtataccaggaacgagccagacagctcatcgagtgcaggcctaatcacacacaaatgccgcgagatccgctgataggaatcgttggcaagccctctagcggcaagtcaacgacactgaactcgctcacggacgccagcgcagccgtgggggcgtttccgttcacgaccatcgagcccaaccgggccacgggctacctacaggtggattgcgcgtgctcgcggttcgggaagcagtcgctctgcaagcccaactatggctggtgcgaggatgggaagcgccacgtgcccatcatgctcctggacgtggccggcttggtgcccggcgcgcactccgggcgcggcctcggcaacaagttcctggacgacctgcggcaggcagacgccctgatccacgtcgtcgacgtcagcggcaccaccgacgccgagggcaagaccacgcgcggctacgaccccctgcaggacatcgactggctccaggacgagatccgcctgtggattgagggcaacctgctcaagcgctggggctccatcgtgcgcaagcacacggccacgcgcgcgtcggccgttgagacgctgcaggcgcaattcggcggctacggcgccaacgcaaagctcgttgcccgtgccctcgcactcgtgcccgacctgccgccactcgagcactgggacgccgcctgcgtcacacgcgtcgtgcgcgcctttatggccgtcaagttccccaccgtcctcgcactcaacaagattgatcaccccgacgcagacaaaaacgtctccaagatcctcctgcgccaccccgacacgcccgccgtgctcacctccgccatcaccgaggtcttcctgcgcaaactcgaccgccagggcttcgtgcgctaccagcgcggcaccgagttcgtagacaccgccgaggacgaccccgccctgcgcccgctggacgaaaagctgtcccaccgcatcgagaacgtccgcgacctgatcctctaccgtttcggctccactggcgtcatgcaggtcctgcaggccgccgccgccaccctggacctcgtcccagtctacaccgtcaagaacatacataccttcgcgggcggcagcggcccccacgtcttccgcgactgcttcctggttaagcgcgggacttctgttcgctctgtagcccgtctcatcatgggcgacgtcactatagccgccattgagaccgttggtggtgtccgcgctgcggaagacgacccggtcgcgcccggacaaaacgacatcctctccttcaagctggcgccaagaagcctgtgactctactcggtggctatctatcaattcgcccagataaggcggctagggcccatttggccgcgtgatgccgcgcgtccggccgggtgcctcaaaaatgccgttcgctcaacgatgcggggcacctccgttagaatatgtaacggatgtaatcttccgcatgctagccgtgctcgaaggcattcggggcctcttatcgcaacgtaggagccctggacaggtctccggatctttgataaacatacgtacggtcatcacggaggcgataagggcgccctgcgccgcgaggggagggtttagtgcggcatgcagcccagtcgggtgattaatcgcggctcgcgcagcccgatgtcacagtcggacgctgaacgggctgaggcggcccagcagaagtgcaacggcactatcagggtggggtcagtcggctccccaagcagcgcgcgagacggcgggccaatatatagctgtgtccggaatagggcgtcgcagcgtaagtatatatagcaaggctatacggcgggagcttgagtagcatagataacagctccgcacttatggcggaagagaagttcgcacaggcatcagaggcgtccacgctggacgagttgaaaggccccaagctggccgccgctggtgagggccgcggtctgcggcatacccacagcagcacagaccaggaggcgcagtccgtagactggaactacgatggcaagcacgagggcatccggctcaagaaggacctgcaggcacgtcatgtgtcgatgatagccatcggcgggtcgctagggaccgggctgctgatcggcacgggcagctcgctgatgcgagcgggaccggggtcgatcctgattgcgtacagcatcatggggtgggtggtgttcacagtgatgtcgtgcctgggggagatggcggcgtacattccgctggacgggttcacgtcttacgccacccggtacgcggaccctgcgctgggctttgccgtggggtgggcgtatctgttcaaatacctggtgctcactcccaatcagctgacggcaggcgcgctagtgatacagttctggatacccgccgcacgggtcagcccgggcgtgtggataacggtggtgctggcggtcattgtcgtgattaacacggtgggggtgcgtttcttcggggaattcgagttctggctgtctagtttcaaggtgctggtcatgctgtgtgtgatgatcctgctgctcgtgctcgccctcggtggggggccgacccatgatcggctgggattccgctactggagtgaccctggagcattcaaagagtattcgaagaaagacacgcacattaagggcggcctcggcaagtttgtggccttcttgtcggtgttcgtgtatgccctctttgcctacctgggtaccgaactgtgcggtattgtcgctgcggagtgcaaagacccgcgccgcaacgtgccccgcgccatcaaactaacgctgtaccgtatcgtggtgttctacctcgtcaccatcttcctccttggcatgtgcgtcgcttataatgatccccttttgatgcaggcatctagtgccgaagtgtccgcggctgcatctccatacgtggtggcgatcgagaatgctgtcattcctgtccttccaaatctgttcaatgcctgtgtgctaacctttgtgttcagtgcctgcaattcggacctgtatgttggaagcagatccctttacggcctggcgatcgacgggaaggctcctaagctctttgccagaacgaacaaatggggtgttccgtacaacgcccttgcatgctgcacactgttctgctgccttgcatacatgagtgtctcgaagtctgccaggactgcatttggctacttcgtgaatgtcacatccatcttcgggctaatgtcgtgggtgtcgattctaatcacatacatttgttttgacagggctttccgtgcacaggggataccgaagtcgacactctcatacgtggcaccatgccaaccatatgcaggctgggtcgccctgattttctgcatcttcgtggccttgattaagaattttgatgccttcataggcaaggaggtagacgttccgaccttcatcacgggctacattgggcttccaatttacatattctgctttattggatacaaaatagtgcacaagacgaagtggataccgtcaaaggaagtggatctcttcacatttaaagaagctattgacttggaggaagaggagtgcatcagagagcgcgcattaatgaaggagcagcttgctaagggtgggttgtcatggaaaaagatatatgacaacgtgttaggatggatcttctgaatacataactgtaactgtttggacgctcctatcatgtggcgctaatactatcatgctctttatttagtaggaggctcttgtatgtaataagcacttaaatccgatcattagcaagaatgcacgcccagcgccatggcgtcggtggatgtaaaacattaaatcgtaacatatattcaatcatggttctataaacattatctatgggatggttggtacatttactcctgtttggcgttggtagcagcggtcaactcagcctgcttgaccaagttggaaggagcgtccatgactggcaacatgacctcgatcattctgatcttcgagttctcgttgaaggccttgtcctgggtcaaagcgtcccactcgccagtggtggaaactctgacagcctcgtagtccttggcaccgaaggttggtagcaagttcaagtgttgccatggctgaatgtcgttgtattgagcggtctcaccgtggatcaatctctcgatggtgtaaccatcgttgttcaaaacgaacaagtatggcttcaagccccatctgaccatggtggagatttcctggacagtcaattgcaaggaaccgtcaccgatgaatagaatgactcttctgttagggtccaactcctcagcagcaaatgcagcacctagacaagcaccagtggtgaaaccaatggagccccacaagacctgggagataccgtatgtgttgttagggaagtgggtctgattgataccgaaagcagaggtaccggtctcggtgatgacgacatcgccttcgcgcaagaacttcccaacctggttccatagccactcctgctttagaggggtagcggagtcaatctcctcgttgttagctggcttgcttggaactggaactggtacgtagctcttaatgacttctgccacgttgtcgaccaactttctcaagacgtacttcatctgcacgcctgggaaggtagcgtttctgatcttgatgtggtcagagtggaactcgacgacgttcttggttttgtaggagtaggagaaagagccggtgttgaagtcagatagcaaggcaccaacagataggaccaagtcagcagactcaacggcctccttgacctctggagaagacaaggtaccgacatagacaccaccgaatcttgggtgctgctcgtagatggaacccttacccataggggtgacgaaggctgggaactgggtcacgtcgatcaacttcatggtctcggccttgacgtcatgtctggaggcacaggcatcagacaaaatgacagggttcttggcagccgcaatcatctccaaaacggtctcgacaacttcagcctcggcctctgggtcgttaggcttcaagttcaagtcaattggcgtctccaacaaggaggctgggaccttcaagtcaaccatgttggctggtagacctaggtaaactggtctctgggtaatgtaacaggttctgatgcatctgtcaatttcggctggcgcactggtgatgtcactgatcatagcggtggtgccggagatgttggcagacattctgtggaacacagtgaagtcgccgttacccaaagtgtggtgcaacaacaactgcttggcctgtgcggagatggatgggacaccaacaacgtgtagcacaccaacgtgctcggcgtaggaaccggcaataccgttcaaggcagatagctcgccgacaccgaaggtcgtgatcaaacacgacatgcccttcaatctggcgtaaccatcggcagcgtaggcagcgttcaattcgttggcgttaccggcccatctcatgccctcgacctcgtagatcttgtcaagcaaagacaagttgaagtcaccaggtagaccgaagatggtttgcacctcgatctgtcttagtctctcgaacaggtagcgacctaaagtaatttcggacattgtattaatggttagtttggaaagctgtttagctgtggtcttcttctttgagagtccactaaccatagcaaacgtccatccttatatacacaggccttgatacctgctgttaggcctatctgttactattcacacgccacatcgtacgcaggtaacatgcagagatgcatgcatgattattcagtggttattcagtggccttaggtgccaggaagctggttttgccgcacattgttacggataaatcatcaggtggtttatccgaaggctcccttcgagagatttagccgcgggcttcctaaaacatcatatgattcctgtatatttgcatactgttatgcatttaaaaggaagatatatcagctgatgtattcatccgtgtacaatgactgatgtatgcatttaaatgttttgtgatcttcgtatatggtgatcattaatcagccatcgcatacccgggcaagatgaccattagctcctgctttcgacagaaacaacggactatgggtatagaacttgatgatagaaggttgaggcatttaaaaaagtggctagaccgggctttagatccgcctacgacagacgagagcgtcacagcccttgtgaaggactatgtactacaggtactactagagtgcgacatcgcagctgtgaagggccgaaagaacgagttctgcgagcagatgagccagtacctggcaggtatggtgaaggaccacagctgtctagatgggttgttttatcagctagtggacttaggcgagcctcccgcggggaatagttgcgggcgacagctgcgtgtcctgaaaatcccagcggaccggcttcgctgggaaaccttgcgtgcggagtttgcgccttttggagcggtcaccagggcgaggattgattacgtgcatcgtgaggcattcttggagtatgcggatgcggccagcgtcgtccgatgttgttcggtccggaaggctttcttggggaaccggttcgttgaggtgcagcctgctcgcgaggcgtgggaatcactaagcggtgtcgacgtctggccgccggatcacgaaacaactgtgcccgagcatggatcatctggggtgcctccgcgaactggtgttgtcttggatcgtggacgtgcgcctcgcctgtcatcttcagagccctccagtcagcgtatcagttttgcattgcttcgacagaaagaagctctcctagaaaagtaccaagttaagttatcacagctggtgtctactcttaaggccggtacttctcaagaggacgcaacctatgcccgggtcaggcttggggacttgagaacggaaatgcaaaagttgcacattacccccagtgacctgttggaagaaaagttcagactgttggctcttcacgagccttgtaaagccataagtattacgcttcttccttattctagtaatcgtaaacctcccgggatacgtcctactctagtatcacggcgtaggccagcaatggtgtcatcacgggcacggaagggatattgtgtgaccaaaggatataaacacaggaaatctgtaatccccagctcgaatctcctcaagaggtcccgctcttagtacatgcatcccgggcgatgtaaaggggggttggttgcgctttccagagatgaagcacgtttgagcgggtacataccgtaaagatggagaccgagtgtggcccacgatttacaagtagctctgttgcgctaccgggccaaatccaagtaacgaagtgctatcattagttaaattactaactctcctatactcgagtagactaatgttgagtaatacaatataacataagtacatcacaatataccttatcggttcgagatatacgacgcatgctttattccccaaattcagtagcggatgcgattcttgttcaagagcagaccagatctgatcagttttgcctgtagctatcttccgcatccatggttaagcctctggtcttcgctctcattctttcgattctcgcttttagctgatttgtcacttcagctgctcttttccaagactcctcacttagaagagaagcgctactgccatttgtagttatgctacccgccacggcattggtggtgtccataatatgcaatgaatgaacgcgcctaggtagatcatcactcgattcactagatgttgcaaccctgacggatgaggtcaaaggcgaaaacctgctggttagcccggcattggaacggaacgagccaccagaagtcttccgtatttgctgaggattatgtggttgaatgcttatgcatggatcactatggttactgccgccatatactcccgcactttgcgcgctcccatttgaaggggaaatggcctgtataccctcaagtacggacttgactggagtgtccggtgaatgcttggcgttaagtgctgtatccaattcactctctaaagttgcgagccgattcttcaacttagttatttgtaaatctttagaacgcagcagcatggttttctcattcaatgcaagttgtacgtcgtttaattgatcctgtagcatctggttttcagaattcaactgcgaagtttgagtctggaagctggtcaattttgtcattagttcttgacgctccttattccacttagcttttgcaccctttagctcgtctaactcagctagcacggcaggtggaaccacggcaggagcaagagaattgttactacttggtggtagggaagacattgggttaaaatgcgaagctctaaccgtggaatgcgtttgagaccgattaaccaaacggggcttggtgttcaatccaccattgttgaggatattcttatcctttaagggggaggaaggtccccgcttcgttgggatggtggacgccgtgggtgttctgagtgtctgggggggtgagtcaaagtgtctcacatcgacagaggggctcaatgaagatgccgccgccctcggagttttgacaatatgcggtaaggttttggagaaattggatgaagaattctgatgatggttcgacctctgagcctgtggggattgggggtgttgtagctggtgctgctgcgggctctggtggttctgtaaagaacgctgtgtgtaattccctgaatgctggggctgacgttgtgactggacagcacgagtctgctgcggtttctgaacaggaggtggcactttaacctctattttctcaaaatgttcataaatcttttttttcttcagactgccaagcttttccaactcatcagtaaactcacgttcaccgaatagtttcatcactgtcgcaaaacactcaaagcccgcatctctgagtgatggctgggtatcgttaacaattttaacaattattggaacaatatctggcatcatcctcatgattacttcatcttttaacctcgcagctgtgggcttccactgcttttgcaacattctagttaggaagttggtagactccatcttcacttgaggaattttatgcttcatgtgctctatggttggctccaagcagttgtcaacgccatagtattgagctagtagatctagtgcttcgacaacggcttcgctaacggatggcttcttctctttggttcgatcaagcaagccatccaatagcatatgaccatatggagctatcccttcgcgtaatgcatttgtcatatgcgccgccgagtttgccgctagagtggccgcctgtaagttggcgtccttggagagaatctgcgccaagctgcgcgcgtaaaacgagtagtcatctgtttgatcaagttttttggcaggcttgagtaaatcgtcgtatacctgttggagggcctcgaccctctccttccacttggcggacttaacgttcttctcgaagtcagctgggaagtttttgacaatggacgacggcttgagcaaggtgaacgggtcggccaagacgacgggcgcggcgcccgcctccccgcccggctggttgccgccctggccctcgcccatcatcgtgtcgccgtcgtcgtcgacgccggctgcggcctcgcgctgccgctggagcacctgccagtggaaaagacggggctgctctgtagggggaatcgtgccgtcgtagttgccgaacaacttgtctaggtccttctgctggatcggcttaagcttctccaacaacatatcctgcaagaacggcttgccagtccacttgtatacctcaaggatgaagttcatcgtctccgcgcgcacagcgcggtccgcatgccccgccaagcgcggcaacggtgcaagcacctccgaccagaagtcgttcttcatattcacaaagccaaacgagcacacgagctgccccatcgccgccatcaagctgctcaccagccgcggcagcttgttgcccgaaaacggcaacatcaactccatcgtctgccgcacactgctgtcgaacgacgccaacatcaatatgcactccatcgccttcgccttcgtccccgcccgcgacgaactcacgcccttctccacgagcgccggcacccactgcgcccgcagcgaccccgtctccggcacccgctccaactgccccatcaactccaacatccgctgcatcgcccccaccgcgctctcctgcgccaccacgttcgagtcagtgatgaaccgcccgaagtgctccggcgcctcccaccacgtgctcacctcccccgccacctccagcaccgagctccgctcaaacatccgctccaactcctggtacccatgctgccgcgccttccacgacttgtgtccaagcctctgcttcaaccctagtttggtgaagtcctcgtcttctgtcatgcctcaaaaaccctctgaacctgcctgacctgaaactaccgccttgcggatgacctctatcgtctcgtgtctgctctataacggaacttctcgtacgcgctctcaactgcctgctgatgcttcgtctgctggggtgtagctactgtacaactggctttcatgttcgttattcgaccgtgcgttggagatccaacgccgtccgaaacgtaaacaaacccgcgcctggcgtacacaaagcgaacagagagacggacgattgagaaggctcggcgcgcagacgccgcttatagcagaggttccattgctgtcgaagacgtcaatgcggaccgcgcgaggacgcgtttgtcatccttatctcctgagcggaaatagaggggagaccccgcacgtggtgacacgtgaccgcaggcggccgggtataaaaggcggggctccgcccggcttcctgggtactgcgtatacacaaggtacagtcagccacacagaacgcaatggtgtccgaaatcaagtccctttctgaatttgagtccgccgtgggctccgacaagctcgtggtcgtggacttctacgccacgtggtgcggtccctgcaagatgatcgcgcccatgattgagaagtttgccacccagttccaggaggcgtcattctacaaggtggacgtggacgcggccgcggaggtggcgcacaagtaccagatcacgtcgatgcccacgattctatttttcaagaacgggcaggcggtggacaaggtggtcggcgcggacgtgcagtcgatcagaaccaagattgcgcagcacctgtaggcggatatatagttagttatgtactcgaatgtttatgaacgcgggtccacacgggcgtggagagcggcgatctcgcggtccgagaagccgaggatgtacagcgcgtcgcggagcgacggtgagttgaggcggcacggcgcctgctgctgaacgcggggcttggcgtgccaggcgatgccgagaccggccgcatgcatggcgggcaggtcgttggcgccgtcgccgaccatggcggtggcagcgacgggcaggccggcgccggccgcgagctcgcgcagcgtgcgcgccttgcaggcgccgtcgacgacgtcgccgagggtgcggccgctgaggatctcggcgccggcggcgtcgacggtggtctccaggttgttagccttggcgaagtcgagctgcagggtgtcgcggatgtggttcgcaaacggcgcgaagccgccgctgagcacggcggtgcggcagcccgcggcgtgcagcgtgctcgtgagctcggcgacgcccggcgtgagctgcagcttagccttgatttcctcgtacaggcgcgctacggggatgccgcgcagcagcgacacacgctcgcgcagggactgcgtgaagtccagctcgttgttcatcgcgcgctccgtgatggccgcgacgcggtcctcgacgcctgcgtagcccgcgatcaggtcaattacctcctgctggatcagggtcgagtccatgtcgaacaccacgaggcccttgcgccggtgcgccgtgggctgcacggcaacatcgacgccggccgccggctgcgccgccacgtgcgtgcgcagctgctcgagggtcagcgtcgtgggcacgtccacgaacaggtcctgtgcccgcggcgccaactgctcggtcccgcgcaccgccacgcccacctggcccaggtgctcgtgcagcgaggcgaggtagccttccgggaactgggcgccgtgtgcgatcgcggtcactacgtatgcggcagcagaagacatttggagtgctgtgtcctggcacgggtgggcgtggtgaagtggaagagatcaagtaattttcagctgcaggtgcgccgctggcgctgccccgcctcgcgcgactacggcagcgcgggccacggcagtgttcctggagtcctgcccgctgcgccagccagcagcaggtgcatggtggcaccccggtcgcaccgctggcgtgcacagcggcgcgccagcggtgcccggcatcgcagcgagcgtgggtgagtcaacggtgaaaaattcagcgaaaatttggctcgcgcccatctccatcgtgctcgacctgcgatcaccaagatgtcgaagccgctcaggatcctagtccccatcaagcgggtgatcgacccgcagctcagacccagaatcaacgccgctgggacggcggtgcagaagacaggcgtgcaattcagtgtcaacccgttcgatgatatcgccgtagaggaggctgtgcgcatcagggaggccaagaaggtgcccgtagagagcatccacgctgtctccatcgggcctgcgaaggcgcaggaggcgctgctgacggccatggccaagggcgcggactcctcgacgctcgtggacgcacaggactcggagctggagccgctggccgtcgcgaagatcctgcgcgagctggtcgtgcagcagaagatcgacctcgtcatcatgggcaagcaggccaccgacagcgacaacaacaacaccgggcagatgctggcgggccttctcaactggccgcaggccaccaacgccgcgcgtgttgagctggacgcgactggcacgcgtgcgaccgtcacgcgcgaggtcgagggcggcgaggaggtcgtcagtgccgcgctgccactcgtggtcaccacggacctgcggctcaacacgccgcgctacgtcacgctgcccaacaagatgaaggcgaagaagaagccgatggcgaagctcaacctcgccgcgttccccggcgtcgactccgccgcccgcctcaatctgctgcgcttcgaggagccgcccgcgcgcgcgccgggcaccgtcgtcgcgtccgtggacgagctgctcgccaaactcagggaggccaaggccgtttaacacctatataaactaacagcccctatttcctccgcggacgcagcgtcccgctctccagcagccccggcggctgcttgcgcaggtacgtctgctcgtaccacgcctcccactccccgccctgcgcccgcgcctgctgtacgctctccagcacgcgccggcactcctcgtcccacgccgcgaggtgctcgccggtcgctgccgccggcgctatctgcaacgccgccagctgcagcttcgcgcgccgccgcggcatgtcgccctcgaacgcgttatacagcgggatcttacgcagtttgttctccatgctgttcccgccccgtggaactgcttttgcacattgcgtgatgaatgctaacacgacctcaccaaagtggataggcgcacccacgaaaaatagacgcgtcccagccttgccggagcagccaccggccactggtcacctttcgtttacaggtgcgccggcgttaccacgtgacaccgccgtctttatatacagctcttcccaccgctcgcgctcgaccgtgccaaaccaatgctcaacactacgcccataaacatcgacgcgtggctggccgagaacagtcacctgctgcagccgccggtcaacaacttctgtctgcaccgcggcggcttcacggtgatgcttgtcggcggccccaacgagcgcacggactaccacgtcaacccgacgcccgaatggttctaccagaaaacgggcgcgatgacgctgcgcatcgtcgacgagcagctctcgggcgcggcgcgcttccgcgacgtcacaatccgcgagggtgactcgttcctgctgcccgcgaacgtcccgcacaaccccgtccgctacgcggacaccgttggcatcgtcgtggagcaggaccggcccgcgggccacttcgaccagttgcgctggtactgccgcggctgccgcgagctggtgtgcaagtacgagttctacatgtcggacctgagctcgcaggtgcgcgagggcatcgagcgctttgccgccagcgcggaagaccgcgtctgcaagcactgcggcacgctcaattacccgacgccacaggcgtccgctacatagccgccctaagtatgtttgtctcaagccacagtccgctactgcgcacataaaaagctgccctcggcgccgcggggcgcgggcgggccacggccaccgctccccgactggaccatggacgcagctgcccagacctcgctggtggtgtccgaggaccggcgccaccccgccaacgtgatctgcgcactgtgccggctattctacgccaataactgggtcaccggcaccgggggcgggatctccatcaagcaccccgcgaccgggcacatctacatcgcgccgtcaggcgtgcagaaggagcagatcgagcccgaggacctgttcgtgctggacggcgtcgacggcgcgtacctgcgtgcgccggcgggccaccggccgtccgcgtgcacgccgctgttcctcgcgtgctaccgcgcgcgcggcgcgggcgcggtgatccacacgcactcgcagcacgcggtgctgtgcacgctgctgttcgacgacgtgttccggatcgccaacatcgagcagatcaaggcgctgcccagcgggcggcgtgacgccgcgggcaagccgctgagcctgtcgttcttcgacacgctggagatcccgatcatcgacaacaccgcgcacgaggaggacctggcgccggggctggaggccgcgctcgcgcgccacccggcgtgcacggccgtgctcgtgcggcgccacggcatctacgtgtggggcccgaccgcagaccgggccaaggtgtacaacgaggcgatcgactacctgctggagctcgccgtgcacatgcaccggctcggcgtgccgccggactgccccatcggcgaagagaagcgctttctgcgccgctagcgcatccttagatcctatatgtccgtatatacgtgctcctactcgcgcgcctgccgcgcctgccacgcccgcgcccagatgtcgtgttcccgcgcgacgacgttgcgcgtgtcgcgcagcgccgccgcctggggctcctgctcgggcccgccgccctccagcgggccgcagcacacgatctgcgagccctgtaggaggaacgccgccgccaggccctcgccggtggcgcgctgtctgacgtccgacagcaggaggttggcggtcttgtcgaagccctccagcgtggccaccagacagcccccgtccgtggtaaccaccacgacccggcggcctagatactccttcaacaacggtgacatccgcgctcaggtctgttcgttcgtcagggcccctgtgtggtgagatagcgaaatcggccgcgcacgcacttttaaaacgcgccggcaccaccagtaacggcggcaaaggcagagcacagaccaatggaggccagcgagaacgcgggatcgtgcgagcggcccaccagcgccacggagcccggcagttcgcccgggcggcagctggacgagacggacaggcagatcctcgagtgggcgggcaagctggagctggagtccgtggacctgcgcgagaaggcggacgcgctgctggggctgctgcagcagcgctgcagcgaggtcgcggcgagccagcagggtctggagacgtggaagcaaacggtgggcgcggagctgagcggtaagtggcgtgcatacccctgggcggcagaaacatgtactaacgagtaagacagcgttcaaggcagacgtggtgcaggcgctcgaggagcagcgcaaggccgtggccggcgaggtgcggcgcgcggccggcgcgcgccgcacgcccccgcccgacatggagcgcttcgcggggcgcatcatcaagagcttcgagacgcggcagcagcgctggttcaaggagttccaggcaacgcaggacgtgctgtacaacgtcaccgtgcagctggaccgcgcgaccgacgtgctgggcagcgtgtcgcgcgacctgcaggcgctgagcgcgcgccaggcgcagacggaggccttcctggcgcgccacgtgcacgagctcggcggcagcgtgctgccgtcgacgccgccgcccagcatggcgccgcgccagcgcgcgtcgccgccgggccccgccgcgcgcacgcgcgacaaggcgcaccagacgcgctatctcatcccctgggaggacatctcggaccaggaactatagactcggcattacatattcttctggctaacatacgtaacttttcggtctccgtccagccccacagtcagccggtgcaggttcccgagcccctcgcgcaccagacgcgcatagtagacgtcgtagcacaccaggtagcgctccagaaatgcgtgcacctgcgcgtcggtcatgccggcgccgcagcgctcgcgcagctcgtgctcctgctggatgcgccagcgggccacgcactcgcgaacctgcgcgtcgaacacgatgccgaccgagggcacgccagccgcgcgccacagacacgcagagtagtcctcgagcgccgcgttgacctcgcgcagcgcggccgcgccgtaggtcccggccgcgcgcgcgagctcggcctcggccgcgggctcgaagcccaggaaccagccctcaaggatcaccacgtccaccggcagctggacgcgcacgcgcgcggcgcaccggtcgccgcgcccgccgtgcgccgccttgtcgtattgcggcagctccacctcgccctcgcccttgcgcagccgcgccagcgtgtcccgcagcagaggcacgtcgtgcgtacccggcagcccccgccctgccagcagcgggttgccccccgcagccaccgccgcctgcgcgcccgcggggaggtagaagtcgtcgatcgagagcccgacggcacggtgctgctgcgccacgtgcgccagcagctgcgctgcgttgaacgtcttgccggagccctgcggacccgagattagcacgaatgccggctcgcggccctgcctacgggccagcgcgtcgggcagcacgctgtcgatgaattccgccaggaaatggaaggcctcgctcatcttcgggtcttaaactgttctgtccgtgaccttctgcgctccgctggccgctgcgattagcccttgctctgtcctgagtgctgccacctgctctggggagtgctgctggaaggctgcctcgggattaatgcgcatgattaacattatataatggtttacttaacctaggctggcccaaagatcaaatagatgtgcgctgccacataggacggagtcgcggctaagctgtgtgttttacctggaggcaactgttggactcctgtgtcagcaatcgcgccccgacctgccgaacaagcgactatataacaagcgaggaaaccaccttgtgatacgcacggggaccaacgacacagcaacgacacagcaacgatggcggacctcggggctcttattgacttgacgcggatatcggagacgcggtatgaatcgacgaaccatcataggatgatacacggcggcaaggcgctctacgggggtctgctagtggcacaggcgatactggcgtcgttctactttgtccccagggactttattccgctctcggtgcactgcctgttcatggtcggcggagacaatgctatcaagacgcagtacgaggttgaacggctgcggaaggggagcaacttcgcgcacctgttggtgcgcgcgtaccagaaggacaaggagctgttcacaatgcagatcatctaccggcgcgacctcggcaagcagccggacacgctgcaccgcaaggacaacctgggccctgtggaccggtcgcacctggaggacgctggcacgctatgcaggcgggatctactgtccaaccgtgagaacctgcaggcggtgagcgcgttcttcgagacggataagggccttaataacattctggaggggttcgacaacacgtcgtccgagtacaggctgcctggcgacttcttcctccgcgaggggctgcgcgacgtgctgcgctacgcggtgcggtgccaggaggaggtggtgacggacccgtcgctgcggttcccggagggcgggcggatgacacctcagaacgactcacgctacaactacgttatgttcggatttttctcggatgcgtacctgctggcgacagtgccctattttgtgggcctgcccgtcttctcgtgcaggctgagtgtgtcgttggaccatgacatccggttccacggcatgccgaagatgaacgagtggctggacgtggtggtccggaacatttcgattgtcaaccactccgagtcgatgaccggcgactggtacgacagcaccagcggcgaaatcgtctgctctgtctcccagcagggactggcgatctaccctacgccggaacgcctgtccaagctgtaggcgtgacattttgtaatagttataaagctatggataactgtttttaagcccttagaacattccgtcgatctcgcccttgtcgttaatttcgatgttcatgaacccacagtgggtggggaggccaggtatggtctggatttccgcggctagcgcgtacaagtagccggcgccaatggacgcgcgaatgtcgcgcactgggaacttgaagccggtgggcacacccttgaggttagcgtcgtgcgagagggagtactgtgtcttcgcgatgcagataggcaggtggttgaagccctgcttggtgtacagctcgattttcttgcgggcctcgggcagaaactcgacctctgcagcgccatacatggtcttggcaatggtggagatcttgtcttcgatggacggcccctcggtgtcgtacaggtagtggaactcgggcctgcattcctccgtggctctgataacaccttccgcgagcttgacagccccctggccgccctcctcccagtggttcgagacgattgcatcaaatgcaccagccttgatggcctcttctctgatcacctcgtgctcgcgctcagtgtccgaagacatgcggttgatccctaccacaacggggaggttgtatgttcttgcattggcaatatgcttggcgaggtttgcacagcccttccgtaggaggtcaacgtcttcgttcaggtaggcactaggcaatggtgcgcccgccttcacctcgggaccgccaccgtgtacctttaaggccctcaccgtcgccacaattacgacaacatctggcgagatgccgctggccctgcacttgatattcaagaagcgttcgccgcccatggtgaaatcaaagccagcctccgtgacaacatagccttggcgcttcttcttctccgcttcggaccaattggggtctacaccagcaagcttcaacgcgatcttgtcggcaagaacagagtttgcgccaatggagatgtttgcgaacggaccagcatgcacaaagaccggtgtcccctctaacgtctgcataatgtttggcttgatggcatccttcagcagggcggccatagcacctgcacaaccaatatcctcgcaggttatgggctccccgttcctggacgcggctacgacgatcctgcccaaccgctcccttaaatcgtggagggaatcagctagcgccagaatggccatacactccgacgcaacagaaatgtcaaatccggtctggcgtttgtatccgcgctccgttggggcttccccaacagtaattccccgcaggaagcgatcattacaatccaccacacgtctccaagtgatcgtatctgcgtcaatgtcgaggcgggcaaaacgagcaatttcagactccgtgagggagtttggatcagtcttgtgaatccctaacttctgcaggcggcggagcatcgttgacgtaaacttccgtgtcccattcttctcgggaactagcctcttgtacagcgcagcatccttttgtgttgcctcgtgaaacatacgggtgtcaatcgccgctgctagcaaattgttcgccatggaaatagcgtggatatccccggtcacatgcaaattaaactcatccatcggaatgacctgggagtaaccgccacctgcagcaccgcccttgatgccgaaagtaggccccatcgatggctgccgaacggttgcaaatgcgaccttatcgagatgtgcggccagggcctgcaccaggcccactgtggtggtcgacttgccttcacccaaaggcgtaggcgttatacccgtaacaagtacatatttgccgttctcacggtgtgcaagtctatccaaggtgtctagcttgaccttggccttcacggagccgtagagctccacctcagacggaagcaatccggcttccctggcaacgacagcgatgttcttgggcacctgcgaccgcgaaatctcgtagtcagagggaaccggcttctgcaattgcagcggcaagggcgacagcttgcggggggccgagtggcacttcttcgcggcatccagcgtattctgcatcagcattgccaccgtcattggcccgacacctccgggcaccggcgtgatgagccgtaccttttcagacgccacaccgaactcgacgtcgcccacacaccggtagccggtcttgcgcgtcgaatcctccacgaagttggtccccacgtcgatcaccacggcgtccggattcgtaaaccaagcgcccttgacaaactccggctgcccaatcgccaccaccacgatgtccgcgcgccccacgtagccagggatgtcgcgcgaacgcgagtgcagcaccgtgaccgtcgcgtcgagcgcccgcaggagacacgcaaccggggcaccaacgatgtcagaccgtcccaggaccaccacgtttgcacccgctatctgcacgtccatgcgccgcagcagctcgatgatgcccttcggcgtgcatgggtggaagtgtggccgcccgtggcgcttattcaactccccgatgttgtaggacccaaacccatccacatccttctccggcgcgacgcgcgacgtcacccggtcttcgtccatccccggcggcagcggcagctgcaccagaatcccgtgcaccgtctcgtccgcgttgcgcgcgtcgatcgccgccaaaacctcttcctcgtccacatccgcgcccagctgcacgaactccacctcgatccctgcctcggccgccgctcgccgcttcatcctcacgtacgtgctcgagtcgtgccgctcgcccacctggaaaatcgtcagcttggcctggaacagcccgtctgcacagagccgtgctatctcctctgcgatctctccccggatctccgccgcaatagccttgccgtcaataagtgtcatcgtagtccacgctactgctccgtgttgcctcgcacgttccagtaagcccgtatatatactctgcagtagcccctggcctgctgtgacatgccaccgtcggactgcacgtacggatccactgcttgggcaggaacgcgtcaaggagtaaagtggttttgactctgatccagcagaaacaaaaggcagtcacgcacccgaatacactgcgtcgccatacagcacaagcctgcgcacagagcccaagataggtaaaccagctgtgtcgccactgcctcttccggtgaacactgggccttgcaaaccgtggtcacgtgacagcatgccgccgccggagcagggcgctggcatgggcggcatgggcggcacggctgggtgcccgagctgggcagtgttctgacggttttctgtgtggctagtgatatgtgtttgtatgctactttaggctgacggacaccgttgcgaacaacaccaacgtacagccaccaggaagaatgacagcggagaatggattgcccgggccgtgggcagtgaagttcagcaaatcgcgcaagcgcgagtactactacaacccggagaccaaggagtcgcagtgggaagtgccggcggacacggacagcgagcagctggcgcggcatctggcggagcacccggtgcaggtgcggtgtctgcacctgctgatcaagcacgcggggtcgcggcggccggcgtcacaccgcaacgagcacatcacgctggacaaggcggcggcggtggcggagctggagcagtacgcggagcggtaccgtcagggggagcggttcgaggagctggcacgggagcgcagcgactgctcgtcgtacaagcgcgggggtgacctagggacgttcgggcgcggggagatgcagccaagcttcgagaaggtggcgtttgcgctgcccgtgggcggcgtgagcgacgtggtggagtcggacagcggtgtgcatctgatcaaacgggtggcgtgagggcgtctattgccactgccagatatccggtacgtagtcttctgtaactgagccatcgcggccgtacatactttgccagaggttgaagccgccgcgcagcacccatacttcgaactgcggcaggtcgccgtcggataacgcacggagaaagcgcatggcgctggcgggcccgcgctgctgcgattgcgcacagtggaagacgcagtggatgggccccgtgccggcggcggcggcgtgtgtctcgagcagctgcgcgcggagttcgtcgagcgcagcggactcgtgcttcaggcgttggtaggggtagttccaggcaccggcgatgtggccaccgatgtagtcggagccccgcacgtcgagaacctgaaacggctggctgtcggcgccgcacgcctgtttgatccagcggaagagctctgctggctcgaggtaccttatctgcgaaatgttgcgggagtgcatctgctcgagtccttagcaagaggagtgcttgtgctaagaacaaaaaattagttgaaatatatacatacatacattgcgaagacagatgcatgcgtctttttatgtcacatttcgaggcaggcgtagcatccgtctgccggaacccgctggcgtgtcgtgttattcgctctcctctgtcgtatagtggggtgtctcctgcgagagccaccggttcaggtgggacagcaccgagcccgcgcggttgatattttcatcgtcactctcgctggagggtagcatcgcctggccggcaatcgcaggggcctcgcccgtgtatatgtgtgcgaattgagttgcgggagaagcctcctgcagcttgccgcgcttttcgggcgggcccgcggggccaacaagcttggagtacaggttgcgccctagcgtcttcttcaaaagcatttcgcgcacctcgaagtaaaggtccttggacgcgtcattgagcttctcctggtttttgcggaagtaagagcggaaatcctgtatgtgtttcttaaactccaactcgttcttcttgagccaggagacgtttaactcctggcgcgacgcaccgcgcgcgaagttgcgcatcaagtacttgtcatagtcgcggatgatcttggttatgatgtcgctcgtcgaaatgccgttggtgcgctgggtggccaagaacttgcccatctgcttgatggggcggtagatgtcatcgctatcgccgctcgtgtaggggatgtcatcgtgtgctacatagtcgattttgtgcagttcgaggaactcgggagtcacacaccacggggcgtcctcaacgacctcgtcgacccaccggcagtggcgcaaggactcgcagcgctgcttgtccgtgagcacggtcaagcccttgagcttgtgcgtgatgcggtcgctgggcacgccgcagatgagcgttacgttctcaaaggacttcttgcactgctccaactgcttcatgtgcccgaggtggaaaaggtcaaacaccccgtctgcatacacccgcaccgcgcggtcctgcggcgggaggttgaacggaaacccgcgcggccggaacttccggaattcctccgggatcgcctcatcgtaccgccgctcctgctcctctcgctctgtgtgccgccgcttacggctgtgccggcgctcctcgtccgactccgacccctccgccagctccccgttgcagctgcgcacgctggcccgccgcgaccgccgcaccccgacaacgccgtcctccccgtcttccagctccccatgccgccgcttgcggttcaggttgaacaaatttgtgagcgacgagttggctagccgctgtttcaacgagccctggcgcgtcacaggccccatttcagttatcttaatcctgtagaatcgcccgtccaggcacttttaatttgaatgccgttacagtggtggcaatcagattctagcctcaacacgatgcagccccacgccaattgtagtccggaacctgctggatactgcaattctttttggtttttgcccatgtgcgtcgcaacaaaactttcacatgacatcacgtgacagtcgcgtcgcgtgtcaaaaagatgtttcaaccgaggatcgaactcgggacctttgccgtgtgaaggcaacgtgatagccactacactattgaaaccagctatgtctttgtgagacgctgtccgcggctgtgtggggtgctgcgggatctcagccagccagtggaagccggcgagtggaagccagtgaggacaatcgcggcgtcgaagggtccacatacctggcccacgttacgtcaccccgttcggggtgcacgtggaagtatgccagccgccgagaatcccgcaccggaaggcaacccgcgcatgccgcaggcgcgccggatacattgcctgggccgccattggcatcagctgcagagattggcggcatggcgcggcctagctgccagtacgcaaagggctggccggggccgcttcatgttgccagggtccgcgcaggcacgtggcatttaaagcgcgctcccgtattgcaccgcgtccgccgaccagccatctgcgacgggtgacgaagagcacggtgcgcgccggctgcggccccggtgggcagctctaggcacgtggtttgtcacgtgttatgtgtcacgtgctatggatatggtgtatgggtgtcatgggttagtcaccggcaggacactgggacttataagctgctcgagggccaggcggttcaattgcacttcataggccgtggaatgatgtctcacaggcggttctcgacagcgcagcggctgcgcgaggggctaaacaggtactcgagggtcataaccgagccgcgggcgcagggtgcctcgcaggccatgctgtacgcgactggtttcggtgatggggactttgcaaaggcgcaggtcggagtggggtcgtgctggtggtcgggcaacccatgcaacatgcatctgatggacctgaataaccgggtagcggcgtctgtggaccgggcgggcttgaaggcgatgcagttcaacacaatcggtgtctcggacggcatttctatggggactaccggcatgcggtactcgctgcagtcgcgcgagatcattgcagactcttttgagaccatgatgatgggtcagcactacgatggcaacgtggcaattccctcctgcgacaagaacatgcccggcgtgataatggccatggcgcggcacaaccggccctccattatggtctacggcggcaccatcatggcggggtccccttgcagcggctctacgcggctgccaaagaagattgatgttgtatctgcgttccaggcgtacgggcaatatctgtcgaagcagattacggaggaggaaagcagggatgtcgtccgtcacgcctgtccgggtccgggctcttgcggtggcatgtacacagccaacacaatggcctcagccgccgaggttctgggactgactctgcccaactcgtctgcgttcccggcgatctccgaacagaagctggccgaatgtgacgccgttggggatgccatgcgcaaagcgctcgagctcaacatcaggccacgcgacctgctcacaagggaagccttcgaaaacgcgatcacgtacgtgattgcgactggtggctcgaccaacgcagtgctccacctggttgctattgcccactctgcgggcgtgaaactgacgccggatgacttccagcgcatttccaacaaaactccgttgctgggcgacttcaagccatccggaaagtacgtcatggctgacctcattgaggttgggggtacacaggccgtcatcaagtttttgtatgaaaatggcttcatgcacggagatgccctaacggtgacaggagacacgctcaaggagcgggctgcgaagactgctcccttgcccgaaggccaggacatcattcgtcccgtgtcgcagccattgaatcctaggggacatctccagattctctatggctctcttgcgccaggcggcgctgtcggcaagatcaccgggaaggaggggaccttcttccagggccgcgcacgcgttttcgatgaagaaaacgcattcatccgcgccctggaggagggccagatcaagaagggtgagaaaaccgttgtggtcatcaggtatgaaggccccaagggtgggcccggcatgccagaaatgctcaaaccgtcttccgcgctgatgggctacggtctgggcaacgatgttgccttgctgaccgacggccgcttctccggcggctcccacgggtttttgatcggccacattgtccctgaggcctatgaaggcggcccaattgcgctcgtgcaagacggtgacgacattgtcatcgacgccgagaacaatgccatcaacctccttgtgccaaaagaagaaattgagtcgcgccgcgctcgctggacccagccggctccacgctacaagaggggcacgctcgccacctattctaagttagtctccaacgcctccaagggttgtgtcttggacagcgacgactagcacctcgacgcaagtcactatttattaacaagattatgtatataagcaccccgccatgtccattgaatggaccgcatatgtaacaaaaatcgaggatgcttccctatcgtctacaaatctcaggatgttgagtacctttcaggtgtctgactgaaataaatgttgaactttgatagtacttttatgtttgaaaaattttaaaattttattgtatggctgtcaccacgagtactcatcttcaccgacattacgggtacctgaagagcttatctatcgataacatggcgactcaggaggcggtatttatcggcgcaaataggcagacgaaggttgcggacttctatttgccgaccaagactgtcgcattcggagctggaaagtgcatcgctctatggaatccgttggacgaacacaatgctggcgtatactgcacattgaaggcacacaacgctgaggttacgtcggtgaagtttattggggccgagaaacttttggtcagcgcctcagcggacgcaacgatcaacgtctggcgaggagatgagagatgggagttggcgcagacgttggagggcccaaagagctctgtgaccagtctggcagtggctgcagggttaatcgtagccgggtttgcagatggtacgctatcagtatggtctgagcatgacgacgcatttgtgttgtccagccagtttctgatacggaagggttttctaccactggcgctagcgctgcagaagctctctgacggttgctacatgctggcggttagtggtacatccacggacttgatggtgtattctgtttgtgtagctgcgaccgtggatgtagagctctcagcaacagtggagggccatgaggattggataaaggacctcgctttccggagcaatggaccaggcgactggatgctagcctccggagcacaagaccggtatatcagactgtggcgcataaaggcgaataacaatatagaggaggaggatcccacgaagcttaagctactaagcaacaaaatctacaaattccaagtaacagctgatttgcacctgtcgataaattttgaggcgcttatcatgggccatgatgactggatatcctcgcttcagtggcacgaatcgaaatgccagctgctcgctgccaccgcggatacgtctgttatgctatgggagccggacgagatttctggtatctgggtgtgtgcttcccgattgggggaattcagctctaaaggtgcttcaaccgctacaggctctgcaggtgggttctggtcatgcttgtggtttgcgactggtgatgcggaatatatcttggcgaacggcaagactggctcatggaggatgtgggaaaatagaggggatggcggttcttgggagcaactaccggcaattacagggcccaccagatctgtgacagatgtggcctggtctccaagtggctcttatctcttggcatcttctttggaccaaactacgcgactatatacgcgttggatgtacgagggagatggtagccggaggaaacatacatggcacgaatttgcaagacctcagatccatggctacgatatgatctgcctggaaccaatttccgacacacagttcatttctgcaggcgatgagaaggtgctgcgttcttttaacgaaccccgtgccattgccaagctactggaaaggttatctggaatttctgctgatacttcgtccactgtcgcagatgcggctgcgcttccggctttgggactgtcaaacaaggcgtcagttccggaaggtaacggtgggaccgtcgaggataacgacgcccgagagacgaacgaaaccacaaacataaccgcggcaatgctttcgcagctccaaacgccgccgctggaggatcatctgcagcgacacactctgtggcctgagattgagaaactctatgggcatggatatgagatttcgtgcgtagacgtgtctccagatggcaagcttcttgctagtgcatgcaagtccaataacacttcacatgcagttgtgagaatatttagtacacacacgtggctgcagctgcccccctgccccgagttccacaacctgactattaccaggttgcgcttctccaaggacaaccggcacctactaagtgtgagcagagacagaatgtgggcagtgtggtacaggaatgacgacgatactttcaccctgaaatactctgaccagaagccgcacagccgtatcatttgggatggcgattggctacctgcatcttgtggaactgctttcgtcaccgcatccagagacaagacagtgaagatatggcgcctcgatggacaagaaggccgttttgaggtcgagagtaatctgaaactaaaagaagctattaccgccgttgcagtcacaccccgcttaattgagggtaggctacttctcgccttcggtttagaaagtggagcagtacacatctacacctacagcgagcgtgcatttcttcaggtactccaactagatagcgcaatagcgccggcagacaggataaacaggattcgctggaaccctgcacatcacaaagagaatattatgctttctgtagcgagtgccgattcgtcagttcgcatttattcggttaaggttccggctgtactaggcaattgaaaaaaaaactatgatgaaagcgggaatttcacccggagcagaagaggtgaaagttggtcgaagtcgtgcgcactgcgttattgcattattatggattttcagttgtactgcgaaattactccatcattatatacagtgcaatcgtgatgtcaccacgtttgcagcgcacctaaatatgaaacggctgaaccgaatagataatcgtcgacacacgaataccagcatgacaaattattggccagtcaccatcttagctgtgacaccgtggaaagggcttggacctggcagtaggtccgtcggattgtttccgagttccgtttgcacgcttccccgcactggacactgcgctgatttctgaacaccgtcgccgactccttctcgtactgtatgcgagaggtacgagatctgacaccctgccttcgtgtactttcactcaattcccccaccaccttctcgatagcttcgatctgccacgcatccgttctttgtagcaccgttcgagattccagactgcgcttgggatcgcgacgcggccgttgaactgtagatacctgtgatggcggcccgcggtcggccacacggcgggactatgacgctaccggtcgaccgggcacagaaaatgaagcggagtaccgctaacaagcttaacttcaatgtggggaaggggctgagagcacacccggttacctgggggagaagtcaccaatgccacgtccccgccagggctgctggggtaccagagatctggatatgtgtaagaaacgggcctatctcgcggagcacggttaggcgccccccacaagtggggtattacctgacggccgcccgcacacatcttccacggacagcgctgaatacacaatggctgcctccaatcagcccaatgcacctcaagcgcctccattatgggacttccctggtcctcgaccacaactgtggttgccgatcctggaaaaaagtatcacatccgtacaccacaaaccctcgagcgccagtgcatctgtccagacggccgcgacgttacgcggccgcaggcctagcacatcgtggcccactttattcgcgcacctagtgtacgtattgtccctgtgcattgatcctgccccacatacttcatccgcaagcggcggcctcagctcgaaccgcgcctgcagcggactattttttccgctgacccgacgcctggtgctttgttacgtgctagccttgaatcagcgtttctccactttgctgccaagctcctactagggtcggtgtggctccgactttctttaaaatgtccccaaatcgggtattccatagcttgcgcgcattccccgcttgcttcatggtggtgaaatcaagaaaacaatgtaccccgttgaaaaccgttgaacaggcacagaccttttttattttttggttcctgggtaggatacgcagttttctatggcgatctggggcattcatttgcctatacaacggccgtatcaccaggacacctgggttaggtgacaggtccccccaacaagcgatggccatgaccccaacaaatgtgtcaacgtcctccactcagacgcaggtatacctgacaatatacgagcatgtatgacgataggaagcctgcggacgctggatcattgcgtacagaagttgcatgtacgcataggacgctgggttatctttaggccgagcgggcggtggatgcgcgcaggtaatatttgaatatcgcagaggaaaagatataaaaggcagaactgcgggctgggatgtagagctcatgttccagagaccaagctccatcgcctctcagtccaatgaagctctcgcctttctgtctgatcttttctttgcttgcgtccgtcaacgggtattccgtcgaggtgtacaacgagctgaagcactacgcgtatatatccaatgctgcgtactgcgtatccgcgcctctgcttccaagcatgctacagaaaggcagtgtttttatggagaaggacggcttgcgtgtgctcaacgtcttccagcccaagattctagacgagcgtgtttcttgcagtggctacattgggctcaatgataccgctaagaagatcgtgattgcattcagaggctccgtgactgttcctgactggcttgtggacttctctttccttcctaccaactacgtgccagtgaagagtgacaagcgctgcgagggcacctgcctggtccaccatggtgtttacgatcaattcaaggttgctttcccagacatctacgctgttttccaaaagatcgctcagcagcaccccgactacgaagtgactgtcacgggtcactcactgggtggcggttatgcctacttgatgggcttggagctccagctacttggccacaagccacatgtgatcacctacgccggcctgcgtatgggtaacgctgacctcaacaaatggtacgacaaggtgttcgacaacgtcaagaaggtcgaggacttgaaaaacggcggaaacccaagaaacgcctacatccgtgtggttcagagccgtgacattgttcctatggttccaactggccctatctacacgcacgcgggtatcctatttaccatcactgacgtggacagcgaagtacctctacaatcgggcgtcagacttgatggctgtaacaccaagctaaaggagttggtcggcgacatcctcttcagcgggaagttgctaagcttggtgcgtctcctagaccacaacaaatttttcagaagaatggctttgccatgcactgataattccttgaagctataattccgaggaagtaatgaattttaagtaccggaacgtgcagtcgctgcagtcttctgcctcttccttatgccctatatagttaatttgatgttctgttctatttttttacattttccaaacactgggaatgccaccttgtagatgttgttcccaagatggatatttagcaccacgcttgtaattttagatgcgccctcaacgctgcaccaggcgtctagccagaccttatatagcaaaacaatgcctggagaataaatacaagcgcgccagctaaaccaatggctgcccatagggcacattaaaaattgaagtgacattctttcgccttaaaacatgcagtatttaaagtcgcgaattggttcgagctcgtggaacttgatacactgccataaggcggattcaaggcgctcattatcgtggaattcgtcgtagatccgagaaagataccaccatacctcaggagtgtggtagccatcgatcgatttttcaatgcagttctctagaagcattttcagctgcgcgactgccgccgacctgtccttgctgtttgcgaatgggtcactctccggttttggggttgcagtgccgatgataggcctgtgacgggcgatacgttcaagagagccttggtcctccgggtaaagtagtttcgcaagacccaccacggcatctacattggttgggtcgaaactcagagcattttgaaattccgacattgcacctttggggtcacaatgcaatttcaggtagccgtgtgttatgttcacgttgagattggtgaatgtgtcagtcactcgcttggcctcatcaattgcctcccgggcattttgtgcatctccatcctgcagaaagagccgcgctgagaaaaaccagatcgcttggaacagatattcttttgtttggttgtgtgcaggaccaagccgcgactcgtccttggttttattaaccttcgatgcaggaaagagtgacgcatatagctggtaaacttcagacagcatttcgagtgcatccttaactccaaacatttccttgacgaggaccagttgggtgagcttaatatgtatgaactgccacttgtccgccttgagcagattgctttcttcatgtgcctccgccatcgccttcaaaacagaacaaacgatcttgaatgaaacgtccttgtcctcctgaatagactcacacaaagcaagaagatgccacgagcggtagtctgctggttttatgttcaggatattagtcttcagaaagcggatgcacatgtcaatgcgccttatagatgcaagaacatatgcatagtggaacttcacgtctatattcaacgggttgatgcacatagcattggccaggtagtaggtgagcgagaagtccaacgtgggcttcagcgaatttcgctctatgcgatatagcaaaaaccacgagtctgaaagtagacgggccagcttaggcgggacaactacctttgcagagttcgacagccaatccgcactgtgctccttcggtatctgctgcagacgatagtcacgataaaactcctgtagaatattgcgcaattgctcaaaggccttcgccttgttgaaaatgtcgccgatggcctcgggcagcgaggtcagctgcagcacaaacgtataagcatccaggagcgaaacaatgtcgtcatagaagccattgttcatgcggcggaagcgctcactgtagttgaagaaatttaagaggttgagtagcgccagcttcgtgtcgccaaaccggcggtagtaggtcagcgctgccttcgagacgttcacgctctggaaagtaacgcccagcgaatccgtgatgaacccttcccattctgtagaacgcggcttgttattcttgcgcagatagtagttcagcaccgcatgaaactcctccagcattgtgctgttcttctcgctggcagcggggaagcgggtgcgcgacaggatcgcccgcccctgctccagcagccattggtctacgccctcctcctcccgcacagcctccagcaggtatgctagcgggacgcctccaaactcctttaccgcctgccagcgctcgcactgcacccgcgccaagaaccgctcgagatagaaccatgtcagcgtgtgcgtttccttcggcaaccgcgccacgtcccggaacacctgctgctggtcctccacgccgatagcctcccggtaacacacgttttccagcagcagcagcgcccagaactccgggtattcgcctcgcagcgcccgcagcgcgcccagtttcgccagccaccgcgcacactccgtctcatcgcccagctgccggtacaagattccaaacacgttccccatcaccgcctgctccagctccatgcccttgctgctgtcgatcttctcggcctccgccagcagcacttcccacaccgaccgcttggtgccccggtcaaacgcatggtatgtcactcggtagtgcagttttagcactctgtccaattcctcgctgccactgccaaataccccgcctcccgcagcacgcaggttaagcgcccattcaattagatccatctccaggctcatggtccccacgcagacgccagcaatgtgcaagcatgccagacacctgtcctcttggactggtaagacactggaaatcgcggcaatcattaatcactacatacgaatctgatacacatgtccggacccgctcttcacgacggcggcggcgtcgtcgtcgtcggcgtcttcttcttcttcttggcagcgtctatctgctcgaccttgacacccttcatccccttctcctctagcagcgcgtggatgtaggcctcgacctcgtccgcgatgtcgccttgaaccacgacctcctctttcttctcgacgttcttggacacagagcaacccgtcgcgaacttggacgcgaaggtcttcgccagcttcttcatgtcaatctcgaagacctccaggccggccacaaccaccatgcacttgcgcttggtgcgcgcctcgcgacggatcacgactctggacgacagcttgcgcgccagctcgcgctgctccttggactcctcgcgggcctgcagcttctgcagcttcttctccagctgctcctcgcgctcctcgccgatggacgattgaccgagacgcgcggcgacgccgtcgacgtcttctttgtcatcgccgtagagctgcgcgaacaattcctggtcgtgctcgtgcagccagaccttacagcgccggatcttgccggtgaactcgcagtactcgggcggcagcgagcacacgccacagtacaccactttcttcagcatctttgttgcgcaccgtcgcgggaggagcgtaagaaggtttttcgccgcgcaaaaagcctgccacaagccaccacgcggccatggagacaaacacggttatcatcgcctcgcgggcggcggacgtgaccgccgacgcgtttgtcgagtccttcgaggccctgctccaagagcacgtgttgcggcgagcacacgtgaccgctgaggagccgttgcagctgtgcgtgctgcccaacatgcgccgcctggtcgtggtggcgccgacggcggccgtggcgcgcctagttgtggacgcctttgccgcacacggcccaccagaccgcgagcacatgtgcgcggtgggcttttcgctgctggacacgccgcgggaaagcgcgcacctcgcggtgccagcggcgcggcgcctgctgctggtgtcgccgccgcagtcgccgccaccggagttcgacttcagtcgcctggaggacgggccgcaccgtccggcgcaggtaccgggccaggacctgccgccgggccagcctgtgacggtgctggcgccgcccaccggcgcgaagatcgtgctgcatccgtgcgagagcctggcaggcgccgcctcggttgagcacgtgcacacgacgctcccgccgcgctcggtgttcgacgacgaatagctcagtatgtagtcttgcaatggcatagccacaaacgcagagaacgcgtcgcgcagcacgcagcacagacgccggcgggtcgccggcaggccctaggcgggccctaggcgctaaagcgcgggctaggagcgcgggctggagctgaagcttgcgacatgcggcactggtgccgccgcgcagcggtagccgccgagcccaacgcacgtgaccgcgcccgctggcgcagacggcacgtgacctcatcgcccacgaaccaatcagcgcgcgctatctgcagcgggtcacatagcgaaaaaatatcgccatatactgtctagcgctggcctcgccaactgggttatagctgagcgcaggaagttcgccaattactccgcaatattgcgtgccaagagcctagctagcgtagacgccggtgaaatgttgtccagaactgttttcagaagtgctgtcctgaacagggcactgttgttgagatcggcgggcgctgcgcctgtggccgggttgcgcatgtgccagccgctggtgagcttgcgcaagtactccagccaccacgacgaggagacgtttgaggaattcactgcccgctacgagaaggaattcgaggaggcatacgacctgttcgaggtgcagagagtgctcaacaactgcttctcgtacgacctggtgcccgcgcccgttattatcgagaaggcgctccgcgctgcgcgtcgcgtgaacgatctgcccactgccatccgtgtgttcgaggcgctcaagtacaaggtggagaacgaggaacagtaccaggcctacttggaggagctcagcgaggtgcggaaggagctaggcgtgccattgaaggaggagctattccctgagagctcataggcttgccgatgtagagcgtaagtagcttaatatacgaagaagcatgtatggatgggtatatatctattccagctcagacaggaacttctcggcatcgagcgcggccatgcagccggagccggccgaggtgacggcctgtctgtagcgcgagtcctgcacgtcgcccgcagcgaagagcccggggacatttgtgagggtggagccgggcacagtcttcacgtagccggactcgtccaggtcgacctggccggccacaagctgcgtggcaggggtgtggccgattgcgtagaacagcccgttaacgggcaggtccgactcctcaccggtgcgcgtgtcgcgcacacgcagcgcgtcgagcagcgagccgtcgcccttggcctcgaccggagcggtgttgtacagcacctcgatcttctcgttccgctccacgcggcgctgcatgatcgtcgacgcgcgcatgtggtccttgcgcaccagcatgaacaccttcgacccgtacttggtcaggaaactcgcctcctcgcacgcggagtcgccgccgcccaccaccgcaagcggcttgttgcggaagatcggcaccgcgccatcgcataccgcgcacgcggaaatgccgcgctgccagtacgtctcctcgcccggcagccctagccgctttgccgacgcgcccgtcgccagaatgatcgcgtccgtcgtcgtcggctcctcgtcctcgttgaactccgtccacagcttgaacggccgcgccgacaggtccaccttcgccaccgtctccgtcaccacctcggttccgaacttcacggactgcgccttcatccgctccatgaggtcgctgcccgttagcccgtcggggaaccccgggaagttctcaatctccgtcgttgtcgtcagttgcccgcctgcagccactccgttcgcgaacatgccctcgtacagcgtcggcttgatctccgcgcgcgctaggtaaatggccgcagtgtgtgcggcagggccggagccaatgatcgtaactttgtgatgcaccattcgtgtctgcaaagcttgtcccaaccggtatcttgttgctgctgctagcatcaactgtgcaccgctaagtttcgctcgcgcttgctggttttatacctctgggcttcaccatcggtgaaccttgatcgccgttactatttccgacgcttatgtccgcacctgacaaattcggcttcgcgggtgcgcgactgcggtcacgtggggggtgcagtagcaagatccgcacccgcgggccgtgaggccgtccgccggcccgtctcggcggcccgccggcgcccgcgcaggatgcgttgcccgagcgcacagcgcgggcccggcggctgtcacgtggtgcgcgcggccgacggagggcaacggcagcgttaggctgggcacactaggctcggacaggcacccagcggtgggcagctggcggctcgaggaagccgcggacgaccaccggtgcagcggccacgagggcgcggttcagcaggacctgctgcaggaagcgctcgagacccgcgcgccgtgccgcgagccaggcacggtctaggttgacgtcgctgtagcgccaggcgtcgtaccatggcactggagggggcagcggcgggacggccctgcgcagcggcgggggcaggcacagcagcagacgctcgcggaagcgcacaaagtcgctgtagcgcttgcgcagcgtgagcgagcgcggggtgtcgggggagtgaagctggagcgcgacggtccagacggcgaagcggccctgcagcggcgcgcagggcgtacgggcgtcgactatggtgcagtcgccgaccgcgactttggcgacgtgcaggccggggccggcggggtcggggtcgtcggccacgcggctgacgaggacgaccggctcggggggcaggaattggatgtgcggcatgctgatgtgcggaggacaggcctggcgtgcgtggctggtttttggccgcctcagcgtgcgggtaattgggcgtgttgcgctacacagcggctacggagctagataaaggttggcagtggctgggcggaccagtcccaggggtcgttgaagcgcaggccgcagttgagcgacgagagctcgcgcagctcgtcgtcagcgagcgtgagggcctcgtcgacacggagattggtggcgaggcgctccttgcgcgaggacttggggatcacggcgatgtcgcgctgggtagcccagcgcagcagcacctctgcgggcgtggcggtgtggcgctcggcgatgcggcacacaacctcgtgctgcagcagcggcgcggcgttctgcgccgcggtgttgccgagctcgaggaaggactgcggcccgagggacgagtagccgacgacggcgaggccctcgctcttggcgtactgcacgaggcgctcctgcgtcaggtaggggtggtgctcgatctgcagcgcggcggggcggatgcgacacccgcgcagcaggtcctgtaccaggcagccctggaagttcgacagcccgatcgcgcggatgcgcccctcgtccacgagctgctcgagcgcgcggtacgtctcgatgagcggcacgggctcctgtgcgaggcggccggcctgctcatcggcggcgccggtgtacagtccggcagggtagcgctcctccaggggcacgaacttgaacgccagcgggaagtggatgtagaacaggtccaggtagtccagccccaggtcgctcagcgtgcgctgcagcgcctttcccacgtcctcagggcggtggtagttgttccacagcttggacacgacgaaaagctcctcgcgccgcaccagcccctcgtcgatggcgcgccggatgccctggcccacctcgcgctcgttggcgtagtcctccgccccgtccagcaaccggtagcccagcttgatggcctcgtagacctgctcggccgcgacctcgttcggaatcttccagcacccgagccccacgaggggcatgtccgcaccgttgttcagcttaatagttctgacgttcatgaccattgcgatgtcctggcctgtaatgcaccttgataaatctggtggtgttccacgcatatacaactgcttatataccattcccgaggaagccgtgccgttctcgttcagtagacgtcatggtccccgtgtcagcaggttgacacggtcagccgtgcatgaacatgctctagaaggggaatgcaaagcaaatagggtattcgaaagcgccggtgtgacgggtgtaattagtgcgacaccagcggactgccctcggtctctggcgaatactctagctgtttgtgctgccctttctggcggtacaggaagtagtgctgatagacgtagatcaggtcgaacacgacggtcccgccgctgcccattataaagggcagggcgttccagacgtaggccggcttgtccgggctagcgaggaactcgcaggatgtgaacacggacacgcagtatgtcagattggccgtcaacgccgcgaggaagagcaagggagacagcccgtccgtgctcttgcggcgatagttcttgatgagctgcgggatgcgcgaaaagaagtagaatgacgcgcccacccacgaggacactatgccgaacgggtcactgctgggcagcggcagcggcggtgcggccaccgagtcgcggcgcagcagcggcgctgccgctgcacgcccaaccaccagaaacgaggccagcaggcccttggcgggcgacggcgccgcgaggtggcgcgcacccggcgctgccagacggttccgccagcgcacgccgtagtagtagtactggtagcacaggatcagatctgtcgagaaatagtagaaggcctgtatgatctggaacggcagttggtgcgtcagaatagcgccgaccagcgttgtgatgtcgcctgagatccagcacagcaggcagagtggcgacagcccgtcgacagacttctctttatacgtctcgaccacctgcgggatcgaggcgaccaaactggtcgtgaacgaaaccacgccgctagcgatgctgatcactggccatatcgtggccgcgcagtccgtcatacgactcatggactcacgaagatcttcgaggttacgggaggcgtgcgcactgagtcagctcttatatagctcgacacaaattccgttcctacggccagcctggaaatcctccaggcataagcttatcatgttgacgtttacttaatacaagcatataaaaagaaatattatgtttagagatgagattacaagtcgagcaactagaactttttatagttgtgatgccatttcttgataaaggttgcatgcacgtcccccaagtcgccttgttcgggccctattatctggaaggctgggtcgacaaaagagaggtcgtagagattattgaagccaaaatgatagctgagaagcactgtaagagtcagggcgcagataatcctatagttgacaacaacgtgtagatcacggtagtagtcccagtccttgccgttgagcttatcgcggatgatggggttgcttttgaagggttgtgagttctcggccacgataatgtctagacaccacatgaaaacagcgtggtctaggcgggccatgaggtgccaccaggtcgtaaagttgagacatttggagttaaactcctgagcgaaggtcttatctgcagacagggccgtcgaaaccgttccgcgcgaactgatgatgcggcggtcgtacttgtccttggttgtctcgttaaagcaggtcagctgtaggatgttgaccaggacccatatctcgcgcgtggagtagcaacctacctgcagcaggtggtgcacgagcagcggatccccgagcaggagtccctggcgggagattgctttcagctgcagcaggtagataaggtcgtcggctggggcgacgtttgcggtgcacggcgtgcacgccagcatcgcctggatttcggccaattttgcgttggggaactgcatggatcggaagagcgcatcgacctggtcgaagttgtcgatgtactgttcctcgattagcttggcggtgtcgctttgcagcagcgtggtgtagatctggaaccgggaatccggaggcaggcttgtctcccagcatatcttttttagctcggtcagcgttgactttctaaccagaccgcgttcgaccagctgggcgagccgcttcctgttcttttcatcccgggtgtcgcgctccgcgcgttcctttgttctgtcaatctgcgagagggatgcaatgtcaatggtttggcggatctgtctttcgtgccgggcacgttcttcggtgtccttgggagggagccacgagggcctcgaattggagcagaccgccatcttgccactggagacgagttttaggtcctccattccctcgtcgctagccgccttgaattcaattggcagcagttctgcggactgactcctttcgtagagcttcgacttggacgtctccttcgacgtgtccaggtatacacaggacagcttcttggacgtctctgtgaagaactcgagatccgaagtcttctgtattccggggatgggcgacggcggcatggtgtggtccacgtacgtggagcttcgagaccgggccacacccggcctgcgatccgtgtgcttctcggaacgctcggcggcagccagaaagggtcctgtcgtaggggacacaaccggcacgtcccagcccaaataatcactgatatcctcgctcagctcgtccaccgcgtgcggcaaccccagcacgcccttcagggatgcagatcggccccgcgaaccccgctcctgctcctcgtagaagacctcgcgctgcttgatactattctgcagagcaaccttgttctgctcccgccgcagccggtaccgctgtgacggtgtcaatgccttacttgtagtcaccagcgccggcgcagtccgcgagaaggatgccacagagtgcaccgcgccccccgcgtccgcgcccgccgccgggatgtgcaggctcgacaatgacgcctccatcccgcccagcgagagctgcaggcggtcccggctgctcgcaaacaggtattttttgcacggcgcgccggtggcgctctcctccgccgcctcgtgcgcctggctcttctcgattaccaccgacgacccccgtgacgagctcgacgtcgacgcagacatgtcgaagtgcgtcgacagcgtctccgccgcctccgtcacgattgagtcgttcgagatgggccgttccacccgtcccgcaaacagtttcgacggcggcggttggaagtccaatgcctccgccgtctctgccgcctccgccgcgccgccccgcgcctccccgccgcgccccagcccccccgccgcgcccgcgccttctcccgcgcgccccgcatcgccgcccgccgccctcctcctcagggggcgccccagccttgtgacatccgccgtgaacatgctggctccttccgaataaccgtctacccccaaaccgaaagcgtcctccgccatactttcatccagcgtacccaaaactgatggcataccaccttcgcgtagctcacagtcacgacgaacgcgcacctcgctgtcaagtcctgctactcttgcggagtctcgagagagtgcattagcccaatatattgtcaaaaaaaagcaactgaccttgttcttcagaacgctgagagaatgtactctcttgacttgaaggcaagacgaggaatcggctggcacttccattctgacggcattcgatcacatgggaatgtcatggtgaatgtggaaacggaagtctacatgggtacatagtcgtaaagatcgtagatgattagtaaatacacctgaagtgacacctggcatgtctagcgctgctcgtcgtcgtttgcgttcgggatgtgggtgggcaggacagccttcagggcgttttctatgaccgggaggccgtcttcgaacatcttgagcagggcgtcgagttcgcgcaacaccaatggctttttgtcgacgagatgcgcgtcgtccaggtcgtcgacatcgacgaacatgtccatggggagcatgcggggaggcaggtccatatagagcggagcctggacggtgacgatgatggtgttggaggcggcggccggcggtggggctggggcgacggcgggctgtgcgggctgtgcgggcgcggcggcgccgaggctggcagaggggtctgcgggctggggcggcggggcgcggctggaggtactggtgctgcgcttgagcttggcgccgaagtccgcgctactcttctcgttgagaggggtcatggcgacaggcaggccggtgctgctggtgttgatgccgaactggttgatgttggcggagctggcggagccgccgctgttcgagtccgcgtgctcgtctgcggcgccggcgttgaggagcttgttggggatgagcgtagtgggcgagggcatctggagcttgagattcgggtggttgcgcttgaactcgcggctgacgcggtcggagagatgcacgtccttgtcgcccggggcggcggtgccgaggggtccagcggcaccgggcgccatgggcgggacgagcgaagtgcttgccaaggactgctgcagcattccctccgcggagctgtgggcactatgcacggtcttggcggaggagagcgggagcatgccctgggccgcagcgcctggcggctcgctggacgccgtgctggacgtgctgcggtcgggggttaagttcgaggcgacaccgctgcgggagggggagggggacctgtcattgcttctggacgaggagagacctgctcctgcggttccctgactagggccattgggggggatgtgggcgttcagcgtcacggtgcgcgtgagctctgcgccgagactcttgttcaggccgctggcttccgatctggcggcgaccgccgggttgcctccgagtgtgggccttctttgtagccccgatgacgcggacgacgagacggttgcagaccgcggcttgttcttgagcgtcatcgggtcaacacctgccgtggccccgatgggtgctgcggttgcggtcgtcgtgcttagcgggagctcctcaggaatttcgatctcgaccggggtatgtaaagcagtagagctcttgggaatagagagggccttgaagtttgtctggagcattgggaggattggcgtgctctggctatggtagcctggcccgttggccaggatgtcgtgcctggggatagcagcacccattggaggcgcaccaaggggtgtcgaggctgcggtgtcgctctcgctcagatgcattgacgaaagcgagcttgcaaggtgcggcaatccgctctccttttcctcgttgatcatttcgctgtcctcgaacagctgcagtagctgcttagaggccttgctctctgtcttcatgctctgagagatagtaaacgtgctcttattctggcagttgctcgtagtgggggttcccgtagcaagttggttcatcgcttggatggtcgaagagttgcccgcagggtctgcaaagctcttgctcaccgtagtcccctggaaatagtgtcgcacgttggaatggaagtatgtgtcttcgtatgggtatgcataattaacttcgtgttgggttctgccccagtcgctctcctgtggtatcgcgtctatgctgatttcattctgcataatgtactcgttcgagttcagtgaatcaaagtcccacttcatctcaacttggttgtcgccgccgttggtggtattattcgcggacttatgcgggtcatcctcgtctagcggaattagcacgctttccctgttgtgtttctcggagaatagcaaatacctggagatcaactctttgagaatcgtggcggagctgcccttatgcgctttcacaaacttggaggagagcaggtcctctgcagtgggccgctcctccgggtcctcgtcaagacaaagcgcgatgaactccttgagcaacggcgagtagttcctgccctcaagtcggggcggcttcgactttgttatgagctgcatcgcgcgcagcgcctccacatcgcagtagggagggttacccgtggcaatctcataggccgtgatacccagcgaccagatatccgccttggtgttgtagtacacaccttccatgataacctctggcgccatccagtacggcgtgccagccatcgtctgccgcttatggttcgctgcggtcagctgcgccgcaaccccaaagtcgcacagcttcacgtggccctcgttcgtgattagaacgttagccgccttgatatcccgatggatgacattgtccttgtggatgtacacgagtgcaatcagcagctttcgcacaatcactcccagatacttctcgtcaatctttcccgggcgtagcagagtccgcagtgacccgcctgcacagtactccatgatcacccaaagcttcgtgtcatacaggtatgaaccatagtaccgcgtgatgttcggcacctgtttcagcgacgcaaggaactggatttccttctgcacgtcctccacctcgtcctccgggcagtccaagttcaacaccttcactgcatacacctgtttcgtcttcgcatggtatgctttgtacacgacaccaaatttaccgcgaccgatcacttcagtccgcttgaacagctgcggcgtcaggctgttgctgccttgtcccacgccctgctccttgctcccgttgctatcgttaggcattctaatactgatccagccctcttttctgatccacgcctcgatccgaactgcgctacctcgtggatgcaaagtgatgagtggtcgtcccagtgatgagattttctactagtattcgacaagggttaaatagctttccaccgtggaacacgatgaaatcaggtgatgagatgatgccctcccaccctaccgccagcgctgcgtctacccgcttacctgggcttagcaagctgttattaagctctcttggcgcggttgtttgttgtgtctttgtctggcggatttatgcacggctgcgggcaaaaccgttgagaagcagcctacagcgaaaaaagtagacgcatgaagagcgttacaggtgcatatcgtcgcgagacataagaaccagccggttattgcgatgcggagggctggctttcaggctagcagcctcctaggccgaatatgctcgagcggattgaactgcaagaagttgacggttgcgttcagtagcaatgagcacatggcgatgtcgagctgggctggagaccttggaagacgaataggcactcagctgtaccggcgcgagaacgtcgcagagctgcggcggctgcaggcggagctgcagcagcagtggaccgcagccggggatgggcgggcgcgtgcggagctggaggcgtgtgcgcgcgatgaggaggaacgggcatttttccgcctgttgatgccggcgagcgggccggaggtgacgcagcggctggaggaggcggtcaaggaggtgcttggcgggcggagcagccgcgcagagaagcgcgagcggctgtactgcgcgatcgcgctcgtggcgcgggagaacgcgggtcgtggaatcgaggtgccggaggctgcgcaccggtggttcgcggcggatctgggccgcaacgagtactttggccacatgcaatttctgatcgagcacggggtgcagttgaatgcgccggctgcattccagctggtccgcacgatgctgcgtagcgggtcggagctggaggtgcagcttgtgtcgttcaagctgtttctgtacgacaccgaaagccgtcgggtattcgaggagaagtttgatcgcgtgtacgacttcatgcggatgcactacgttatcacccagatggtggtgcggcgcgactttcggttcatgcgcgactacctggaggtcctggcgcgccggctcgagcaacacgagttgtgcgatgcccgcatgtctgccgctgtgcaacgggaccacattgcccgatacaccgagctgctgatgctgtatgcgcggaagtctggggatgagaaaatgctggcggagctctttgcctccttggtcgatagtctgcctcgcgggatgggcggagccactcttcgtcagccattgcatgaagtcatgacgtacctgatcagcgaaaaccagccgcaacaggtgctgaaactggtggcgggcatgcgcaaggcggagcccaatcggcggccgggcaaatcctccgttccaggcaccttggcgctggttgtttcggcgttgcgacagttcaacaatcctaatctcgtcgtgagctttattgtgcaggcatacagaaagacgcaaacgagagtgctgctgggacaactcgggctatggtctctggcattttatggccgcgctgttgcgctctctcccgaggcggcgaagtcgccgcaggagctggcgcagatatcgcctgtggacctgccgaaggagctaatactgaagtccgtacctgacagctgtataatgtgcgagctctatcaggcgattctatccgagaagcgatcgcaggtgcccgcggaggagtaccgcgagattttaatccagctatttgcgctttaccaggactttatggggaagctggttcacaaatatgactactatcatttgtacgacaccagtgtcctccgcttgctgctttacaagatcaagaacgaggttggtgatggcgagttggcattcaagctcctgatggacttctatgggcaacctaaaatgcggccaaagtgcaccgcggaaggtaacccgttcggcgtggtgctataccagaacaacgcgatcacgcaaacacaattaaaccaggctcttgcgctcatgggcggcctgcgcatcccaatggacttcaagaccacgtcgagcatggtgctctggtatgcgtccgcgggcgacatcgatctggcccacacctggtacacgaagctggtccgtggcaggttccagatgaaaaaccgccgggtgctgaagctggcgctagcgcacggctggacaatccctgcgtatgccgaccagcaactcgtgtctgagctttcgcgcgcggataattcgagcgacggcccagagcacacacaagaagctgtcgaaactgcagtcttagaaagcgaagaggcgtcagcgtgcaccagcataatcatcgagaaggccgatgagctgttgcacaagatacagcagacacggcctctcgatccgccaagcgataccagatcggcagcaccttgaagcgacttcgagcgctgataccaggcagccgtgcttgcatacccatgtaaatattgcatctttatgagatactccggtaactctgtattatgtccatagctccatctgcagcatttactcttcccgccagtgccagctgaaaaatttcagcggccatagcgctcatctcatcgcctcgagccctcagcaagaagcggcgagatggtagaagaggtcccagatgtcaccagaatcctaggcggtatatatgtgggcagtgtgaagcctatcgtgaaccacacgcctctaaagggcatgttcaacatcacgcatatactctcggtgctgaagttcaccgtgatcccagagtacttggtcagaaagggctacacgctcaagaacatagccatcgacgacgacgagagcaccgacatactgcagtacatcaacgagtccaaccggttcattgaccagtgtttgttcccgcacgaggaagaatacgaccctcgcaaggtcgacttccgcaagaagaagcagcatggaagcgtatacatccactgccaggccggggtttcgcggtcggtctcctttactattgcgtacctgatgtatcgctacgggctcgacctcaagtccgcgctccacgcggtgaagcgcaggcgcccagaggcgcagccgaacgacggcttcatggagcagctgcgcatcttcgaggagatgggcggccagtacgtcgacacagcgctgccgcgctaccgccattgggtgctgcaggcctcgctgcaggcagacccgaccggcagcggcatcctggcgagggaggagacctaccgcggcgacggcgaggaggacctacagtcgctttcgaccgaggaccgccacaagctcacaatgctgcgttgcaagaagtgccgccagcggctcgcgctctcgaccgcattcatccagcacgagccgcctagcgcggagtccagcgagggccacttcatccggcgcgccgccggcagcaggcgcatcatcgacatccagcagtcgcaggaccagtgctcgcacttcttcgtcgagcccctgaactggatgaaggctgagctgcaaggcaagcaggagctggagggaaagttctcctgccctaactgcacgcagaaggtcggcggctacaactggaagggctcccgttgcagctgcggcaagtggatgatccccgccatccacctgcaggccgccaaggtcgaccaggtcgacgccgcgcgcctcgcgctgccgaacctcgtcaacttcgaaactaagcaatgatctgtataactattagactgctactctagataccgctcgcgcgcgccctccgcgcgccccgcgttcaggctggacacgcgcgagccctgcacgggcccgcccagccccgcgctgcccggtacgctcagcgacgtcagctcagccgcctccggcggctccagttcgtgcgcgtacgccgccaggtacgccgcctccggcagctgcgagtcgccgtacagccgcgtgcccgccggcacgcgctccgtcggccgcggctccactgtcgcctcctcctccacccggtcgaactcgtcgtcgtagttgtagctctcctcctgttccgactgcaggccgcggtccaagtcgaacgccatgtgctccagcgcccctgccagctcgtcccggttctccaccggccgcggctggcagtcctcgggccccgccgccgcgggttggttctcctgccgcccctgcttctcccgctctagctcgcgcaccgtcttgccgatcccaatcggccggatgctgccgtgccccagcgtgcggatgtacgccagcgtccgctgcgcaattagctcctccaggtcaaactcgctgaaccgcgcgctcgtcgacagcggccgctgcgagtacgtcgagtacgccgacagcggcgcgtgccgccgccgcttgagcttcgccacgcctgcccgccccccgcgccgctcctcccacccccgctccgccggcgcctgctgctcgaggtccccgagcaccggcagctccgctacgctgcgctcccgctcctcgctcgcgcatccaagatagatccccagcgcctcgatcgccatcgccctggttcgcgcagtctgttgtcgcacgcgttttcgcacttttgtgcagcgcgtggcagcccgacggctgccacgcgctcctacacactgctgctacgtactggcgcgcgcgcctagtctagatgcgccggccgcggcgcggccgcgcgctcgtgggcgcgcccctcgccctccgcgcctgcaacctcctccagccgccggaacgccccgcccaggaacccgtccagcgccgtctcgcgccggaagtacgcgctgcgcgcagctagcgcggccagctggtcgaacaggtactcgccccaccccaggtaccgccgtatgtagttgcgcaggtcagaggcttcgtacgcgagcacgtagcccgtgctgcgccgcagcccggccagcaccatcgccaccagcgcgaggtcggcgctgaagtgcaccatctgcttgagctgtgcgggttagtagcgatcccagggcggtgcggccggccgacatactgagggcattgcttgctgtggtcgtgtggttccccagttagtgaagtttggcctggccatggctataaaaattttggtgagctctgctagccagcagtgcagagcagcggcgagagggccaaggaccggaagctgcaagacgagcgggatgagtatcgggatcaacaaagacacattggcggggttccgggcggtcaagtctttcaaggtggcgcagaaggaacagggcccgatcacgtcgctgtcgttcgacgaccatggacagtaccttctgagcgcaacggcgtgcgacaacatgcacctgtacgacgcggccgggtgccggttcctgaacacggtggcgtcgaagaagtacgggtgtcacgcggcgaagttcacgcacgcgcagagcgagtgcgtgtactcctcgacgatgatctcgttcgacatccggcacctgaacctcgagacgaaccagtacctgcggtacttccagggccacgaggcgctggtgagcgacctggcgatgtcgccgctggacgacacgtttctcagcgcgtcgtacgacgagtctgtgcggctgtgggacctgcggacgtcgaaggcgcaggcgatcgtgccgagcgtggtgccgaacagcgtggcgtacgaccccagcgggcttgtgtttgcactggggaacccggagagccaggagatcgggctgtacaacgtgcggcagctgaaggcggggccgttcatggtggtgaaggtggacccgcggttcagccagtggacgaagatggagttctcgaacgatgggcggtacctgctgctggcttcgtcggcgggacggcagctgatactggacgcgttcgacggcgcgcagctgttcgagctgacggggacgaaaccgttcccgctgcgcgagttcatggacgctggatcggcctgcttcacgccggatggccgctacacgctcgggacggactacgacgggcgcattgccttctggaaccactcggagtccgtaagccagcggacgctgaagccgcagggttttgttgccgcggcgccgggcacctgtccgcgcacgattgccttcaaccccaaatatagcatgttcgttaccgccgacgagagcgtggagttttatgtttatgatgaacactagtcacgtccggggccttattgtatgtattgatattatagaatttcacttaggtctgggtaccgtatctcgctgtgctcttctgaccaccgcacccagctacgtaggaactgcgactggctgcgctcgagggtctccatgttgccgatgacacacagctggcgccgcgcgcgcgtcattgcgacgttgagacggcgctcgtcgcgcaggaagccgacgtcgaacgagtcgttgctgcgcacgagggagagcacgatgcactccttctcgcggccctggaacccgtccacactcgagatttcgaccagcggatgctgcccgtggatgatcttcttgagcagcgccacttgcgcgttgtacggcgagatgacgccgatggcttcctgtggaacgttgcacgcgcggagctgcgagatatggtgcagcacgaggtaggcctcgttttcgttgaacttcgacgccatcagggcaggcccgcccgcggcctcttccgcctcgggaaagtcatcgccctgggtgtcgtaccacaccagcggggcgctggtatcgtcggactcgtcgacgcccggcagatctgccaacgtctgcgacgccacgccctgccacgcctttagcttgcccgcgtacaagctctcggatgcaaatgccatgatgcgctcgttcatgcggtactgcacgtccagcagcttcttgaactggtcgccgtagtggcgctcgagcttgtcgaagatcgtggttgacaggacctgccggacgtgcgcgtcgtcctcggtcttgacagtcggcggcagctgcttgttgtcgcccgcaatgaccagcttggaaatattagactggtagtgcgagatcaacgggatccagcactggggctccaggctctgcgagacttcatcgatgatgaccgtgtcaaaaagccgcgcacacttgtcatacatgtgacagagactgtaggcgctggacccgtgcaatgtgcacaccacgacccgggcagctaggatcagttcgctcaccacgttgcgctcccgctgcttcagctccttgcgcaggtcgcgcacctcttgccatgccttcttccggtcgcgagatgacttgatcttcctgacgtctgcgatccgctggttaatctccctgcctatatcccgaacaatgctgcccccgtcgccctccttggccagaatatccagcgaatgggcaaggttgccgggtagcaggcgcgcagggtgcccgacacgcagcagctccgcgcccgggatcggacgcgacagcctctccagcacggtgtccactgcgatgttggacggcccacacacgagcacgcggtgccccctgtcgtacagctgccggatcagctccaccagcgtgtgcgtcttgccggtgcccggtggcccgtggatgatcgagatctcgttccgcagcgcaaacgctaccgcgtcccgctgagaggcattgagatccgggttgtggaactccacgccctgctcgggcggctgcgcgtggaacggccgctggcagagcaggtactgtgcaattggattcgagatctcgtcgccgtgctccgccaacttgcgcagcgtcgattccatgcgcttgtacgtcactgtgttgactgtcttcaccatcaccacgctactggccgactgcagctgcagggcagccgcctcgcccccctcgtccagcgccactaccacctgttgcgcgctgcatcggaataccacgccctccagcgcctcatctctgctcttgggagcgaaaacgcgcacgatatcccccacgcccgtgctccccagcaccagctcgtccgccaacccccttgccggaccaagctccgcgtacaccttgccaccgtacccggtccgcacgttctccagctgcagacggctcaccgcgagtccggccgccaccagctgcgccagcggcagctcgcgcagctgccgcgcggtcacttccacatcctgctgctgctcgtgcgcaacacacgccagcagcttctcggctagctctacgctcatgcttctgcccgcctcctcgagtggcgtgcgacagacttcttcgccatgccgacatcctctgcatttttaacgttatataggtgtacttagtgcaccgcgccggtgccctgtcattaggaatatagtgcccatctgttctcggcgcgcgcgccttacatgactgtgaggtcgccgaacttctccttgtagcccggcacctcccacttcccgcgcttgaccatctccgcgaccttggtgtcgatctcggggcgcgcggcagcaagctcgtccacggtcagctcgtcgaacggacgcgcggcctcgatgttggctagcgtctccttcaatgccttcagctcgcggcccaccaccgcctcggtctcctgcgcgtcccgcacggcctgcgcctcaaacgcctcgaggctggaaatctgcttcgacacgtccaccgtaacggggcggtatgcgcggcacgacgcctcgatctggtccaccaccgcggtgttcttgagtaccgcgcggtagtgcgcgaagtctacctccgccggctgcgactccagctcgaagagccgtctgcgcgcctcgtcgttgcgcttcttgaactgcgtcagctgcgccgcggtcttgcccgtcagcttgagcgacgcaatcaccttggcccagtctagcttgttggctgcggatctggctagcgacattgcggtatctacagcgactcggtacctctgcctttcgaagggactgctggccgtgagtactcactgctattggtgccactgaaatattttcaatggcgatccgtggcaacagaccaatcagcgttccggaaatcgcccggcgcggtgtgtgggcggacacacgtgatttaattggggatccgttggtacatcgccggcacgcctttccgaccgtacgatacgaagatatacccgggtgatctgtggcgggccgagcgggtgtgcatcggggcccgtctgcagcgttcgcgccctactcggggtaggcaaggtttgcggcctcgaggaaacaatggaatagcgctcgaggaaaaaaaggtacccctcccaagctgtacttgagggcatgagtattgaccagatgacggattataagaggcggggatactcacgcggatggcagcggacgggcagacgggaccaatggaaagttatcaggcggtggtccagtctggcgaggtacaggagctcgagtacgggcaagcggctgggtacccggaggtgatggaggtttgcgggacactcgcggggcgcgaggagcgcaacaaacggccggcaaagcgggcaccgctggcgtgcttgcgctgccggcggcggcacgtgcggtgccccggggggacgccgtgcgcgaagtgcgcggtggcgaatatcgcttgcgagtacctggagcccagcaagaagctgatagtgtcgatgaaatacctgcagcggctacaggaggacttggcgcgggcccggaaggaaaacgcggcgctgaacgcagcactgcgcgaggagcggggcgaggtggagatgcaggcacggacgctggcggctgaggcggaggaggggatccagttccaccgcaacacggtggacgaggaggacgaggtggtgccggactttgctgagcggcgggggcggctggtggagtcgcggaaggggcagcggtacttcgtgggctcgtcgtcgatgacgctcttcggaatggaggtgcagtcgctggtgccggaggcgctgcagcgcgaccggggcgagttggagagccctattctaggcgccgcgaggctggccgcgccgtctgcggtggatcagcaggcggagcgggtcacgctcgtccatcaggatgacaactccacctacaagctggtgctgaacggtagctatggtggcacagaggagctcgaactgcacctgcgtctgccgccctttgcctacgcgatgcttcttgtcgataccttcgtgacctacaatgatggctgcttctacttcttcaacgagggcatcgtgaagcacagcctgcggcgcagctacgctggccacgtggcttaccaggactacacgctacaggcaatgtggctatgtaaagtctttcttatctttgcaataggcgagatgtatctggggaccgcgaactgcgatctaaatgaacatccgtcgtcgcggcgaaggtcaacgctcccggggtccggcttctttgcgcatgccgcgcagctctttagcattctcttctcaagcgaaggcattgagaacgccactgccgagggcggcatcgagatcatgctactctatgccttttacctgcaggtagcggatcgcactgtaccttcttacttttatttcggcgaggcgctgcgtgcctgcctaattctggggtggcatgtggatgcacaacgtgatgtgctgactcgtttcgagctggagcaccatcgaaggctgtggtggactgtgtacatgtttgagcgcatgctgagcagcaaagcgggtcttcccctcagtttgtcagataacaccatagcgactgaactcccggatgactttgacatgtcaaaccctccgccaggctgcgagcactacatatttgcggaagccgagtacattacccattgtgtgcgaatcactcaggtgaatgcgcagatcttgatcaagctttatcagaaacagccggattcgaatattcttcctatcattaaggatatcgtcatgcagctcttggaatggcgggcaaatatgtcggcattcctccaggttgacttcacacagaaggaactcaagatttcgagactctgcacgaatatgttcacagaatacttccaagggttgaacctcgctatcagaccgttgctattccattttgtttcaaagcaactggccagttttcaggaaacaaatacgtacattaacctatcgaagtattcaaaaactatctcctccttattaaattgctcgttgcaggcctccatcaactcaattcgctctttatgggttcttatgggggaaaatatggttgccctgtttggatacatggacagggagtatttatttacatcagcatgcactttgatattttttaatgctgcctttggtatccacgaacagacatatcaccatctagaccatgctctgaggatatttaccaagatgagggacctaggtaaccatcctgcaggccttagaatggcacagttactacgcctaatgatcgatttagattttcacgatgttatgaaggatttgatcgccaagcattctgacagctcccgctgtgcctcgagctcttttgaccagccacaggctgaaatagacacgcttatgcagccaagaccacagtcaccaacagcgagtacaacaagcagctccgcattatcaacggattccgttgcgcctgatatgactgaattgtcaaagcatgaaacgctgaccatagagaaaaatgtcagtagattagatttgcaaaccctagatatgcatgaagatttgcaagagcttttggataacttagacgaagtaggcaaatcagatgatcagctgtggaaggaagtgacggatcaggcgatgtggctaggcagctctatggaccccacttctgcattaggcaatgaagcggacttctataggtccaactctacccaattcaagtgatatatgtgactggtcatctactacgtctgatgctttgttatcttgttctatttacataaataactagagtaagtactcacgagcagcaaccccggctgggaatcatcacaactctcttcacttgcgcaatcttttctgaatgttatgatgatcatgctctgtccactctaagagcctcttttgtgcgttcacaatcactgagtatccaaagcctaattcctggcagttcaggttctgttgccgcagatacatgtgctcttttagatgttttttgtttttggcattgactgatagactaccctctaactcgagagtcctatgatgaatatcagagcttctgacctctaactgagatataccaccaaatctagaaataagagtagacccacctgactcaactctctggagtttaaagacgaaaccactcaacaacatctgcagttttggattcaaatacggcgagttttgcagattgaatatgtactcgataaggttggtggtttttaatagccagacgtccctttcactgttaatgccatgctgaagggtctccaaaatccactgcaaacaggtgtagtacccatcattgggagatgttgagttgtttgggattatttcatgtaaaaacggtatctccctcgtacgaataaatggtgaagacagtacccatctgtacgccttctcgtaaagaggcgctttgggttgcattaacagatcggcgatcctggccaacgcataatagaccaccggaggtacatcacttctgctcaatttccttccattggtttctttcacaaataagtaaagaatttttgttagtaaaatcttgaagatgttggattccttaaaggtaggtttgttctctagagtcagtagcatctgatttaacatgacagtcgcaatattgaatacaacctctctacagtcagaaagcgacatgaccgcaagctggaggagtttgcaatctaaaagtttcttgacatctagtgtataattagaggcactgtcatctaaaacctgttccctaagcagttcatcattattagtgatcaggagtaaaatgaaaaacggatcataaaccgacacctcagggttgggggaagatagcttgtagctatcgtagaaattttgcaacaattgccaagcagtacctgtggacttgccattgaactctggaatcatataatctagccttgggtaatgcttgagagtggcctctatcatctgtttgctcaaggtaataacatacccttccttctccttctgcaatagctttacaggaccgcctagatcagtctcataagaggtggactcaacgaagtcccaggagcagacattgcgaacccaagaaagacatagtttcgattcaattacctccaatatgtgtaacaatatccgatcttgtggggtcgccatgccactatagaaattgataatttggagttcaatcgcagcagttgaatttttagaaatatctttgttgaacaagttgtagatgatcatggcggaaagatactttctataacagtcaaagtcagcaccattcagggcttggccctcattgttaataaatatctgcagtaatctcgtactttccacggtatgcttactgcctccaagtagcaataaattggcatattcaagcacccgtgtgtcagtcacccattttttgtttagaatcacctccaactgagagttcaatgaagctttattaacaatgttccaaatatcgctaataagcagtatttccttgaattgaagcagaaactcaacaaagtgctccgataggtgctcgcgttcagcaaagttcttagtaatgaaaagcacactctttgcaagccactctttaaccaacgcattatcgacgggtaggcacatacgaacaaagcgacatatttcagcggtatacttcagttctgctttagaaatgccgaatgttaagatggagttcctatcggaggaggaaaggagatggtggttgttgcaaaataatctcatagcattcgccaattcatcaccagctagcacgttcaagttttcgaatgcaagagttaaagcaactgaaagaaatttcaaaattagctcattatcgaagtcagttattacacttgcaagcccaataatgttttgccgctcctgtacccctggaagatgtttcactaatatattaacggcattcggatataaaagaactttctggacgagagaaacacttgcaggctcatgcacagtttcggaaagcgtcgcctccacatctatatcatcaattaactttgatgatataaagtgttcgagtagattcgttattttattatccttcaattttaagagcattaataactgttggccggaaatcgcctggcgcgattcaaataatttcgaaatgataaatgccaaagtagcagtatccgtgactgtctcagtatctaataactccttcagttgcacgacggataagacgccgcatagggatagtattaagtcccctgactgtagcttagtgtattcatggtgcttattggcgattaggtcatatgcgtactcttggaactcgctaatatctgtttctaactgttcataaatctgggccaagcgagatgtcaaatataggtatttttcaaatgcaacggtattctcaataaaatgtttaggaacaactaaatctttgaagacccgctggcgtttaaacttatccaaaaaggatttgttggacagggcataattcccaaccaaggaaagaagtttatcgaaaacacctgctgtgttatatttccctagtggtagagaatctgcgcgtaaaatggtcccggccctaaacaatagcgatgcggcatctagatcattaaccgggtaccttgttgttgtgacaatggcagttacaggcagggttgagatatagtcagcaaacgaaaagtcagtgtttgaactcaagagatattcggctgcagataaattagaaacgctctcctcatacctgtcagtagctagataccgcttgatcaaggactgctctattccatcgagcttcatggcaagatccaaaattccctgttgtggttctccaagaatgatcatatttctaaagaaaagcatcatccacttggcaatagcatcataaggggttttcttgtcaacatacttccactgttcggaaataacaacaacaaatggcgaaacatgaccgtagttgcttgacatatccacatatttgtaaggaaatttaacacatctagtgacggtctcatccagtaatttccaaattttctctagttcgtcatccacaccttcaatcttcgaaataatggataagctgttaaccaatgcaagtatagacgagccaagaagcttgtccatgttaataaagatagtgaactgcaaaagtctatccagcaaccttataactttgacagtaatgacattagtcgaattcttagaggacgcgacacgaattagagagctgaataaagaatgcttgcggccgtcagagtgccaccactttatctgggaactattcaattcttggtaccgcataaaattgtctagaataacaaggtccacacccttaaatgattcctgcatcattatatcttcatagatattttgacccggtaggctgacgttgaaataattagggaatagtgaactatagtaccgcagagccatcgttaaggataatggaactattttgttttcgcggtccttggcgtagacatcgtttaatgctgtgacaataaccgagatatcagggagcatagcccaataagagttggctaatatggctatagctgtttcccagcccttttcagtgtatagttgaagcaccttctcaaattttttgagagagaaaactagtagttgacaaccgaagtgctttacgagcatcacatcatgctgcaagcatttagtcaacgaaagtttagaaattgatgctggcatgacgttctcaagcactatggatgtattcggcaggcggtcggtgtgtagatggtcgagcatcgctggcatcggaagattgattattctacccaacagcagggtcaagcccacccagtaggaagtcattttcggctcatgatacccttgaagtgcaaggtagttgcaataaggtggaaccagctcaggaagatttcttaatatttttaaaacagtgccgcactgcaaatcgtcctcccacggtttaaagaatgtgagcatcgtgtaaacgagcttgttatatagtctgaattccttttggttgactgttacgacagcaccgctacttccatgcgcatggtatacgggctcatcgaaccatagcttatcatcgtggaaaaccacgccaaattgcggatccgttgcatacaactggaacagctcatttacactctgtaccaatgccttatggggcgaacggtatagctcaaccatggttttcagcacagactcgttgattatcttgcatttgctagccttcttgaatgatttttctttgagaacatattctttcagacactcgacggtcatttccaacacctcgtatgtgtccaacttcgacatgtactttacccagttactcatggtcttatagttatcggtgagcagatccacccgcaaaagaggcggggtatgtttaatcaatgcaacccagaatttgataaagttcgcgcgcatggctgtgtgcgcgctcttccgtgccgcaacaaggtccttcatctcgaccttgttgggcgtgagaatccgctgtatgcaggggaccgacaaatcaaagtagttcagaaagagctccgcatgctctccctcattatagaccaccatctgccgcatcagcttcagtgttggattcgtcaccgtggatctctggcagctcagcccgcggtatagcaccttgcagtggcccgacagcaagtcccggatcagcacgctgccctgttcttggacagaaacgtcagacgccagtactgtaaccgtcttcagaagcttcactgtgcagtctccaaacatattttggttgttcacttgtgcgaagtacgaccagccttgaacaatctgggaaagaaagcccttttgaataaattgcagcagtggctggtaatcattggccacgccttcgttgatgaggtcgatactagacaagatgcgttgcaattgctgcagtaaaccagtatcgaagttcggattaccactctgtttcggcgcaaaatgacgtttttcctccctaggaggtgctgcatcagatacgctcatcctaagtattgaatgtgctcactgattgatgcagaggtttgttagatagcaccctgtctcgggaagctgttagatgcgatgagctctttctaagaataaggcgatgagcattaagaagcaaattttcacctgtccgtacaaaaggccttcgcctcaaataccaatactaacctgttcattgtacgaactggcactttcctaaggccttgagaggttccgcgcacatcttcacattcatttctgtgctgaaacagttgtttttgcatacaggtgatgtaccgaagggtttgtattccgaaattgggcttgagatgggcttccactggcatgcggaacatcgccgcaccttctaaacggcctctgtacgatagtcggtacgtgctgcctatggttctattggttttagttggctccattgcagccaatcgaatggacaccgagagacggatatctgacatgcagcagccatattatgcgaagattcgaattttggagctactgctggcgagggctagggcaggcgacactgccttcgacatgtcatcggaactggaaatagtggatcgagtgctggagcgccacaaggaaaggagtggacggtcaaacaaatgcgctagacgagctgtcgatgagaagcccgtagttcaagaagaggaatctttggacgttttgctgaactcgattatgcgcgatctggacagccctgtggccgatgcgccggcagcttctgagccagccgcatatgatggaactatagtcacagatcgggaagtcctggctcgtgaggcattgcgagaaaaggagagtgcggatttccgggccgactccgggccacgggtaattgttcagacaccgggagagtatgtggcggcagctgaagacacggatgtgcccaggttcctgtaacagggaaccttaccgctattgacgggatgtatgggaattatagtaacgagtaattatataggagtataaaccatgagccacgagggcaaggggactactcgctgtgttctaccgaggcggactctacactgcttgagccgccagtgcttccgggcatatttggagaatttctggggctcttcactaacgaagtgttatcttcgaccctttttgattgagggttatccactgaggaggaaggggtgggcgaagtagagcctacctgagtatcctggcctgactccagcgcagagttcggcttaaaagcggcccctgcgttgctgtttgaggagtttcttttaccgctactgtcagtgtctcctccaaaggacgcactactttcggatccggatttcccattcgtggcgctgggcatagtggccgatgaagaagatgtggcagaaggcttgctattagtgtgttcttgttgaccgcccttgtatgggcctgtcccttgcacttgggcggatgctcccgtatatcctggcgatagctctagctcatcatcagattttgctgcagttgggcgatggcctctaatatcgtgagggactccaggaagattatgctggatgcttttcaatgtcaataaaacgtcttgaggcaaagatcggagctgctggaaggttcctgttgagagatttggatcaccatccagcatgcccgcggtgttctgtccactctgtgcttcgaagcctgaatgtgagccagctgtggaatattgttgggaataaggagattgcgaacgcggtggagcaaactgctgtggcgccacttcgtcggtcaaaagacccgggatctgtgataacaacatttgtattctatccaaagcgttcgcagccttttcataagattttgatgccattctcaatatccacacgtaattgcgcaagcaatcacggaaaacctgtgcgtcctccttcgttggcgctgtaacatataataaaccggcaaaggtacttatcaatgttagatttccagttgtgcacgagtaccagaacgcgcttatatgctccgttttgagatctctaacgaactctatcgcagcaataagcctagttttggcagcggtgcgacaaacctgaactaaatcgcccggcgagtcaggctgtaaggtggtaataattttcctgtgaagggttatttcagctgcgaagtatgcaagcgttaaagatgcattactattgaactttcttggttgaaaattgttcatggaaagttttgaaggcaacgaatgataccactcacgaagttttaactgtaatggctttgccagcttcaaaacttgctcaatttttgttgttgtgcttattgcaccgagggtgtaaaatgtatccaatatctcacccaaaataatgctcagtgaaaccatctgccggaataaaagttttccattattaaaatcctcatcagttggggaaaggtcgagcactgatatgttactaggagctgttttacccgtgccgatattggcattactcttctcttggctgttacttatgacaggagagtttgctggaaaatcttggtcagagagcattttcacaagccagttcctgcccaatatcagatgagaatatcttgcctctagcatagatatccatttgtcttgataccacacagcccaagccagcctcctcctcaaccctctttcccagcttggaagccgccaatccttgcaatctatacccaggccaagatcctccgcaagcgccacaacctcagagcagagaatccaattattgggacactcgcttcgacattgcaggatcaacaggccagtctgtacgatactgagttttgggcgttccaaaacatcaaaaaaagtacgcagtgctatctcattaagttggtcaataacgtctggtctttggaagccaaccgcctgcgggtgaaagtcccaccattggagagctagagaataaatagacgcgagaatgggggctgtcaattcgcgatatgacttggaatacttttccagaaacacccgctcgtgcagaatcgggaaatacgggtgtatgagcttgaagaagatatctactagaatcttcccgtgagggtgaacaagtttttcaactagatcgacatcacgttcattcttcaagtacaattggtggttaaaatcagcgcgaagaacaaactggacacctggcgcaactttacgcagcgccagtgtgttggatagctgcacctgatctattttgtccagcttcatgtgattcaccaagttcacgtcaaacatggacgtggggcccacgtagaaagaggaacgtgggtacttggccagagcagagttgagatgcgagtcgttgcggccaacggcgtcggccgtcggcggattggaggcatatgagtagtgtccggggccactaggtgaagatgcactatggatcggaatgcccgcctcgtggttcttcttggaaaatatcggcggtggcggcgtattcgccagggtagaatttagattctggagcaggtctgcatagaactgcgaaatgctttcgctgctggatggaacgctgcccttggtccgcttcaggagctcctgtatccaggcgccattctcctcagagcgcgatcgcttgttctgcatcccttgctgcagcgtctttttcatgcgcgcagatggcatctccgaaaacacgcacttgatgcctttggtctcgcactggagacagtttgagtgctccgccacggtcacgcatttcacctgtcgcctcctgcagtggtcgcactggttgcccggcacagccccatcgccccctgctgccgctttgcgcgtgtctggctgctctcccgacgcgaactgcagccgcccctcgctcccgccgttgcccaccttctcttcgaccgcatggtactgctgcagcagctggtccaggctctgccggccatctccgccgcgatgcgcgtttcgctccgacggctgtgtcgcccgctctgccgcaacgccggcattcgtcagattattcagtaagctcgtgtagtcatcattgaagctcagcattgagttgttcgtgtgcatcgtcggcgtgtcgccgccctctgccccatcccattgttgcacactaccgtccggctgccgcatgcttccgccaactgctagctgcctgcaaagtccgctttaactgcgtgtcggattctcgcttaacttatgcacagcgctagaacctgtggaagtcctgactagcaacttcggtcgatagcgctcttgcttctgatatcctccctcgcaatgcgccagtggattcactgacagatggtgatgatcaaaaaatggagtaaaaaagaaattacatccggtcacgtgacgggactgacccgtcagttccagcatccaggcggcgcccggtccggcgtgagtatatagtcatatctttacgaatattcagtagacgaactcgcccaggtaggcctccgccacgaaccgtgcccttgcgttcagaaacaacttcatttcgctgatttccttgtcgacttcctccatgaactcgatgacaaagtcgaccaggcggtcggtgatcatggtttcggtgtgcttgttcgtgaccaggaaggaaatgctgtagcccggtagcggcacgcggcgcagcacgtagaaggactcggcgcgctgctccagaaagcgcgtgaacttgtgcaccaagatctgctctatctcgtcggcttgcttgacgcaaatgctcatgcgcacgctgttgacgctgggctcgatcagcacgtgctcgtgctcgttgcgcgcgatgtgcatgggctgcagcagcagctccgcgctggtggtgtgcgcctcgatctcgggtctgttgtggcgctccacgtcctgcgacgagaaattggacagcgtcagcgcggcctgcagcgagagccgcacggcgttcaggtacgggcgaagcgattgtgacatgctgctgcgtggcggtggtggagtggatgctgggtgagtccagcggccccttttccgcgcttcaccaaggccgggtaaccatcaaacgggccgggtaaccatggatgatgacagtagccgggtagttgcgcaacctggcgccgcgccaggacctggcgccgaacaagttgcgacatgatttaactggcgccaggaggccaaccggggagtacgagtagcctgcgttcataaatagtaactacggagactaggtactgcgtagttgtacatactgagctgttgggcggatatgtgaagctctgctgcccttagctcgctacacgcgtcgccgcagctacctagaaccgcatttggtgcaaggacttgcagttgtcacgctggtctatgttgaaggaggagactaaacagtgggtgttgtcgcaagagccgggtttcgtgcaattgaacctcagcgggctgtgtctgttcatgaggtcggagtacagctggagtgtggcagtgtcatttttcattttctgtgataccttgtgccagtacgtggcatttagaggtgccgactctggccagtcaatcttgtatgcctctcttgggtcgtactcgagctcccaggtgggttcaaggccgttgctgtcaaacgtctccttgaggtccacgtagaatgtgtaggagttcatgacgctgaaggtcttcgcatccacggcatagtagcgccaggacggattgacaccgtaccacggggtcacagagggtgcgacccacgcaaagttgacaagggcttcgatgctggtatcggtgccattaccggcgtagagcagctcgaattggtcgaagtgggtgtggccgaagaagatgccgccgatggtgtacggggagaagcgctcgactatttccgagaatagagccgtcggcaccggcagggcgtctgagttaggggggatgtgggcgatgatccagactctttggtcctttgcctcgctctccagcagctcattgatcaggaactcgaactgaccaaatgtgtccggctgcgacgcattgatgtacgcataacggttattgtcgaaccagacgttcgaattgagggatatgaccttgaggcctggtttggcgttaatcgcaaaccctgtgtagtgcgagcgagcctggcgagccgcctcgcgatctatccagccatagtcctcccacaagtcggccatcaattctgcattccaggtgaatttattcttgaaaccagagttctcctgagccagctgtccgtaggggaagctgtcatggtttcccagcacagcgtagagtgggatatctttcagtttggccttgatatccctgaagaccacctcctcggattgcactgtcatttcatagctgatcaagccacgctcgcgatggtccaccagatctccggtgaataaagcaaagtcgaacgtaatattgtttctctgactatactcaacgatcgagatgagtgacgagtttactagcacctctggtgcatcgcaataatagtggccaaaggtggtcgcgggaatctccgcagtcaggttgttaaaaccatcgactagccgacccttcacaaaggagttgtcatccttgtagtaggactcgtacagggagttgtagtggctctttttggatccaccttttatctgcgaggaggacgtcgcaaaaggcgtgcagcacataaaatcgttgttgcactgtgcctcagacccgactttataatcaagctgtatatggaagtcagatacatgtaggacgttgatcaattcctcccccgatggttccggtgcgtggaagtgtttggcttgcttctccggccagagatgcgacagcgtcacgttcggcgtctccggctttggacagccattttcatagtaatgacagtaaagatgaccatcatatccgtgtgggtccattaaagccagcatgtccacgaagttgctacccgaaaagccaccttcaagcgtgttcctccggaacgacttctcgcacccaatcttgaacccagtagtaaggagacaccattcttcgaataccttggggacgaggtggggccgcgacagcgctagaacctttcccagcgccagactcccgacgcacttctcacaggaagtgctgtttttgtccgcacttaaagatactagctgttccaccagatcggcgacgatcttctcctcagtaaagacagtgtcggcgtcgtagacccgctgtagaccatcgtttccgctcccactgcccaccaccagccccgcgcacagcgcggctgcagcaattatgctagatctcattaggctacccaccagcgcagttcacgtccgggttgacaccgctcacggcaagttccgggcagcagcaagtgtgccattctgcatgcactatttataaccgcgatgcagcccaattactattattacagttcatagaaacgtgctggtggggcgaatcaggacccgtcagcaacggacctgatcgtgccggcacactccggatgtcaattgccgcagcattttgcgccaatcggccatggaatgcatcggggcgacagctacttttagcagcaaaacgcatgcatcgtacaatttgttcttacagtaatatagcatatgttatatatcgtacactagttacaacactagagaaaatacctactctagtgtatttgttcttttggtgtccatttgtaatgtctctcggaatgtgcgacattttagtgttattcaggggtatctggagtgggaagttcagtatgcatattattttacctggaggatatcaattggcctaccaagcatgctagtttcttgcggaattcatcaccatcttgcggatctcgtacataaaagactggtcgtagtgaccaacgtcctccttccgactgttttcaacagattctgcgctgaaccagccgccaacgtgcctgacccagcggttttcttcatggtagaacttctccaagagctggctgctgacgcggaaagtcggatgcgtctgctgcctgggtagtgaataatggcgggtcgacgaaaagcgctggccattttcgcggaagccgtccagggcgtcatctgacctgtgggacttgacaaatttggaagggcaggcggcgccgctctgtggcaagggcttcgacttgattgtttcctgtatgtccgcaaaagggtcgacttcgccgcccccgatttgcagccagcgcaggttctcctcgtcgaacaccatcttccccacgaccttggcgtcgcgggcgcctcttgcggcgcccgccgtggccgtgcgcgcgggtgagccacgtgtgcggcgattattggttatgagcagcacgcgcttgccgtccatctcgtccagcgtgcggaagcgctccaacgcctcctcgttgccctcccacttcttcaggctcgggttgtaggacatcttccccgcgcggaccggcgtgttgtggtcgatttcttgcttgatcgtccgcagccggtggctcgcggagaccttcttggtgcgcgtctgcctgcggcagtcgtcctccttgaactcgtccaggttcttggcgcgccgcggcagcttgttcagctgcggcgtcaggatcttgtcgtcgcgcgtcaccgtgtactgcgtcggcgacagattccagggctcctcgtagggcaccaggaactgcggctgcatcgggcccacgcccacgtccagctccgccgccggccgcaggctgggcatcgacttcttggcccgcaccccgccgctgcgcgcccgcagattcgtcacagaccggctcgtcccgcaccccgcgcgccgcccacccggcggccccaggtccggcggcggccccagcccgcccacaccgcccagccgctgctccagctcctcctgcagctccagcagctcgtcctccccctccagctcccggaagccctccagccccagcacgccccggccgctctgcagccacgcgtccaccttcgcgctgctcccgaactcctcgaagtcccgcagaaactcgtgcccgtcgctctcggtcggcgccgagccccgccgctccttgcccgacagcgtcgtgctggccccagatgacaccgtcgacggcgccgccgctcctgcctgggccttgcgttctgtcacgccgcagcttgtgtccacctcctcgaatgacgtctcgctgccccctcccggcatctcaatcctttgcggtgcctctgccccgctccctgtgcgttccattgccatcattgcccgttagcgctctcgcaatagcgaacctgctggatcttattgccacctgcgatcttgcgagaggccaccagacacgccacgggtcaatcccagctttatttatgcctgttcctgaacctgaggaaccatccacaagtaggaatgttctgtcaactttaaagaccccgtatgctatgaggagccccagaacatgaaatttcaggccactgatggccgatgaaggtgatcagaagagggccccctagcgcaacaaggtgaggatctggaaggccataacaggatcgcaatggagagtgtgatctcagaagtcgacagtgggtttttgaaggagaacgggagctgggcggacgcgctagcagcggtttcgtgggaggacatcgggacgctcgagcgggcggtgtacgagacagagcaagtgatgcagaagtacgaacggccgaatgagcgggtgcgcggtgcactgtacggggtgttcgaggaggttctggggcggtacccgctgctgtttgggtactggcgcaagtatgcggggatggtggaacgggcggaggacgcggggcgggcgacggagacgctactgcggggcgtgggggcgtttccggcgtcgctggagctgtggacagactacctgcggggggcggggactgggccggaggcgcggggtctgtacgagacggcggcagcgcaggtggggcggcagtttctggcgcacgagttctgggaccagtacttggcgttcgagacggggcaaggcgcatgggagcaggtggcggcgctgtacgcgcgggtggcgcgggtgccgctgcaccagtacgcacggtactactctgggtttcaggagtttgcggcggcgcacgcggaggcggtgcccgagggctgtgtcgcggaggtggacgcggcgttcgcgcagacgcagcagctggtgtacgacatatggcggtatgagtcgcggatcagccagagcttcttcaatgtcacggacgtggcggaggcggagctgcagaactggcgtgagtacctggcgtttgctgtgagcgatgcgcggatggagccggcgcaggtgcgcgcgacgttcgagcgcgcgctggttccttgctaccggtaccggtacttctgggacgcgtacattacgtggctggaggggcagggggcgcatgacgagctcgccgcggtgttccagcgggggatgcgggcgctgccggctgacgtcccgtttgagcgccggtatctggactacctgcgtgtcaggaccctgcaagactgcgcacagttccgcgacgcctaccgcgacgcgctggctgccgcggtgcagcgcgcgcccgaggatggcgcgctgctgaacgactatctgaaccttgtgaagacgacggagtatcccacgacactcgaccagcccgaggcggaggtgctggaacagcagcaggcgtatgcgaagttcctggaggggactgtcgcaacgtacatggaaggtgaggatagccgtggctcgtcacagctcctgtccctgctagatgatcgcaacatcagcgtcgtcgtggtgcagctgatcaagacgacgtggctggtgctccgcaataacatgcaggcaatcaagtactttaatcagtttgggaagctgccgcagttgaagtcatcgactgccttttggctgctgtactacaagtttgaaaagtcgcataggaacttcacgaagctgaacaagttcgtcgggcagctgggcactgagatattcctaccgaccgaggttataaacgacatactggaggactaccagggtttctatcttgcgaatagcgacgtcaacgaatatgagcggcggctggcctccggtccgctacaattcgacccgttggtcgactgtgtgttcaaggtcaacgacccgcaatggtcgccgcgaaacctcgattatcgggactggtataagagcacagagtaccgcgaaaacggtcatccgggcattgcactagatccgccgcagatcacgaactccatcattacaaagtccatcgcgtcgatacgaaaacaaaatgcacagccgctaccgaccttccgaaacctcgagaagatcaaccagccgccaaagaacgctgaccatgcgtgggagtacataaaatcgtgaattattggggttgtatgtactatatactatcgctctgccgcccaatgatggttacgcctcttgcactggcattctgggtgacgaggttgtctccgtacacctctactatttccaggttgggcgcacattcgctgatatgggcgagcaatttgtcgtcaacgcagcggacgaaccctacattcagttgctgcaagtttggacaggacattagctggaacccagctgccgtcaggttcctggctgagttcaagtttagctctttgaggaatttggaacatggattcaaccatatctccgcaattgatgcatcatccagctgatggcagcgcctcaagttgaggtagtgaagtcggggaagctggaccgaagagaaaaatgtaatgaatccatcggacgtaacctggtccaattcctctagggataatcgttccagtgaacaactgtcactgccagagcgcacgttgctcgcaagaccattgaccaggaagctatctgtgataccggtgcagccgtccaagtttaaaacttttagactgttgccgactacccccagcagattgatcatgatttcatcagttatgtcttcctcgtttgagggatactgcaatatcagagtgtgtacatcttggtgcagatatcttggcaacaaagcgtagttactaatcgagtccagccgcgagagcttgagggatctcagagagcccccacaatgaagtaataatttctgtagggaatcatcggtgaagcgatgagtattggaaacatggaaagcctccagtttgtcgcccatgcgttcaaaaaatataccccaggtctcgtcatttatcaagaagggtccatcgagatagagctctctaagattagtcaacttctctgccattagcaaaagggcctcattgttcagctggccgcacatttgcaaagacaccgcacgcaagtgcggcgtaaaggctgcaaggcttttgtagccatccgcagaaatattggaacaatcatggaacgtgattgtctccagattgacgttcaagaacagctgcaatgtccggtcgttcagagcgcgactcttggacaacgcatctgcaagtttattcatattgtgcactgatacacccccaagaacatctaggatatgtttgttcacactcagactgtgctccttatgcttcattatgctttccccaataactgctacacatacgtcctggagtgtgggtattctctttgtctttcgatccaaaagctccattgcacgctttcgcttcgcctggcgtctctgcagtgcttgcttgcgccgttttagcacttcctggaccatttcgggctccctttttggcctgatgccctgtcgggcggctacaccctcttcgtactcctcctcatcggagtctaccgggttagagcgagctctggaactcgcccgggagctttccaaaccgctttctggcgcaccatcagaggaagatccatcgtaatccgaatcacccttgtctgagtcagtctcagctgcgtctgcggagtcttgcgattcactctgtcgggtacttttccatcgttctttaatagactccgcactgataccctgttcgcgcagaaactgtgtcagcgcactattaggcccacgtacttcgttgtcaccggctttggacttgttgcgactgcgatacatcccgctgttttggtttcctagtagtacctggtgagcgatgctgaggttgtagacatacgcccgctatcctccgcatatgagaactgcttatttaataaaaaaatgagagaggatgggcacaagctgaacgtgcaaggggtatcgccctatagtctccagtccagatgtcttgtcaatatcctctataagcgcctccgataccggtccctgcttggcagtgccggttgcataagagcgcaacgatgcattacatcacgtgatcataaggccaggcgggcggactagtttccacgtcagctccatctcgaacagacattacaaatatatctcataggcaggaaatttaaaatatgtgcatttaaaatccgtgctcctggctcaatagaataacgtagtcacaagcgcggagatagtctcatctgcgggcatccgtaaaaggctcatgctgttctgtccatatgccactgccgaaaagcaggagtggcacagactgtatacaccgtgttctggcggagatgccagtcataaattaggcttggcagcactgaattcaatagttccctgcgtgccccgcggttgttcttcttgattaaccggaagggcggcccgacaggacaattcgattacgtaaccatgttctgtcgatccgcagcttccaaatccaaggtctgggtattctgtcggagtggctttgctgtcaataaggagccctccattccatccatctttcaaaatataccaaatccccccaccagtggtatcgattctttcctactgtaaagtaagaaccctcccaggggcaaggtggtatttactcttgtaaactagacaacccgcctggagaccggaggtaacatcttaaaggttttaaggataccccatattagtcatgccgattaagaggacacaggtcagaacagacggggttggtacgatagtttcttcttgcaccatatatttggcacgcccgagctgaaccagatgcatgctccaataatccagcaccgctttatgataggggatacgtcattaaaaactcttcgatccaatagctcacatgacggacatattggggtaaaacgggtattcgggcgcggaatcttctacatggttattaccgcagttttcacgaatataggaatacttggttgctctgggccggtgcaagcacacaggatgtgcgctaacgacgtgcgtttcagcgcccagcggtagaactcagatacacgtctgtctccggatctcaaaagttgacttcgtggccaagctggttaaggcgtgcgactgttaatcgcaagatcgtgagttcaatcctcaccgaggtcgttatttttgtggtaccttcatcgtaccatttttttgcctggcgttcgattttcgagtagtggatgcgcagcgctgcaacaggtatcccgcgagatatttcgctacttcatgctatgctatgacgatttaaacctacatataaccggcgtgccgtgtcatgagataatgcaacagccttgacccggctccttgttcaccagaagacttgttctcgtggccagctcgaacacatcgtccacgccctcccccgtaagtgcgctgcactccatgtatttctttgcgccgatggcgcgcaccacctcttgtgcctgcgaaggcgctaccatcgcgcactgcgtcccggggcggcgaaggtcctttttgagccccacgaggatgatcggggcgttgggacagtagcgcagcgcctcgaccgtccacttctcccgcgcattggacaacgaccccgggtcgtctatggcaaacccgattaatatgatgtccgccttcgagtaggacatggggcgcagacgctcgtattcttcctgaccagcagtatcccatagcgccaactgcacttttatgccgtctacacggcaatccgtaacgtagttctcgaaaaccgtgggcagatattcctcagggaacttccccagcgtgaacacatgtagtaacgacgtcttgccgcatgccccatcccctatgattaccaacttccgtctcacaacgttgaccgtcatagctcccagctttactcttgatgcttgtgattcccagtcagcttgcagatgcgccacttatccggtgatttaaaatccgcaaatttgcaggtgcaccacttatttcttccttggcggcagctatatataatggcgctgaaagataggataaatagtcgagactgaggttgcactacttaataatattattccttttctaattgtggcacacaggccaaattttggagatccgaaagaaaggaaaccacgtcatgtatttacatatatataaccacgtaccgtctggctttgactgaccatttgttagtccggtgcttcttatcctggacgaatgtgcaaggttgtagttgtattcccgctacttgttcgtagggagtacaaaaagccgacctgcctggcagtggtagtcagtagcgaagcagatgcatgcaaactgccgaagatgggcaacgagcgtaaccagcattaggaattgtatgagcggccacgtaggcggccagcccagggctacgtagttatgttctatagtatcactttatattaggtgctaacggcgctgttggcgtggagggctgtaagcagttgcctatgcgcaagcttcagccccagatattgtttgccctggagggttgggcgagttgttggttgaagtcgaagaaattggactggccgctggacggctggcccagggcaattgagccggtgggcgtggccgacgacgtggagccggtactggtgctcagcacagggatcgtggtgagacccacggtactggtgctcacggggtcgctgaaaaggcccttcgatggctgccgaggcggcaagtccgagccgccgggcgctgccgccggggcgtacagtgtcgactgtagctggggagtggtgaaccggcagtgtgtcatcatgcccacgtcgttgctgagcacttcgcactcattggcattccgcagggccagtagctggccgacaaactggccgaacgtgaagctgcccttgtccgtgagatacgacagacagttctgatacagtacatcgatcggaacaaagccaccactggtggacagaagcgtgtaggcctgtattatcacgtctgtcgcggaagcctggtgggctgagaccattgacgaggccacggcagtggatggagcgatcggcgtggaattcgaggaagtattaccccaaaggtcggctgcgtagttgttcaccgaggcgttgttatcccatatcgaccgccggggatgaagaggggcctgtgtagaaggcccactagcgtggcttgagatgaggctgcctatgtgcggttgttcattattccacaaattgttgccatatatagaagtctctccacggggcagtgccgtagtagaggaggaaacagagtgtaagggggcgctagtggacacatcttcgagttttgtctgcaccaagaaattagtcaggtttgtaaggtcgccactaaacgtgtcattaggatccacagatgcgccgaaagtcgaataactggctctgtgttgtccaggcacactaccgtgcggtgttgtctggacttggacgtttgaatggttttgagttacagacttgggagacaattgaacgtaacccggaacattatcccacgaactggctgctgtgttcttagatagccctggcggaccagaaatagatgtctgtacttgcgttttctgagcaaaacctaaagcctccgttaagtcaacaggaaaactcagtggctgcggcagagccgcttgtgcagaagcataattaagaccgatggacgaggtatctatcgacttccgaggtatacctttctgcagaagagcgttaaagtgtgatggagaggtagagatggactttgaggtagagatggacttggatgtcgcctcgttgatcatattaaatatgtcatcgttaaccgttttttcttccgacatctcctgcttgaccggcactataccgtacggtacaccacctgctgggtgggccaactggttcaatagatcatgggaaatattttctttatgcaggttatcctcttggcttgattcttctgtaggcttgtcgtcttcttctcgtttcttcttcacttccaagctctgtagcttcttcaattctttctcctgtttccttttcctctgttcctcttctcgctgttttctttcctgatcacgcttgcgctttatttcttctttcattctcctttgacgctcctgctcttcttcccggcgtctttgttcctctaaccgtttcctcatttccaaatctttctttctctttgcctcttccacctttttcctttggttttctctcctctgcatctcgcgggcctccgcttcctgctttaagcgagcctcttcttccacttgcttccgtttctcctcctctttagccaattgcatctgtctcttcttttctttctccttttccttcttcttcagcttcttttcctccttttccttcttctgttgttcttctgcttccaactccaataatagtctttccctgttcctttccgcctgtttttcctgatatgagacaattagtttcctttgcagtaacttcgtgatggctatctggatcaatcctctaccctcctctagcctttcttgctgatctatatcgctatcatagtcatctgcttcggcatcctgctcacgatggtggtgatgaagatgttgttgatgatggtgcttatgatggctatcgtcatcttcgtcgtaggattcagcatcattatcatcgtatacatcgtcatcatatggtgaatcttcgtcatcatagctatctgaatagttcagatcttcatcatattccgaatcttcaggaagtccttgggaagaatgtgatactgatttcttcaactggttcttattgctaccttgcaaactcttaaaggcctgattgattatactttcacccgccataaactgcttcaatagaacacgcccccgtaagtcggtgtcaatttcatccgtatcagtacagtcttgaggtgggtcatcattagtgggcactggactttgggacatatctaaaccagctttctcaaccagctgtttttgcagctcctgaaactgttctgcggtaagcttggtatgttcaggggagccaggtaaggggccatcctgttgagaagagacaaatgcctccatagcctttacaaaatcctggccattattttttatcaaatcttctgttaaagcgcgcatgtcagggtacatcatcattcggttcacatactcctgcgctatcttggggtgggaggaaacaaacgttttggcgaacttaaggtacttttcccgcagttgttcgttgacctcagaactatctgggcctaactcatcaggtaacgtatggagtaaagattcctgttctcgctcgggaagttcgtcaatactaggagagtctgacgggctgttatgggtatggactggtggaagttgctgcttcctctgctgttcggaatactgccgctgtttgttgtgtttgaactgtaatacctcctcttttaatctgtcaacgccctcgttagatatacaatacttgaccgcctcatctcgcatattatccagaaaactagctcctcgagactgcagcgaggctgtgcgttgctctgctccgctagacgtgccacgctgtagttcctttatcagattcaggtgaaacagaacaaaatcagagttggggttgtcctgtctagccatctcgtatagttggttgtatatcgactccagttcctgctccatcggtacgtgccgccttccgcacaccgtgcaattgcagttgtgtaacgtctggtagctcttcgtcacgctgaacacctcctccttgctgatactcagaattttgcgcttctcttccggagacagtgactcccagtgagcaactagcttgctggagattgcactgtgcttctgttgctgcgcctgttgtgcctgcacgccactaccggcctcattcagtgattccacgatcacatcgccgtttgcagcccggcgaatcacgcgcgagctcgggtaatctgcctcgctatcatacagctctgcctgtggatgcgtctcctcgacgctctctgtctccacagccaacagaggtgcgctctggggctcctttatcgacggcttgctcttcttctttttattccgactctttttgcttgacgatgccatatcgtagctgaattgaacgttctgacctgtgaccactgtcggattatcaagccccatctaaacagcctatccgcacgtcagctttctagttcctgagcctgttggggagatctcaagctgtaaattaaggcaatagaatagtactttcctcggtagtttttgcatagtgcttgagctaaaaccagcacccaccgagaaagaagaaacaatctgatgtaacatccgggtaactttcatgtgttacccggatttttggtattacgtaatctagatctgcatggtgttatctgaggcgccagtgccgggattaaacgcagcccaacaacaacgctatacgggagcagtgctgccagtatgccttacatttgactctggtgggcgaccagatatgctgcgacttcttagcagacttgcatactccacacagggagtggaagtgcgcggtgcgcatgaggaaggcaaggacatgccgagtatgcggaatacacggcactgctgtccggcatgaaagttccccggatgcatctagaagaagcgatatttggtggctacaaaatggtggttgtacgctagtgtgtgtgcagacagcggtcaggtagaacgacagaatgcgagcagagccggcacaacgaagcgacggcttcgggctgcgcgagcggcaagcggattccccgcatagggggaggctgcaagtgtccgatgcgcagtgggggcattcactgtgtgctgtgcttgcattattatggaaaacacccatccggcccgaaatgcggctgcatagttaccgcaggatgcctgcagcagatctgcgctggaggtgatctccgctcgcatactcgttagcgccagtcctaacaagatgaaacaaagtataacctgctacctccgtctgtacgttccctttggcgtgcatagctggcagagaagcgtgcttgcaaggagcgcataagacgcaaagttgcgaaacattgtctatattgtctgtatttctactttaatgcatgcccgcaggatgagctgcccgacggtagcgccgttttgggcatttgggtcttgttctgatggacaactgtggaacgtcgctggactgtaacctagagagcagacagcggaatttttcgcccagcggtaaagtctgggaagcgaattgcacgacgtctgcaagaaacttctggccaagacaggaaaagtatgccctacacagttggctaattgtggatgcctggttcagccaggcaaacagcgcctcgggacgattaggtgagcccttctttgcgtcatgtcgtccgtcagtttcctcaaacggcaaacgtcgctattggcctaccgtcgtacatttctgcaaaacccagaaattgcatgtgtattttagcatggtcatctctgcgttgttgctcccgtacccacactttatgtttttctcgtgtcgtaagagcttaaatccaaatacagaagtagctgtgcttaatatgtcttcctgacttagctccaggcctttgacaggttcttctctgacgtccgagacgacccccgtcagggggtcaaagttcgcggtctcctcgcaatggtggtcggtctcgaagtggtagagcagtggcccaaagttgacccaatggccgccaggcttcaagacatgttggatcgtctccatgtagtctagcacattcatgcccgtgtcaatgaaaaaattcgtaactaccacatgcttcgagctggcagcttctgcccggatattgcgcatccgggggtcgttcgagtagtacccagactgccggatgttcagattcggcccgtagaggtctacaaatgagccggcagacatggacatcaggcaatcgttgccaacctccatgtatatcgtcatgtctggcacttgcactgctctcaattgtgactgccggctggtctggttagaaaacgagtgcacaaacggataaagctggtgctggaaacaggaaatgctaccgttcagcaaatatcgagacacgagcaacatgtggtacgacagctcattgccctccgttctaaaccccatcctcacgagatccaccaccacccggccgaggcctgccccagggacaaggatgctgacctggtcgcgttcgcgaggataggcctcgtccataaaagcggccatcctgctcagtagcacagaccgctcgtcgttgcactcaacactccactcgcgcaccagttgggtgaaaatcaataccgtcttctgcatgtctgcaatagtcggaatgggccattcatcaggggctttgtccacctcccatgcgtcgaccgagtgtgctaccaggctgtggtagaactgcgaattcgccaatatcgcatcgtgcacctgttgcaagtacctttcataccaaggaatcatccttttctgatgttcactgaggcccctccatctcctcatccgagggcgccaaaattcgtccaaagcatattcacgatagttccaaaatgagttcagtgtctgtagcagagcatgattgtcatcttcttccatggctgagcggaaataaagatttcttaaggtcagaggtagcttgcaggcccctggaagtgcagcgctcaaagtacatcacgagaaaattatccagatcgagaagcatggtgcgcaatataagaataaatgtttctacataggtatagatacttgcatagctttggcgcctctgatctccggttggggatagcttctcggggaagcaatgtagctagcagttacagctatttgcgtgttggtttgatgaaacggcgttcagatccaggcgggcattgtctacactgggtccgctggcgggctgctcgccaaccttggcaaggggtatcttttcgccaattgctaggaacacctcattgatcttgtcgccggtcttggcgctggtctcgaaaaacagtaggccctcctcttccgccagcttctcggcctcttcgcgagaaaccttgcgcgcctcgccattctcgagaagatccagcttgttgccgaccaaagcgatgacgatgcccttgcttgcttgttcgtgcagctctttgacccagtggcgagccttgatgaacgactgcggtttggtgatgtcgtacaccaccagtgccgcctgagcattcctataatacatgggtgccagcgatgcaaaccgctcctgacctgcagtatcccatatttcaaacttgatcgttttactgtccatgtttacccgctgggttaagaaggcagcgcctattgtaggctccttattctcggagaagtcattggagacaaacctcaggactatagacgatttacccacggcagcctcgcccaggaggactaacttaatcgaagttacgttcgaattcatcacaaatacctattcgacgcaggcctccgccacgaggaagaatcaacgtttggtactttctctttcttgccttgatttaagtagactacaaacatcccgcggtgcaattttattacgttcaatacatagttatcacgtgatcacatgacgggtatccagacctccggcgagtaccacattacacagagactaggcaaactgctataacttaggttcaaggggcctcgtggcctcgtggttgaggatcagctggttatcgggctggttctgctcctcgccaaagaacacgacggtgacggtaaggtcgtccctgtagcttctgctcttgggcgagggaatgctgatcagcgtcgatacatagcgcttgtcgcccccgccgcttaaagcgtttctgatcaggtgcgtggcaacattgttgtcctccataaggaatccagcagagcctttgttggcatctttgtacctgaacgctggacgctgtgattcggcatgcacggtggtgtcatgaacgggagggatcttgtccctggcagacgactttaacgtctcaaagccctttttgacgggatgtttctccatccacttgactacaaggcctgcaatctcctcgttcgtcaagagctcaaaaagcccgtccgaggcaatcaccataaaacgggcgctggagtcgatctgggcggtcgtgatctccggctgcgcagtgacatatgggggcgttaggaactcgcgcggctccttgcgaaagaatatcttaaggtgcgacggtagatcgtaaacgttcttgccgttgatttcctttaccttgtaccggtagtccccgaatgcgcgagagggttgaagcgagcctaatacgcgtccgttgcgcacgcagtttggctcccccgggtgctccgccctaatgcgtgcaacctcgtccgcgttatcgccggtctggtcgatggtcagcgactggacagtccatttcccattttcatcgaccctacctagtagcgcacgtgagtcgccggtcagcgccactttcagggtgcagttattggagtcatacatcgccagaagactgcatgcgcccgatacagcgggcaatgcctcgatgagactttctttggatggattttcaaaaaactggcctaacgtcttctgtacgatgtcattgtcgagctgcaagaacccttgctcgatggcatcgtcgatcgcctccgaggtaagagcctcgtttccttgggcatatatcttgctcaactgatgcgcaacgtacggcaccaatgcctcggagagcttgctggacgtgtacgggccaccgtgcccatcgaatatgccaaagaaatacagctcctcctgtgcctgtgtctgctcgtttggcacagtaatgatttgttcgaccctgctgtcttcgatcgggttgttggacggcagttgcgacacatcgtaccgcagcacacccttccccctattcacatagtaggactcctccaggctgcgcagtttcgtgttcacctcgtaatccgtcaataaggatattgtgtccgggttcccgttggccttgccgtcgcttgaagtagacaacgaccgcgctggtgccccatattgtttgatacccttgattgtgtccgatgataggcaactggacatgtacgagtaggtcaaaagcaacgtccccccgatgatcgcgtaccttaactccctttccaaccgcatgggcttacccctatggtgtgttgagttcaaccgccttgcaatcacaagcttggaaaaattcctctttgaaagacaccttgacagcgtccgcgcggccttaccccatggactgaagggcgtcggtatcgccataactgaactagcggtcaattgctagattcgccaaacaaagtgaacaaaaacggaagtaaaccaagaatgtgaggcagggtaccggtgaggtagtcttctcaaggtcagctagtagacgcacagtatgacgggatactctggtaggtgttggtgtcgagtagaagggtatacccccgattgtggtgaatgctgttacgccaatcaaagtgagataagttctgctcatgtaatactcacgtgatctctcatcacgtgctctattgccacgtgactgaaatttgcggtggaggaattttcggtggacttgcaagtgaagaccgcatatgagaacttctaatgttctctataaggaattgcgaaagctacaaagccagctgatagcggataagctgcctgcgatatactagaagcccagcatgccaccaaagaagaagcaggccgagccaaagaaaaagaaggacaatgtcgacaagacttttgggatgaagaataagaataagtcgacaaaggttcaaaagttcataaagcaggtgcaatcacaggctgacccacagaaggaggagctgaagcggaagaaacttgaggagaaaaagctcaaagaggcggccgaggccgaaagacgagcacttttcaacccagtggttgagcagaaggtgcgggctggggtcgacccaaagactgttctatgtgcgatgtttaagctcgggaactgtaacaagggcgcaagatgtaagttctcccatgacctgtccgtggggcgtaaggtggagaagagagatctataccaggatgccaggagcgaaaaggagggagacacgatggacaagtgggatgaggcgaagttgcgggatgtcattctttcgaaacacgggaacccgcggactacgacggataaggtctgtaagtacttcatcgaggcggtggaaaatggtaaatacgggtggttctgggtctgtcccaacggcggagacaagtgcatgtaccggcatgcgctaccagaagggttcgtcttgaaaaccaaagagcaaaagagactggagcgcgaggccatcgagaaccagcctaagatcaccttggaggagttcattgagacagagagggagaagttggacaaaactaggttgaccccgatcacggtagagaactttgcagagtggaaaaaacgtcgcatcagtcagaagctcaacgccgagaaagaaaacggggccaagaggcgtcctagtggtcgcgaagttctgctgaagaaatacatggaagacaagaagttttctgacatggatgaggactacgaggacaaagggtctgcctgggacttgtctgaatttacgaaggctttgcgggatgaggatggctcgactggcatcaaggattatggagatggttccaatccaaatttcgaaataaagaaagccgttgaggaaggatcaggatccttgactgccgcatgaaacaataattgaatacattcatccgagctaactgacccgcagtgcacgctaccaagctcctgttcaaaatgcatgtgtacgttgaaaatttgtttaattctattccatattctcaactcattttaaatagaaaccaacatgataaagcctctagaactaattaacctttacgctgacttgcgtttcgcagtaaagttgatcttcgtcatgctgtcttcgatacatacttctggatctctgaagaacatgaaccgcgcttccaccccgttttcaagtagtatgcctatggcccgcgtaacccgttctttccactcatcagccttgcggtcaaaaaatgccgaatatatgccgtaatcattttgcgttgacggcatggtgaagatgccgtcgtcgctgagagatgttcttgcagggtacactggcgctcgaggcggtagcggaggaggctcgctcttgggggttcccgcgtggtgcggtgggcaggggccagtgccgccggtagtactctgcccgctagtgctgttatacgtgacactgtccgtggccgaatctatctgttttgatctcagtatgtcctccttcatttcttcggataattgaacgttcttggcgggtaccggcggagcgggcttcttctgcttctgctctgcgctcctctgctgcaacctagcaaagtatttggttgcgatcagcgagttcaagtcatccatcacatcccagtctttcgcagggtcgtcgctcatggagctcttgcagcatcgtatgtaaatgcctattatctgattcggaaaattgcgcgccgtcgctatgtatgcctccaaatcttcctccccggaatcaccaaccaggataaactttttattgggaaaatcagcacaaatttgagtaatggaagggagcttgatagccgctgtagaggacatcaaactgctcaacaaatttccggagtactgcttgaggaacatggggcctatcgggtactcgttggagatgtactgccgcaacgtggggtagatctggaacggcgagttcgacacgtagaagaaatcgacgccccgcgagtctttcaacgtattgtaccagagggacatgcctgggatcaaccacgtgttgaagccgctcacgaatacattgcagaaaatcgaacgcttgtcacccacgaccccggtgtgcttgatggtgtcgtcaatgtcgctgatcaagccgatgccggcatcctcaatcaagttcgtgtcgtacatcgtcgacacaggggctgccgtgtcgagcgtcgcccgaatgaccgtgggctggaagcccgtcgtcgtgtgtacgcggaactgcccgtagttgtccgtcgccgtaaacaacgtctcctggcgccccgccgcgtccagcaggtccacgatcaccgcgacgcccggcaccgccttgttcaagaaccccgcgagccggtcccggagcacctcgtcctggctcgtctggctgcccgccgtcgccgccgacagcaccgtcgacaccgacgacgcgctgctcgcggccgtcgacgcagaccgcaccgtcccccggctccccgccgcgtcgtcgccgagcacgctctccaactcccgctccgtctccgccgtcgccgtcggccgcgcgagctgcctgcagatggaaaggatgagccggttgcgccgcgtcgcctgcccctgcacgtacaccatcccccgcacctgcgtcacgtactgccggtcgctgcccactcgcgtgtacgtcgggtagcagatcagctgcagctcccgctcctccgcgctcgttggcgcccgctcctcaccctcctccaggctgtagtagtagttccggagcgagctcttcgcctgcgtgagcgagttctgcatcgccgggaggtacgtgtccttcgtcacccgcaccatgttcatcaaccgctgccgccgcccgccgcccgccgcatccccgttcgcccacatgctcgctatccgcccccgttccaagttcttggcccgcttgtgtccccgcagccgtctgtacagcgtgttgagggccttgctgcgtgtcttgttcaacaaaccggcagactacttgttatcaaatccgaccccgcgttctaccgatgtcctgccgagcctatccttccagatctcccacggcccaccgatatgctgctgctttgattatcgctattcttgtttgttgtgtattgcgcgagaagacgtgatgtttagccgtaacggaaatgtcccgtcgtaggacacatagagacgctcgaggtgcaaaacggcgacacggtcccgaacagcctcgcaggtaacaccggcgcgagcccggatcagtagatgtgcagtccttggcgcgggtgcctggcacaggcgccagcgccggggcgggcgcaacggttttccgtacggaagactcgcgaagggcctgcattggctgcgccgcaagtgcgcccgggggttggatcccgggctgggatcaggcggcagcccgtgactcaccggcgcggcgatgatgctcgagcgtttgcgtctcgtgagcaaatttcggcaggcatacggtatttggaggccaagaaatggcggattacaaaaatgctgccacggcagcgaacgcagagacaagcaagacacgatgacactggcgctggggcaggtggtatggatcgcggtgaagccggtgatccggatatacttcatcgtggggacagggtttgtgctggcgcggttcaacatcctgtcggtggaggcgacccgggcggtgtcggacattgtgatcacggcgctgatgccgatgctggcgttcagcaagatcgtgcagaacatcgggatatcagacatcaagaacgtggggatcatctgcctgacgagcttcctgctgttcggggcggggttggcggcggcgatgggggtgcggcgtgtgttgccggtgccgcgcaagtggcagggcgggatcctggcgggcgggctgtttccgaacatcaacgacctgccaatcgtgtacctgcagtcgatggaccaggggctggtgttcacgccggaggaggtgtccaagggcgtggcgaacgtgatcatctttgtggcgatgttcctggtgtgtctgttcaacctggggggcttccggctgatcgagggggacttcacgtacgaggacgaggagagcgagagcgggcgggaggagaagagcgagctggcggaggcagcggcgcggccggcgtcggcggacgagctggagtcgatcccgacgcgcgactcggcaaacacgctgcccacgggcggggagcgctcggagggcggcgtgcggccgctggtgccggtgcagctggcgggcccgccgctgtcgatgtggaacacgcggctgagcagcgtgagctcgttccggcggcgggactcgattacctccaccatgcgctccatcgacctgcggagcatgccaccacagggcatcgcagacctcattagggagtattcgaacgtggaccagttcggcaagcggctgtctatgcaggaggccgcccatggcgcggcgccgtacggggaggtgggttcgcacatgacgccggcggcgacgcagcgatcgctgacacgtatcatcacctccgaggccgcggtgcacaaggaagacatcgaggcgtctgggtcgacgctgccgccgtggctgcgccggtttcctctgacgaagcatgttgtgtttttcctcaagaattgtctccgcccctgttcgatctcagtcatgctggcactggtcatagctttcattccgtgggtaaaggccctgtttgtgaaggtgcccgatggtccccatatccccgatgcccccgataagctgccgccgttgagctttctgctggaattcacctcctacattggcgctgcgtcggtgccgttcggcctcatgcttctgggggctaccttgggaagactgcggtttggaaatctgccccctggattctggaaagcggccctggtgcttgtgttgatacgtctgattatcctgccaattatcggcatcctgtggagcgaggcgctcgtgaggttcaagtgggtgaactggggggatgataagatgcttctctttgtcattgtcctaagctggtctttacccactatgaccagtattatctattttacggctacttatacccctattaatgcattggatacaacgcagatggactgtgcgtctttcttcctgatgctacaatatcctgtcttgactgtaagcctaccgtttgtggtaacgtacttcctgaaggtaaaactagatgtgtagtgtttgctatcaacgtttaacgaatgttgaccgaaagtttgaatgcagcagataggcatcttcggttatgttttaactggttgaattttcaccccagaagtggacattggatgcgccaattcacacaagtacgacaacataaaaatcattatgttattatagactatatagatagaaaaaatcaatgtactttctcaaaatccgacaggaggtagatggagttattctcgccgacgttcacgccatactgtgcctcgatgtacaaccgcttccccaaccagtcatttaggattttcatcctatttttctgccagtccttcaccagatagttgagggagttgggctttacgaagcaacataagtccaaagcgaccccgtgctctttcaagagcatactaacaaccaacggcgttagattggagtattccgggatttttacttttgaattgcactcaatgaggcagcttagaagccctcctgtcttcacaaccatgcagttgagaatactggagtgggttctcagtactgtagattcgagatccactacgaagtgcgtcaagcctagtatctccaccgtttcatttatactccccaagacatatagtattgacaactccatgggcctgccatcagcatctgggcgagtgatatttttaatgaacccgagatcccccgtacgtagatatgataaatcagtatggctgttattctttatcttagctttgaactgttgagtaatgaaaggatcgcgcattggcttttggacaggtgtgcggtttgcttcgctagcagaggccgtgttgttacctagacggcagatactatagtcgaagacgttcgcttcagaacagcaccatatctctccaagttcgttttcatagcattgttccaatgtctcaggattcacgatagtaacctcagtacatgcagttactataccagagtcctgcaaatggatagcagagctgagaacagagctactagctgtacttggatcaaattcatgaataataccttcacgaagggcaattggatccaagtatacatcaacaggaggaatccctagataggatcttaatgcaataaagggattaaaacggtgttggtacaagtagttgatctggagagcagagctgccagctaacttgtacttcatcaaaagcgtttgcattacttggaatcttggacgtcctgtaaatggaaccataatgttctggatgttcctcaagaagtttggataaagcacggtcgcggcatctgtatctctacgcttatcgattgatccagaggataccaccatctgagtttgtttttcaatcatcgcgcacccacgatccataagcatgtatagcatatccggacataaaaccaagtccttgatattcatattctgtagacctattaggagatgtctagggttcatcatacattcagatgggctaaagagactagtagtggcgccaacgtatattccgagaatgcagctttgcaaaaaccctatatccctggtataattagtgacagagaatatgtgattttcattagtcattcttaaggtttctttcaatactttgctcatcttcaataaggttgagtgtgacatcaacacatttaggtccgtagaggcgtcatcatcgtgattaatccaaacaacacaaggatctgttttagataaacgaccgaatttttcatgaagcacagttttgaactggctaggggcaagtgaatttttccgtttcactttagtgaatacagtgatcttaggcagctcgtgcttatgactcttcaataggatgctaatatgtgtgttttgttccaacaaattttcaactttatgatcaacgaagagtcgtttaacttcgtagacctctatcactttcagtagataattgacctctttttcactatgagagtcatgcattatgtgcaatggaatgacgactaaccgacaataaaaacaggcgataacaatagcagtataatcaacagaattatctgccatcaccacgacatgatctccatgtttcaatggactttttgattctacaatctttttgatgtaggatgcaacgagtgaactaaacgagttccacgaaaactttttattttggtcgatcgatgcacctgctgtcgagaaactgttcccgttgcaaaaggcaaagtcgttcccatgcttttgagatctccactctagaatagccattatcgtctcaaatctgcctagtttttcagaagtccggctgtccaaagtatcttctttataatcgagacctgatgtctgaagagcagattccggaatcatacccatactattgaaataattatcctcgagggacctatgccgtagctttgaaagatgctcagagaatatactctcattatagtaagaagaatgtggaacataatccagaatcacgttatccaattggaatttgacaaacttagagtgaagactgcagttgagaaagtgcttttccaccgtcctattggctatctccaaagagcaatatctcctctgtagtgagccagggggaaccaccataacacaaaaaggctgtattttatgaaatatccatagaattttataaatctgttcagtaagatcattcatcctccgctctaacgttcttttatctgccatatttatctgcggaatagcactggagaccgcgcttccaataacaggagtattggccaatgaactttcaactactaccactaggaaatgttcgtccttgtcatgatctagttcaaaggccgcaacctcggagaccttatcaacagtgcgcactaagttctcgctgacgtgctgtagataaaaagtttgtacgacacgcttggaactcagagccttatccgttttgaccgcaacctctttatcagcagaaggtggatcttttatggacctagtaatatccgaagtgtgcgaccaattttgcagccttactagtttgttttgaagaaacatatcttcaattagagataaagtgtagattttaccattgtgtatgaacccaatcaactttgtcctcaaaaatgtagtatctgggggaaaaagcgaaaatattgtatccaaacgttcaatgctcgatgcgtataattccctactacagtgaagttctgtttcttctagcgtggctagcatttttttgaaattcaacttggcgttgaaaacaaagtcagttagtttatccatatgataaaactcgtcggtgacactcggcgctgaaatccagatttctcccaccgttaagtcttcgactagcatgcgcgtatccggatcgacgacacaaaccattgcatctgggatcggatatccgaaggtcgttaagcgtaaaaagtccttgatagaactggatgagttaatcatcgcggagatgcttggctgcacgatattattcttcaactgttctttatctatgaagacatcgtcctgaagtcttagtttgtagtcatgcaacgggaaattctcaagattacctagttggtcccgcaaagaaatgaaaatgccaccaaagtcaagaagagtgagaattggcgagtacgcctgcgacgcatctaaacaccccaaattcttcaaccatttatgaacgatcatgttgctcacctctgtgtcaattgtcgtgcacgaggcaatgcaccactttatgcagctaaagtccattttgttcttcttcgatattgtcgattctgggttttccaaatagttgatgacgacctgcttcaactgcaactgatcgctgagtagaatgtcggccctgtatttgttgataatagactcgtagctgcccgggcgtcttagcaaatgggggtgcacacagaccaagagattgccgctgaagatattgaacagcgtgccgagcaccaacccggtggagcgcgtggagtccaagctggacagaatcacgtagcgcatgaagcgctccttgccccgcgtgtacggtcttcgtatgtcgcccttgcgccagtttttcttcgagcgggaattgagaatagcagtgaagttctcgaactggcgtgtcaacacctggtgcttcatcacaacgccggaaagcttccccagcggtgtcctcgtgaactctatgtaggccacgttgggtatgtcgaacgccggcgtcgagcgcttggccttggcgtacgtcccgagatcatccgtcttgatgaacgtgagctgcgagaagaagttgctcttgagcaacttcaacttcgagcggctgttcacgtagagcgtgtcgagctgcttcgagcactcctcggagatgaggatcgacttcgcgttcgtctgcttgatgatctccacgatctcctgcaaggtgtacgtctcaaatgacaccggcaccgcgatggtcccggcgatgaagcaccccaagagcgccaccgcgaactcaatcgcctcgcccgggtcgtaccagagcaagagcttgttcatcttgtacaccttcgtcttgccgagctcgtgcgccaccttctccgcccggaggtagagcttctcccacgtgatcgagttctccttgccccgcgcgctgatgctcaccatcgccgtctcccggtcgtacgtctgcgaccgcccccgcaacaccgacggcaacgagtccaagtgcgccggcgcgccctccgcgctccgcggcaaaagcgggatcagaggctggtacgtccgccgctccggccgcggcgccccccgcccgtccccgtacccccgcaccgccatcgtgttcgagttcgacgtcgtcacccggtagagcgagaatgaccctgtcgactgcatgtcctgctgcccgctcgtgcggatcgtcgacgacaccgactgctcgcgcccgtggaaccccgtccccgcagagaggcacgacaacggcgacgcaagcgcctgcggcgtcggcacccctgccccgctgcacatgctcgcgccgtcccgcaccggcgaccccgccccgcgctccaacacctgcgcccgcttggacgcgtagccctttgccgtcaagttcccgtccttgtaatcctgtatgagctcctgcaactgccccaccgcctccgcactcaagtgcgccgggatgctgaagtccatcctgctcttgctgctctgagcgcctctgcctttgtccctgtctgtaaacaaacaggtagccgacacagtcacttttctgcaaacccagccaagaaacggtgccagctcgccaaccccgcgccagttgccgcccgcgccgcgtcagggacgcgtgctgcggcgcacacacaccgacgctgccgaagggcgtcgtccgtcctttgcctgcacaccgcgcttggtgcctaaactgcagctctctgaccaccgtgtttggacgatctacggtgtacgttaagcgggcccgggcgggcgtataccgttcagaaggttgcaacagcactacgcgaaaaagtatttaaaaggacagatcacgcgtggggcgtatattaggtggagggcgcacggaagactaccgaagtctagcggcgtgggcaagatcacagacggcgcaatgggcaactcgttttccagggtgctgagtaagctgttcgggtctagggagatgaagatcctgatgctcggactggacaatgcgggcaagaccacgatcctgtacaagctgaagctgaacaagatcaagacgtcggcgccgacggtggggttcaacgtggagacggtggcgttccgtaacgtgaagttcaacatgtgggacgtggggggccaggagcggctgcggccgctgtggcggcactacttccctgcgacgacggcgctgatcttcgtgatcgactcgcacgaccaggcgcggctgaacgaggcgaaggaggagctgtacagcataatcggggagaaggagatggagaacgtggtgctgctggtgcttgcgaacaagcaggacttgcggggtgcgctgaagccgcaggaggtttcggactacctgcagctgggcgacaacctgaacaaccagctgtggtgcgtggtgggcagcaacgccttgacgggtcaagggctagtagaggggctttcgtggatcgcgaacaacaccaaaagcaggtgagcctgcgcgggcttgtaacagtagagcggggccggcgcggccgtggagagcgtgtacttagtggacaagtcccttaatcgattagatatgactttagttaataattatgccggcgacgcccctagcgtgcgagggtctgagtagagccgtcggcgctgccgaagtacgccttggcagcgttaccggcgaagatgccggtctcgacgacgccgacgagggccttgatccgggcgtgcagcgcggcggggtcttcgagcgggccgaaatcggcgtcgatgagcaggttgttgttgtcggtgacgaccgggcccgccttgcccggttccccgagccgcagctgcgcgctgcggcagccggggatgccgtgcaggtcgcgcagtacgcgcacgtacgcgctgggcaccacctcgacgggcacgccacgcgtccagcttgtgcccagtcgttgcggcgagcgcttacgggagtccgcgaccacgatgaattgagcgctgctcgtgctcacgagcttttcctggaacagacaggcaccgccgcccttgatcaggttcagctcggggtccacctcgtccgcaccgtcgaacgcaatgtccacctctgggtactgctcgatgctgcccagacgcaggccgttgtcgaggatcaactggcgggattggaaccccgtgggaatgcagataaactccaccttcgccttcagctcaggtgacgcctggtattttcctatgcgttccgccacgtagaccactgtcgatccgctgcctatcccgaccacgcggtgtttcgcggggtctagattctcgtccacggcgcggtacgacgctgcgcgctttgcgtcctccagcgcgtcgcccagggagggcagctcttcaattggcgttaccgacattcttgtgcgccttccgggaactgcgctcgtcggactagctacttcgctctttctgcactggctgtttcgacaggacaatctttttatttagtcatctttacagaagacaagctacatggatttgacattttttcatcaacccaggtttcagcgcaatgagccttccgggaactgcgccgtagtcatagcctgcggtttatgtactagtatgagtgcctggccccaggccctcgctcctcactgcccctcgacctgtgtctacggctcgatgagctgctcactgcggggaagcatcgccgccgcggactgctatgggagcatgtgactgctgcgcccatacatccaaacaacggagttgaagctctttttttttttcgccggtggcgccgcaatggtcccactgggagcccgtcctaggcggagccactcggactgctgccgttgcgccaggcggaggctgcgggcaggcgcccacgcaccacgagcctagacgcagcctgcaagcagagaggtctctctggcccagccagccaaattttcactaggtagacagtgtgggtgggaccgtaagtctgaaaaatagtattagttttggctcacagcctctagttgcgaagcctaatagcaccaagaagaaacacacgccgataatgtctgctccacaagctaagatcttgtcccaagcaccaactgaattggaattgcaggtcgctcaggccttcatcgacttggagaactcctccccagagttgaaggctgacttgagaccattgcagttcaagtccatcagagaggtatgtcctattgcgctatgaagtcgttatgccagctgcgctagacgcggggcgacccggttgcggccgctaggtcgcaaccgggcccgcgaaagcgcggctgcctttacgaccgccgagggctcagttactaacttcgcgcagattgacgtcgctggtggcaagaaggccttggccattttcgtgccagtcccatctttggccggctaccacaaggtccagaccaagttgaccagagagttggagaagaagttccaggaccgccatgttatcttcttggccgagagaagaattttgccaaagccatccagaagatccagacagacccaaaagagaccaagatccagaactttgactgctgttcacgacaagatcttggaggacttggtgttcccaaccgagatcgttggcaagagagtcagatatttggtcggtggtaacaagatccagaaggtcttgttggactccaaggacgtccagcaagtcgactacaagttggagtctttccaggctgtctacaacaagttgaccggtaagcaaatcgtgttcgaaatcccatccgaaactcactaaactgcttgttatcctgattgataattatattgttttgtaaaatgcataccaatccgttataaccagtttatatattattaaatcaaacgtcttttactatataaaaacaatacgaacgttttaataggtggtctccgctgtgtggttctgcttaccccgttgtattctagtcctgcccgggtaaagactgggcggttatgcggttagctgccggagcagttggagcagagaccctagggctgttgtgaccttgatataggtacatgttaaaattacaccgctacgtaaataacgaagtataaatgcatttcaataatgtatggcacatgcttggtaaatcatcctcttctggctctcattctagctatcctcctacccggaggaaggtgcatcattggttgttgtggcataccgaaaccgctgttttgaggctgtcctgtcgctgcttgaccaaaaacttgcgacgggtcaagggatgcagctggcgcaccaccgaagttcaggttaaccgatgaagacggagtaaaagccactggcctattattctgtagcgctgaggaagcgctgttagcaaacagtgacggcgctggagaccccgcgttgctgccaaaagtaaacgcggcagcaggctggttgttattactgttgttgttattggtactaatcccaaaagctggcgaattgttcgcagtagtcaagcctgatccgaaagctgtggtgccattcgatacagagtcttgtgggaaaccaaaggccgtggcctgttgcggctgaggagcgttagcaatcgacatactacttccgttcaatgccatattgttaccaggtctttgtgagacgttattgttcattgaaaaagttggcaccggggaggttactccttggttattcttgaacccgctcatatcaaacttaaagccaccgctgttcgaggctgcaccggaagtcaccggagcagaggtactggaaagagagccattgccgttaacattatttccaaagagtagggatggcgggttagttgggttcgacgtatcaggtgttgttgtcttgaacgagaatggcgctgccccaaggctaccggacgttgtaggttgcgctgatggcgcaccaaaagtgacaggagataatgtgttctgtctatcaagagaagtaccttttactgcgcttccgtctgaaagagtcggtacagcttgattattcgaggattttgctgtttccgagctggatccagagaaaaggtttgtggctgagctgacgctattgccattcatggttgtaccaaatgttgtgttggtgttagatgcatttgtattacttttagcaggaatgacgaattggaacgtcggcttagaggacgtgtccttcttgtcatcgctaaaggttggtgtagtttggggttccttgttctgtattccattgccaaacataagcgtaggattcccagaggtcgaatcagccttcttcgaaggcacagttgcttccctactgccatttgaaaagctaaaaccagataccgtgggcttcccattcccgaagataggcggggctggcgcatccttggacggactagatttatcctctgatgatgtggtatttggtttgttttctgcttgctgggaggcgccgaaattctgtccgaaggaaaatgtaggtttggcggacccctgtgcgccaccgttgggtgtatttgacgtagtaccgctattttgggtctgcgcactcgctccaaatgaaaaaggagccttgttggcacccccgttggagatattaaaagaaaatgccggctttttcgtgctttcctcaggagatgtagctttgatcgccggttccgctacgtccttaccgcccgctgctttgggcgcgccaaacgtgaaggaaagctgcggctgcgccgctggcttggacacatcttggccctggttcccgaacgccagaagtggcgcgctgggcgtctctgccggacgcaccgtctcttctgcgcggctaggctgcgcgggacggttctcgtccagagtcaacgacacagctggcgccggaagcgccggcagcttcgttttggacggcgtatcggcatcagccttgagcaagaagtcaaagccaacactgggcatcttcttcgggcccgcggcagcgccgtcgtgcggcttggagtagggcgtgcggccatcaatgcttttaccgcccgccgcagcctcgcctcgaagcagggccggcgactcgcagccggtcagcagcttcaattgcgcccgcgacaggttggatgagaacggcggctcgccagcatcgcgcctagccgcgccgttcttcagcacgacctcctccgacagcttcggactgtccagcatcgtaatatccttcgcgtcgcgcgtgttcagcttctgttttttcagcacatcgtactccgacaggtcgtactcgaagttgctcgaccacagtctccccttcttgcccgtgcccgccctgcccagtgcagacgcgctccgcgtcccgcccgcaatccgccgccacccctcgccgctcgcctccgacacaatccgcccgccgtgcccgctctgtaccagtggcgccagctggtactgtcgccgccgcagctcctgccggtgccgcagcatccgcagccgctgcagcggcaggatcggcagcacgggcggccgcacggccacgtccgactcgtataaaatcagcggctccgccccccggacgcccgcccgtggccgcttaatcactgtatcgctgctggtgttcgactcatattcaatgggcagctctgtactgcaatccgcgcattccgctgtacttgccccatccgcaggccgccggaaaagtcctgcaattgccgacgatattgaccttttattcttggccggcgagctagtagacatgctgccgttcctcactcgatcgctgtgctccacgtctgccgtctgctaatcgtactagagctgattttgacgagagtgcgtggaataccaaaaaaatttgtcagttctgttacgtgatgtctatgtacgaacgccgttcaagggagacctcacctttatggcctggccgggcaaagggatgctgtcatcgagcccaatgctgctgtctctaattgagcttctgcagcttatatagttcctgtgtgtctgcacacggacatttctgtgggatgcgttgcagctctgtgagccctgaacagggagccgaattgcagacgtgatatatatgtgtggcgggtgctagggcagctgtcggcagcagcctgcgcggtgtagcagcgtgcgaaggcgcctagcagcgtgcggagggctggccgcgcatgccggggcgccgtcgcgctggcgttgcccgcgacagcggacagtccggcgggctccgaagacaccgcgagcgccgcgcaggcggagccgcgagcgtagcggtgaaaaaggcttgaaggtatatagttgctgtctaggggtatatgttggcggcccggcgcgggcgccgattccgccgggcgcgagcgagactcagccgccgaaagttttcctgcactctgccctgcactcttccaggtagcgtgggttgttggctctctcggcgcatccgcggtagcagttctggagctcgtcgccggcgcaggcgaggccaaggacacataggactgggatgagggcgtggtggaactgcattgtagtgctgggaactggagtttgcttcgaggccgagtgaaaccgcgctgtgcgcgttttatatggttgcggaggctacgagggtcggctgggcgccgagagtcctcgtcaattatctggtgtggattacctcagtttgagtaacgaggccacatgggtccgggagggtccttgcaatcgcgactagcatggcgggtattgggcgaggacgtcgctgcgcgcgctctgtgattgcatgtcccgcagaataggcgctccctgctcagcgaaacattcgcagttgctcccaaattgcacaaagtttggcccactctgtggactgcgacgcgatgtcataatcggggcgggcggcgccatttgcggacgtatcttttttggagcgagtaagccgttaatgggcagaacggtcaggcaataccgttcggatctctcggcatgctgcttggcaatcgaaacgattccgaactatgacatagtcggctgccctctaggtaggtagattccgctcaattgaaggccctcaggcaggcaaacgccgccatatagcctgctgtgcggcggtctgcagcgtatacatcgcgggacatcggacgccgttatcccaactgagaacgcgaccaaaccagattgcaacgctgccgttttccgtaatacatccggccctgctccagggggctggcgtacttggcgacctttgctttgtcggcattcacgtagctgcccgcaagtcatcggaagcagaggttaaaacggtaggcaacccgctgaaaaaggacgtcgcggactcgcatgtgaataagtggtcggacccaattcaccaattcggcctctcagcctattgcacccgccttgctgccatacgaactgcaggctgtcatcggacgggagctccgcgtttctttagatctcgaggcagggcatgcgtattaagcaagccgcagaggtttctgaggccaggttctgtaaatcacagtcagacgtgacgcaagcatcctgctgtgctcgcattgaactttggctcgctatagatgcaccgagccgtgtttcgtgcaatgaacggctgcgggaatgagacgcgtgctaatgccggccggcataccgccgaccggcagaccctaagtgctcaacgggcacgcgcaacaaaacttggccgtcctgtgccacactatggcttacgaagaacacatttcatagacgcagaataatgtccggatctgcccctttaagcaaccacatattaagccgctgacacacagactgtcagcgcttagaaatacttcggtgagtgttcagaagcccgagcgctcggagttattcatgatcacgtgatgggtattgaccttgcgatccacagacaggcggaaatatgcatatatgtaagccaagatgccggcaaccaattggtctaactgtaatgcataacactgtattccgcgaagcggctctgagcatgtatggtattcggcgctagattgtcagcccacgtatatttccacgtgacgccctgatgctatttacaacataatcactattgacgagcaaggatagtggtcgcacgttacgaaaaagaaacgttgaaaaatttggatggtggtgatgaggtagagatattaacgttaatgggcgagcacgaatttggtcgaagttctatactgccaacgacgttcgcagattgctgagttgatgggttccaaaagtattaaaaaggcggtagtccctaaattatcggaaaaagccaaggaggaagagttgagcacttcgggctcctctgattctactttagaatcaagttcatcttcctcgtcggagggcagctccagcagcagctctagttcctcggacagtgaatcgagctcgtcggacagcggctccagctcttctagcagcagctcgagctcctccggcgaatcgggctcctccgacagcgactcgagctccgacagcgactcgagctcctccgacagcgactcgagctcttcggacagcgactcgagctcatcgggcagcagctcctcctcgggcagcagctcctcctcggacagcgactcctcctcggacagcgactcctcctcggacagcgactcgagctcatcgggcagcagctcctcctcggacagcgactcgagctcctcgggcagcagctcctcttcggacagcgactcgagctcctcgggcagcagctcctcctcggacagcgactcctcctcggacagcgactcctcggacagcggctcctcctcgggcagcggctcctcctcgggcagcagctcctcctcggacagcgactcaagctcctcggacagcgattcctcctcggacagtgagtcttcctcggacagccagtcctcgtctgctcctaagaacggtaagagagcaagggacacatcctccgatgagtcttcatcgcgtaccgcgacaccggagccgcctgtaaagaaggctgcaattcccgccggcgaagacgaaatcagggaaggccagcggaagcacttctcgagaatagaaagggcaaaaatcagcttcgaggacagaaccctcaccgacaatacctacaagggcgctgcggggacttggggcgagaaggccaatgataaactaagccgcgtcaggggtaaggacttcactaagaacaaaaacaagatgaagcgtggctcgtacagaggtggctctatcacactagcatcgggctcctataagttcgtagattagtcatgctctaaccatgcatgtacaatagaaaaagcatcgataaataagtactttaaggttcggttacccctaaataaagggttacgtccccttgcgtcgaaccctattcatcgctacgagctgcttgctgcgatgcttgctgcgatgtcatttgaagtataaaaagggcacttgcaagctcaattgacccatattctcttctactcggtgtgaatcaaagacaggcaaaatggaccacatcaaagatttcgcaagcaagcaagagaagaacggcgaggacattatctccagagctgaggatggtgtcaagcacgccaaggagaagctaggagacgacggctaccagaagcttgagaaccaggcgaagaagttcactggcaaccgtccttgaactcgtcggtttaactgtgggtaagtaaaattctagctttcttctgggactggttcctagtcagtttattcgtcgagatatagcgtatgtagttaagatattctacgtcgtttgaccgcaatgttcatgccagcacgacagccggcgatgaatagcgctgggcgccgaggacgccgttttgtgtcagcgctaaacggtgtgttcacgtgacccgggagccacaatataaccaacttggcactcaataacatcggcgatctcacgagctctgacgcaagaaaacagccatactcggcccaagataacagtcttctcaggatgtgttactactgttacacactgcctctcatttgctaatcgaggctggtaaagcctgatatcggccattgcttatagtataaagaaccagcaggagtcaaaaggcacgtcaggcccagataaagccacagtaacggagattgataagacggtgcacttcgccactgtacaaatacataaatattcgcagcagggcaaattgccctccagttgggtttacacagattggctggagcaagatggctaccgacattaaggcgccgctgctggtacacacggaggatctagagggtagtggtacatcttcggactccgccagatcctactatggcggtgtgaaaatcgcggaggatgtcatttcgccagtgcttgccaacgaggtcccgcaaggtcgacatttgggcttattttctactgtagtcatgttcgtttcgcggattgtagggtcgggcatattcgccacgcccagcaccatgttcgtgaactgtggcggcaatgcactgttgtttgtgacagtgtggatagtcgcgatgctagcggcgttttccgggttatatttgtacttagagttcgggtgccttttgccacgatcaggaggaccgaagaacttcctagaggctgtctatgaccgccctaggatgatgatgagcgtggcgtttgcatcctttagcgttctaactggctttacagtatctggcgcaattgtgtttgggaaatatacgctctacgcgctgggattcgaccggaaatatgtcaacgaggactctgcaatgtgcaactatattggtgcagctgcggtgatgctcattgtggtgatccacggctcttcagtcaagcatgggatcattgtacaaaatattctaggaggtatgaagttcctgttgattgcagtcatgtctgttacggggatctacgcagtgtttttcttcgacacgcgtgctgatgaccaaaaccctgcctattacgtgaagtcgcacttttgggaatctcgcgacagttctctaatcactgcctcgtcgcttacagcttcattcatgcaggcgtttttttgtttctccggctgggacggagtgcactctgttgtatcagaggttaaagaccctgtccgcaccatgagaattgcaggtccattttcattgttaattgcatttggctgttacatgcttttgaactttgcgtacttatttgttttatcttgggaggagattcagggagctggcccgctcataggctcgatacttttctccaaactatatggtcctacgctcggcggtaaatttgtgacgctatgtgtggcggtatctactgcttccaatctattcgtcgtcatatatggcacctctcggatgaaccaggagtttttcagggaaggatatttacccttcagtaagcagatggccagtaactggccatggggttctcctctaccatcgctgttgtgttgcgggttaattactgtcgcgtggctatgctttctacccccaagcggcgcagcatatgactatttggttaactttgagggttattcgaaacagttcttcttaatgttgattgcaatcggactttttatatacaggcacagacatccagatattgtcgcagagattagggcgtctatgatcggcgtggcatttttagcggtaatatcggtatacttaatggttggccctttctttggtgaccaatcaggaaacgttgtaggttggctaccaccatatcaaatcaccacgcttttaatgttcctcgtatgtttcctttattggctactaaagttcgttctcctaccgcgactattaggctataggctacaggctttgatagtaaccttatctgatggcctagagattaaaaggtggagaagacgatattctaaacaggcctctatataaatttgggcaaacttttgtaactatcaaactccctacgatttaaaaatctatgtacttttttaatgccaggataaaaactgtatggcatgatcgagaactctaaaagttcatcgaaggtactaaaatgtgtaattaacttcgacttatttcgagttgagctttcttacaaaggcttcttttgaagcttgaatcaaatcatccaattcgcctgttctctcgcacatgttgtagaaaatagtgtttttgttcagtagtagagagtatggatggtcgtattctttaacttcacctgcatccataaccagaaccttatcataatcgataatggacttcaacctgtgtgcgatggtcaggatagtgctgtcccggaattcttctctaatggtctgctgaatcttttcatcagatgtataatcaatggaggcagtcgcctcatctaacataataatctttggtgagcgcaaaagcgatctggctaagcacactagctgcctctgcccctgcgatagattagcgccgccttccgtaacttcattgttaagatctaggaacttattgatattctcgccactggattgagtagatggactagaaagagaatttatatctgtatcagaaagaaggttaaccctctgcaacgcctcataaatttgtttatcgctgtattggctatagggatccagattagattttaacgtgccggtgaacaaagtaggatcttgaggaatgatagtaatggactgccgcaaccgatgtaaaggtatagtggtgatatcaatgttgtcaattttaacaaagcctgtctcaggatccaaaaacctaaacattgcagtgattatcgtcgatttaccagcacccgtccgacccacaattcctacctttagcttcggttcaactgaaaagttgacattcttgattacttttggcagattaggagcatagcggagagacaagtcagaaacatctattcttccatgctgtggccagttatctggtgggagttgcgcgttttcattgtagggttcttgctctatctccatgtactctttcagacgctcaaatgagttcatagtcatctcaacgttggaatagtgtctcacaaaccaaagtgcaccttccgtgaaggaaatagcataggttaaagagataccagcaagcccagcatccaatttaccaatattcaaataaatgaaaagaccactgaagaaggttactagcgcaccgagcaagtcaacacgaaacgctagccatctgttggctatccacaggtaaaagaatggtcgattgttatcatcaatcctactcaagttttctaacatgaaacggcgctcatcgccatacgcacgaatactagtgatcccaactaatgtctcagagaaatgctgataaattggagacctggtaatcgattcaaatctcttcagttccctcgatgtagtaacgtaaaaataaccaatcaaagcatataagaagccgataaatattgccataatcaaaaattgaggagtaacgtaagcgatcaaaacaagcgtggaaatacactgaacaaccgcggcaaaagacccctcaaaataaggaatcaattcctggtcgacggcttccagatccttcgaaagtctgttcattattcttccggtgggggttgcatcaaagaaacgcatcttcgcgtgcaaaatcttccacaataccaagttgaagatcttccgggatgcatacaggcctgccataacactaatgatgttttttaaggcagataaggaagcggttgttagaccgatcaagacgtaaattgcaaggtaatagaaagttccctttgatccatcggaattgactgcatgctcggtcatcaagcttttaacaaaaaggaatggctgactgaataagccttgcgcatgccgaatcaaattaccgaaggaaggcgtagacgatacactaatcattggtatttgactcttcgcgtcatgcataatccagtaccgaatccaccatgaagagctcatatataagcactgggcggaaaggtacaatgtagcaagagcaagtgtcatcttccagccaccaaacaaattatagaaccacttgtagacatcaatgctcacgacgccgtctgcttttgtttcttgagcaactagtttaccgacctttttgcgttcgtcatcgttcgacgcattgccggcaagattttccgctgtggcagttcttattttattgtcaagctctttcaggttaagcgcactttgtggtgttttcaagctgagcgacgaattggttcttgacgcaatggagctcttgatgagtttgtcttcaccaagtaggccctcgttcgccaacgccaagggttcgccctgagccttaactcttccgttttccaaaatcacgacccaatcagcgttacgcatcgtgagcgccacattatgagataccaacacgcatgttctgccctccatcaatggcccgatgatacagttttcataaatccacagagcggtgtgcgaatcaactgcgcttagacagtcgtcaagtaggaggtgtctcgcagaagagtatagagcccttgccaaagaaatacgctgcttttgcccgcccgatagtgtcatacccttctctccgatttgtgtcaaatcaccaccactgaggatctcaaagtctttcttcaaaccgcacgcttcaagcacgtcattgtaacgttgctcgttgtatggtgagttaaatagaatattgctacgagcggtatcattcagcagccaagcggattgagaacagtaggcgatagagttagttaatccatctgcttgaatgaccaagtcttcgcgcggatccagcgatggaacatatatcttaccttcctgcaaggtcatctcacccaataatccaagcaagagtgatgatttcccggtacctgttggtccaatgacgacgttcaacttaccaatcataaattcaatatcgatattacgcaacctgaagctggaaggatcatcattccacgcgatagtggcattctcaaatgctaaacggtttccactgatagttagttgttcgtatttggttgtctcatcttcatccaagaacgcctgaattctatcaagagaaaccttcgactgcacaacataagacagcatatccgccaggacgtccaagggattacgcaacatcacaaaaagcgaaagtgcagtaaatgcaaccggtatagtgagcacttccccctgaatgtagatgtagcaggcaaaagaagctgaaacaacaatcgtggataccatgaaccagaggaaggaaattgcggaccacacaatagctctcttcagcaaagtcgccagttcatcctcacggatggcctgcacctccttctcaaagttcgtctcccatgcaaaaaacttaataatacggatcgactggagtgtctcattgagtttttgaatacgcttgtccgtgaagcccaacgttaccacagtcaggttgcccagcttctgtgctagcttatagttcaaaggcagcattgcaaccagcaaggcaactcccaccaacgccgaccagcccaacaggcggtacaggaaaatcatcgagacaaccaccatcacaaaagacccaatgaaaaagtacagatatgagctaatttcagagaccttgaaggcgtcaacggccatcaggttaatgatttcgcctaggttagatgctttggattcttccgcgttggccgaccgcacagggctcccctccggcgagttactcttgtccactgccactccagcgtaaggcgagacgcgcctacgcaaggctttggtgtagatctccgaaactagcaccgctttcaaccgaatgcatatccgccgcccgatgaagagcgcctgggcctggaacagcgctagagcaagacggctcaggaagagacccgcgacatagatcggcaccatgctggatggaacagactgcgggtcttccacataattcagcgtgcactgcaggaggatagtgggcaggaagttggcaagcccatccaggatggcccacaccgcctgcagggctaggtagccaaagaagaagcggaacaggttaccgtacagccggcctcccgaaacacggcgcgcggagtggcggaagcgccgcatgacaaagatcgcgtagtcttccagccgcagcccccaaacgtcggttatctccaggtagcgcttgtgcgcctgccagatcatcgggtccagccacgcccaggtcatcccagccgccacagacgtcatgggttccggcgacggaaactcgccgcccggccggcgatacagcaccggcagccggaaccccaccttcgccgtaactgtcaccaggaacagcaccagaagcaccgcgaagttcaccgtgtagtagcgcgccgccgctgggtcggccacgtgccccagcagcaccgaccggaacggcagcatggacgtcgccgccagcgccgtgtacgcgccgaacgacatgccccacaggttcaccggcagcgcgcgcacccacgccagctgctcgcccgcgttggccagccgcagcgccgcgctgacaaacagccccgtccagagcgcaaggttgctccccgcagacacgcgcggcagcgggacctgcggcccaggtatgatcgataagtttgcccagacaccgccgctcagaccgagcagcagcgcgcagccaaggaattctacagccacgcggctacgctccgcaaagctccgccgcacctcctcggcgtgcccgtgcgggcgcccatccggccccagcagctgcagcttctcgatggcaaaatgctccgccttgaggttccgcccccccgtgtccgtgtaccgccgtgcagccaggtccgcgtccagcagtggccgctcctcgtcaggaacacacgccgcctgtgccgccgcgccgtcagagcccccggcgagcacgctgcccaccacgtacgccgcgcatgcactcaccacgcccagcgggacgtacccgctggcgtacagtgccctcccgcactctgtcagatcgtcgtagtcccacggctcgcagcccggagcaatcatctgtcgcgtgttttggtgagtggcccgtctggcggagcgactacgctatcccgagatatataaaggctttccgggcgacgaatagccgcggggtggactggcgccttgtttcttttccacaaaatttttgccgggaacgggctgcacccgccatcttagagattctcatctgcaactcctagaggtatacatggatatatacgctacgctgcttgctcgtcggacctgggaggtgtgcatgatacggatgttttctttgccatttcttctcactgggatagcttgctagattcaccgtgggcagagcggagccacgcgcgcctaggcgacctctgcctgcgccggcacgatggacacctgcgccggcgccgccgcggccggtgacttggccttcttccacacgctctccggcgtggactcgagctccggcgtggactcgtgctcgtgctcgtgctcgtgctcgtgctcgtgctcgtggtcgtatgactcgggcttgatggccgcgacgtcgacagtgatctcgcggtccttgagcaccttgccctggaactgctccatcttgtgcacaatcgcgtcgccctccatgccctcgaaggccacgaacacgatgccgcggttcatggacttggagtagaagaagcggttcgatacggtgtcgcgcatgcgccgcatgggcagcacgatcagctccggcttcgtgccgaagaactccgcgatctcctccttcgtggtgtagtacgggatgttgttcacgtacagcgtgtccgacgagcgctccagctggtccagcggcaccttctcgcgctgcggcggcgcgggcaccgcctgcccgcgcacgaacctcttgccgcgccggctgccgcgcgtcgccacccggctgccgcgctgcgcctgcttgtgtaggtcgcgctgctctttggtcagcgcctgccgcacgtagatgctgcgctcgcgcaccaccgtcttgtcgtacttctccttcacctcctcgaagtctatcttcgccgggaacttgacgaacgcgtaccgctgcttgtagaacttgcccgttttgttcgacgggatctccacctccacgtgcgccccgaacacctgcttgaggtcctcctccgagcagtcgcccgccaggttcccgatgaagatcgtcgtgtcggggtccacgtccggcttgaccgccgcagcgcccgtctgctctgccgtcgctgtctttgacgccatgtcgctgttgtctacgttcaactgtgaggccaaggggtgcagtccgctgctttgccagaactcactgcccgccacaaaacacgccagcccgaccgcccgcgtagaaaggctttatattgtgcgcgcccggcctgagggggctgcgataataactggaccggctcgcgccctggcgccccgcagacgctgcgactgcaccgcacgcgaccgccattgttaacgcgctgcgacagcaccacttcgggcagccgacagagaagcgacgcgtcgcgaatgtgacaaactgcgcgcgtgcctgcgccgcgcggctggagcacgcgccgcgcgcagccgtctgcggcggctagtacatgtcgctgtgcacggcggcagcctcgcggcacgtaacgggcatggattagggggccgggccagcgggcacggctgggtactatacagtagataggcgcgcggacgcgccggcggcaatgtctgtaacgcgcgcgctcggcaggtcaacgggccaggcaggggtccgagcgcgtccgtcaacgcggcaggcaggctgccgctctctgacgcgggggggatctgcgtgggcctcgctgggcgggcggcgggcttcaacaacatgtgggccggggtagagagcaaagtcggttagaggatataaacgtaggtaggggcgcgctcaggcggcctccgaggccttggatctcttggctagcttggcctgggccttggggcccatgacaccgccaccccagtgctttctggattcgtcgtacttctcgatgaagttggcgttgacggcggagacgagcttggcaagggcagcctcgtcctcggcgcggacctcggtgagggcggcgacggcggaggtcttctggttgaccagggtgcctaggcgggccttgcccttgacgatggcgtatgggacgcccatcttcttgcacagcgcaggcaggaagatgacaagctcgatggggtcgacgtcgttggcgatgagcacgagcttggccttcttgttctcgacgagggagacgacgtggttcaagccgaacttgacggcgtatggcttaggcgaggcctccattctggtcttgccctcggcgatggcggcggcctcggtggccagacggtccttcttctcggcggcggtctctggtctgtacttgttgaacagcttgaaggtctcggcggcggtgtttctgtccagggtgtgctggaactgcgcgatggttggtgggaccttgagtctcatggacaggatcttcttttgtctctgcagtctgacatactcgggccacttgacgtatctggacaggttgcgcttgggctggatggcctggccgatgccgaagtttcttggcgacgacacggtcaatgggttcttggccttggcggccttgccggacttggcagctagcggagctgggttaaccttcttggatggagccatcttgtcttgcgtgctgagatgcggtggatgccgaaagcggcgggcggaatgaattttataactcggccgcgcgcgtgggtgcgtcgcgcgcggcgggggtctgggtgctctacgagaatgtatgggtggcgggtgcgcagcacccatacattgcagacagtccccgctgctcgggcagctgccgttgcacggactgccgttgcgcggtgacgcaagcgatgatgcgattgaccccgcgtctgggcctggtcgagaatacaaacttcattaacacatacttagatcttgaatatcgtctcgaatacactacctatattttacagatcacaagtcattaattgccctctgcgtcgtgtaaccaacccttggttctttcgatggccgcttcccagcgcttccagttctttctccggacggtgtcaacggactggctggcgaatatcttcaacttcgaggagacgttgtccggagtgcgcagggcctcctctttttccaacccgccatagaagatccattttttggcgtcgttgaggtccttccacacacgctcgttggggtccttgtacgccatgcacgcagcgattgcggcgcccaatgcggtgctctctgcggtgggcgagcgtctgaccttgacacagggacccaagatgtcggcctggatctgcatgacctcgtctgacttggacatgccgccgtcgacggccaagaccgacaagggcgagtgctcgtacgtgcctgtgtcgacgatctcctccaagaagtcgtggtccttggcgccctcgccgaaggcgtcggagctcatggccttcaagatcgctctggcttggaagcacacgccctcgattgcggcacgcgcgatgtgcgaggccgtggtgaactgcgacatgcccaatatggtgccacgggcagctgcgtcccagtagggagcgaataggccgctgaaggccggaacgaaaacaacgccgccgcagtccggaactctgctggccaatggcccgacgtcctccgcccttggaaatagtctcaagttgtctcttagccactgcaccacagagccggcgacggcgacggaaccttccaagacgaaatgtggcttactggcttcggagccctccaactccgggaaccaaaaaccgaacgtggtcaaggcaccgtgctgggaaagcaatttctttgtgccggtgttgtacaacaagaagcagccggtaccgtacgtacacttggcagagccggccttgaatgccatctggcccactagagaggagctctggtcacccaagcagccctggattggaatgccggactggctgaaggacgtcaacacgtcccaggcagcctctgtcaacttcttctttgtcacggcggggacacagaagtcaccatagtactgggcagacgggacaatctttggcatgttgagcttgctcctgtcaatcccccagtactccaggagttcgtcgtcgtagtcaagagtgtccaggttcatgaacccggttctggatgcattggtgacgtcggagacaaacgcatggttgcctgtgagatggtaaatcaaccaggtgtcgacggtgccgaacatcaagtcgccgctttcgtaagcttccagaacttcagggacgttgtccaagaaccaacgcaacttggagcacgagaagtacgtggagtatggcggaagacccgtcttcgcacgcaaccgctcctgctcctcagggggggtctcgcttttttttgtgttcacgatatccatggtacgtgtgtcgttccacacaataccatagtccactaccggcaagccggtcttcttagaccacacgatcgtggtctcccgcatgttggtgacaccaatgcacttgatcacgtatggaggcagattgttttccacacgctcgtcgttcaccttgttgatcgagatcaaggtcgcggcaaagcactggacgacgttggccaagatgttcatcggcttgcactccacccagccggggtgggggaagcgcaaggtggcgtcctggtgctccagctcctcgatctccacgtactcgttcgcctcgatggcaataccctcggcagagaaaataatgcccttaccagaccccgcagaccccggcgacgacgcctccttgtccttggctgccgtcgtggagtactcgatctggtacttggacacctcctgtccctgcttgttgaataatatcgcacgggtcgacgtggtccccacgtcgatggccgcaatcagcggaatttccccttttggcaccacgttcagcgtcatatttcgctccccctctcctcaaagtctttctgccctcaagttggcacccttcttatatacccgtttgcgcatgaaacttccgttccccctgctcatccccacatacttttgctttgcgtccctccatttttcccgccaggctgctctctaagtttgtcgccatatggggctaaaaaccccttccccacatccgcgcagtgcgctgttcgctagtggcgccgtcgctccgcgaagcaatctgtcagtatctgtgccacacagtcgtacccgccaataataacaaatcgttgccgttctggcgcacaccgcagcttcaattaacgaaaaccgttgttagggtttcagactcacccacacaccgtcatgcacctcattttccgacatcgctcgaggtctattgttttctggagaaaaaatcggccgcgcaagcggctaccccggattgtgtggaaaaaaggaaacatagaggcgcatctcgcagattacaggaaaggtacattgcagatgagtggccgggatagcggcaacaatacggagtccacatagggctgtacttcaagcgcaggcgggttctgcatgggaccatgcctgccactcggtcttcctgtcaccaccgagcgctgtattctagccaaaacagtcacgggcttgcagcggggtatttttaatgctgccggagacaacacctgcatatggttgagtgccgatctatctgcgatgcatggatgcggctgtgttgtgtcagcagacgcctccagcgctcgggaaaaacggatgactgctggctccacttttttgtgggagagaggcggtcaccgagagggttggctcgggcaggctgcgggcgttatgcgtcggggtgcgagacgcggcagcggcggatagacggacagctgtgcagtttctcgacggacatacggccgtggacgattatatattggaaagcagccagtccagactttgagaacaaagtggagaaggtcgggccaactagctataaaacacagtgagtgtcaagccgacgaagcaggcagtaaagagtatcgatgagtggcaagcacaagacagagcagggcttcgctcaggaccttgagcagcaaggccccccccaccacggccaccgctcggaatacgtgactggcgagttcgtcgagagtggtgcgccattcgtgatgcaggaggtagttgcgaattcgggtgcggtggtctccaacctacgccagcaggagttggcgaacgcgcgggccaagccgcacggcgaacacgtcaacgagcgggactacgacgacctgatgtcggcctcgatggtggtcaagcctaagccactgcaccagaacccgcagacccccacggtccttccgtcgaactaccaaccgatcaacgcctggtcccagttcaaggcgacgtatctgcgtgaattctttgcggagttcttgggaaccatggttttggtgtttttcggcgactcggtagtggtccagacccgtatgtcttccactgcccgtgtcacagcattcctcgggcagcttgaatcgaacgggttaagtggcagcccagttgagtacatgcgccacttggtgacacctgacgttgctggaagctcgatatctgtcaatctctgctgggcgtccggtgtcgttatgggttattacgcagctggtggcccagctattaccggtgctcacatgaaccccgcagtgacgctagccaactactgtttcagaggccttccagccgtgaaggttcttatctactgggcagctcagatgctaggtggttacatgggtggcttgaccgttttctggtattacgcaagagtgattaaaacaaccttccccgactggaaaaccaacgaaagtgtaatcggctgcttctctacggtcccattgccctacttggacagcaacaggcagttcatcagtgagtttgtcatcggtgctctcttgatcggcctaatatttgctctgacggacccttacacatgtctgaccacggactttttcccgattatgttgttcctcttgatcttctctctattagcctgtggctcttaccagactggtgctattttgaaccctgcccgtgatatcggtcctcgcttggccatgtggactgtcggcttcagcagaaaggcactatgggaggaccatcaccactacttttgggtggccctcgtcggcccatgcgtcggtggcttagtgggcgccttgatctacgacttgctaatattccagggccacgaatcccctgtgaaccagcctgccgctcacgtactcaagagactcaagaccagattcacctcattcggcaggaagaccgcttccacaggcgagtacaccttctcggacaaggaactgactgatgtgagcagcaacaatgcctcgggcaagaacatcaatttcagatcggtaactcgcggtgagtctacgaacggcgttccgaccatctacagccaatcgaacgatcctaaaaagtaaaaacagtaatggctgagatggtaacttaatgcgtttccatgttataatttgctacagtatgcgtagttgtatatatgtaatttactagagcgctatgagctttgtgagtgtttctactttgtcctgctaccttaatacctgcggcgcttgcagtgtggagattagcctaccatattccagtatagcaacacgatgcatatcgtcatggtcagtgccagtatcatagcgtttttgcgacgtcggatcgtgatctggctgagcacgtggttgatgcccgggatacgctgcagggtctggtacacgcggtcgttggcccgctgcagcgagaaccgctgttccgcaaaccggtcgcgtgtctcgaacgcctgcgagatcagccggtccagcacgttatgcgactcctcgatccgccgcgtctctgctgcggcgtactgctcctcctgtggttgctcctccagctcgctctgctccagcgtgcgcttgacactgaacagcagattcagtctgctccgctcctgctggatggacgaccggatggactggaacgtctgccagtgttgctgtagcacttcgcggtgccgctgcaattgcgatagcttggatgacccgatgctcgtggtatcgtcgcagatccgctgcagctcctctataaccccttgccgctccttcagtacgctctcgagcttctccgccagcccgcgctctttgctgtctgcttcactgcttgtcgactgcgcatatgaggagtacctcgacagcaatgagtcgcattgcgactctaacgagatagctttgcctcgcactgtcacaaatgatgccatagtgtaccgtgaagtgctgcttcttgcctccagactcacgaacgcccgttgattcaacgcgacgctatgtagtaagtagcatttccccctacgcttttttttggtctgtgcagggggccaccagcgcagctgctaacgtgaaacccagattctcatcgagcagctgcccgtaaagagagaaccagcgtagcatgtagttatctgtctcgggcccgacatttgcatctgtatcacatgagttaacgacataccatgtttcgtaagcggagcccgacgttgccgggacctggtccagcgctatagagaagcggccaggctgccacaacggcagctggtacgggtctacgaagtgcagcttccagacctcgtactcggagaccgcggggtcgggctcccaataacgcagcagcagctgcgggaccgcatacagggggtggaggtcgacacggacgtcgaagcgggcgctgttgcgggcggtggcgacggagagttgcaggcgacgggcgcgtgggtcccacagcgcgtgctcgcagcggcgccagcggcgcagcaggggcaggagccgcagcacctggtcggagaagtcttccgcggaaagcatggcggtggaagaagaataaatagaataaatagaataaatatacttaataaataatgtgtgattgcggactatgaatatcggtggctacgatgcaacttgcttttgtcgggatgcgtctgcgcggaactcaggcaaaagctagggccttcttgatctcggcgatggccttgcccgggttcaaaccctttggacacgtccgggtacagttcatgatagtgtggcagcggtagacggacatggcgttctgcaactgctcgcgtctgcccgcgcccgcgccatcacgggagtccaccatccagcggtacgcttgcatcaagacggctgggccgaggtactgctcgttgttccaccagtacgatgggcacgccgtcgagcagcatgcacatagaatacactcgtacaggccgtctagcttcttgcggtcggcaatgctctgcagatgttcgcgcccgtcggcgggcttggaagccttctgcaggtatggctggatcgacttgtactgtttgtagaagttggtgaggtccggcacgagatccttcaccacgtacatgtgaggcagtgggtagatcttcacgtctttgttctcggcctggtcgatcttgcacaagcaggccagcgtgttgcggccgccgatattcatcgcgcacgacccgcagatgccctcacggcaagaccgccggaacgtcagcgtgggatcctgctcgttcttgatcttgatcagcgcgtctagcaccatcggcccacacttgttcaggtccaccttgtactcctgcatccgcggcttctcggctggagtgtccgggttccagcggtagatcttgaagctcttgtacctcgtcgccgatacttccgccgcttgtgtggcgagccctctgatgagaccgatacgaccaatgcctgctctaaaaaccatgcttatctttgacaacgtacccgctctcctaggctaccttcctccctgcggaatagcactttatgctcacttttgcgcctagtaacaccaccaccagcctacctgcagcttaatgccttatatatctggaaaactcgtcactcacttctgaagaactccacgaaaatcgccttcggcgccgaaaagaggccatgaccgctcggaagcagccgggaaatcacgtgatatacacgtgagcttgcttgcatgtcacgtggtgtgtttgtggccgtaagttagcgcaagttcggtttggttagttgaaaacacactgcctgcaactttgtggtgtacaaagaaaacaggggagccggagcaaatcggagctactgaagtgtcacgtgataaagcgttgcatcgtgatcgccgccgagcccccgggacggaagtgcaggacgcattcggaagcagtgaaagggcttgcagcgcgttaatgagtgacgctagccagctgctgactgcccaaaagtactcccctggattggagtttctctatgggactgtttgggaggtttcattcagaatcgaagccaaccccaacacgcagtcacgtgatcgagagcgtagacaggcgccagtgatgggcgctaacgcagcggagcccatagcaggcaggtatagacaatacaccttcgggatacacatatgtacgtaaaaattagagctcactgtcgtagcgctggttgaactcggttactgcgaccgctactgtcttgtagaggtaacggcgctcctcggcgtcagtgcaagcaaagaaaagctggtgatccatgggtttgcgcagtacaacatggaggccgttgcgggaaaggcgcacgccgccaacatctgtgaagtctgcctgttcaagcacctcccgtgtcgagagagatatccgcagtatgcgcgagagagatacgagcgcgacgtttccttcagtgcgtagaacaacgtggccgacatattggtcggactggaattgcccaccattagctgtctttagccagaactggccctgtgcctcatgtgcattgtacggctttataaccttgtccaggccaacatggcgaggaagacgcacgcgatctatgtgtccaccgtccatcatcgtagttgtattccgtattccttcggaaacattactagcaagatctaggactccaatagcagtctttgtaggcaggccaatgatgcccttacctaggcccttcaggaagccagtggttccctctttgctagcgcccttgtatggatcgagggcaacgcctgagataccactaccaatagtattcataaatgaggatgcactggcagcaaatcccacagcgccccgttgacgctgctggagcctgcggcggtcttggaaatccgagtccctcgttgcaacagaaagacccttggccatggagccagtgagccgtgagaaactgtcagaaagaccaaaaacagacttcttcatgaagctgagaccaccctttgctaagctaatgcctagttcttgtggtctatcattcatgatgtagccctggtacggttcatagaatagatctttgacaccagaactaatggtattgaacagaccaactgggttaccaaggaaatctgcggagccgaggattttatgcaattggtagaagaactgctggccatagtgcgcctgtatcacttccagtaaggtgggcattgatactctcacattctccatcatcaaagagctgagtttaataggtgcattattcacattaccgagcgccattgtcaagacatttaggaaaaacataatagtacttgttccacgagcttttttatcttctgagtttgcattgatcctttcagtgcgaacgaatgataaatgcagcaaagtaggttgaatgtgaagcatctcaaagtaaacatccaaatcactttgagtcttccgtggttcagatagttcacatacttcctggcagagttggtccggtattgttcgctgccatgacgcaccaggtatcttaaagaagtcaagtactgcaaataggaagtcttcgtctaattggagtgtcatttcttgtaacaataccgtagcaaatttgaagttaagagagctatgggtgctatctttgacttttgaaatggatccggaaagagcaggatgcacattcatttccttcgtagtattcggaatccttgtagggtacagtacgttttggtaaataccgccaaagagctggttatcaacctggatccatttcagtttccaagtcaaagtttggtatatttcagagttattgtaacgcaattctagtcccttcatactaatgtataatagttcctgcagcctttcagtattaactaaggagataccgacaccttggaatgcaacagatacccgcatcttgatctcattatcattttcattgatctcaaacccttcgttgtttgtactgcctgaaagtgaactggaagttgactgatgattgcggagtttatacaagctcaattcctcattataatttgtgatcaccaatgcctgcaccccattgtccattacaatgttaaaatcaacaattaatggcggatcagtcttatttgctccaggtaacctcataggtttcaggttaccgagctcattcaggtcaatttccctcctcctgtttttcccatgtataacaagcttcttttgtctagcgctagggtaatcccatgcgtatggcatcacacttctcggtggaacgcggtaatacaatggagcgtatccgcggctatcaaattcacgatgatagtccacatcgtcatcgtcatcatcaacaatcctaggatcacgttgccaaaatataaactcataatcgctgaaattccttacggaaaatggccacttatcattggcatcatcaacttcaataaacagcgtagcgttatcaagatagatgtcaacttttaataatatttggccactaacttgccgcatcactttgacatatgtagtaccgacatctttaatcataaaaggttgtgaccattcggagtcatttcccaagaacttcattctcaattgcttgttgaccacgtttcttaacttgtataacggcatcgaggaaccgggcgaaagcgtgcaggttccatccacaaattcagtttccgtaattacaatatccgagtcaagtttattacggataatataacggggttgaatttcaacaacctttgacaaagcatacttaccattaccttctgtcacataaatcccaatattacattccttatctttgttaggaacatccattgtcacatcaacagcctgaccaatagcctcaaaagaagtgggaatactagcagttgtatctttaaatctgatccgtgccctgttcttattcctgtcatctctatcaaaggaaaatatttttggtttgctgactcttttgccgtcttgtataaaggcaggagcctgcataataccacattgcctatccccttcgatgtataagtcacgctctgttttgttcaaaataacataaggtgcatatacgcttatcaactttgctcgcataccctccacttggtggtagtgtaacttcaagtttactttttgacccgaataatgttttagctgcaccttagtttcaggtttcatctccgaatttctaggagaattgataattacttcgttagaccacttaaacccttcatcgattggttgtacagcaaataacaaaaagtcctcaagagatatatcatgtattggcaccttttcacccttctttagcctcttcagattctttgcccttgtgtttcgactaaataagataaaagtcatatcgaatggaagcaagttttctataattagtggtgaggagataaccactgacatatgcggatacgctttcaaaagcggctcatttggatcatatttagcttcagcttctaggtgaaaagtcgaatcagattcctcatcttcacagaataaggcttgcggtcctcttcttagcagatattcccaatatataacggagtttgaccatttatactgcctgtcgtttagcggtctcacaagcacacgagaatggtaaaccgaatcaatcggtatagaacgcttctgccctggttcaatcacacatacttgctcgtcgttaaatcctatcttaatttgtagcggtgtatacgtggaattctcaaaaactaaagatgaccttagtgttatcaacttgacattatcgtcgcacaattttaagtcggtcaccaacctattatggatattattggatggggggtaaagcttatgcaacgtctctccttcttcagtagcgtcaacttcgataatggtcttgtatttcggatcacaaagttccacttgaagaatatttttactattatccgtatccaaactttctctgacagctctccagtcttcaaactcccacggtatgacctccccatttttcaacaacgtcaactgccgagcaccttccgcgcagttatcatcacgtatccaaacgttgatatccattcctgtatcatttaagatcctataaggtttttctgcaccgcgcgcaaccctgtttgtgtcatctggatagaacaaagaatctgatatgttagagaatagtgcaatcgttctgctagttagagtaacttcggcaattttattcgaaacaatctcgaataggaaagaagcatcattatcaccacccttagtggcatggaatgtaaccgggaatgcctcaattaaaggctcccaactagatcttgagtagttaaagacattggtataagcttcaacagttgcaactgcatcaatgtttgatgaccaatctttagcatcaatattaaacggtttaacgttaaaatccagaattggaagttcgtgtacatcaccaatcaaaactagccgcatacctgaaaaattgatatccatattttcagcttttaacacaacttctggggtaggaaggaaagtaccagtttctctcgacaaagcactgacagaggaaacaatacttggcgcatagcgcttgattttctccttgaagtccttggagaatcttccatatcttgttgcaagggtagcctgctcgtcgcgatcttcttcacttatcaacccattatcttttgcaagagccatagccctgttgaagatagatatcgccaatcggatatccctcaaagaaagacgcattactaagttgccgatagatccctggatctcggttaacatcctattcttcgtagaattcctattgtcaataattaacgccgaggaacaatcatccaataatctgatcttgtcatcgtttgaggtatccatcctgcataaaaacatcccgacgttattgatagagagtgacaatatgttttgatctgaaagcagtagttggccaacggcaaaaacgacagcttctgagtcaactttagatggatcagctaacaaaataacctgcgaatttataacattaatggaatactggaccttcatcagactatcacgatccggaactgatgcaacagctgtactgccatcgacggatattttccgatccgagttttcaaaaactaccgatggagctttaacgctgaacgcattatcaaagagagattttagggcaaatagataatccattgccaagatgactttaggactatccactgtgatcgcaatatcaatgagttcggtagagtccatgaaggtcctgttaaggaagcccatgaactggtaattatcaccttcaatttttggaatcaacatagtatgtttgttatccttcgaagttctaatgtcttcaactgtgaaggcggcaatatgaacttcagactttaagtttcctacatgtgacatatgcatttttatcccaaaatcatgcaatttaatttccgtgattccatgctctgatacatcttgcacatctgccgtctgattaaaaagtgtcagggatacgctaggcgcatcgaaagcaacatctataaagatgccgttaggatctggtcgcgcagcttccttgtatactttaaagacatcattggatgccttgtactgggcattagggcctataactgagcttgcattaatggctgcaaactccatatcatccgtttcctttatttcatcaattgtaaaagattctgccagccgtgtggaaagtaagtacatgaactttagttgtaattcagtgattttggtagaaaagggctcaaaatatcccctgaccttgaagacaggatcagtactgccagctttggggtcattatcgatatcaaaatggatgtccaaatcatccatcatataaagcttttgcgttacactgttttcgagattaaacaaggatgtgaactttccacgccttattccagctttcagcttgttaactaacccgttgctgcctttaacaaagacgttctcaatgaataattgccctaagaagaatgtgacatcatcgtaggtcccggtttttggatcaacagactttgggaacctgatcacaggagcgttaacaaaaacattcagcttcatgttattcactgcatccaggctacctgcttggtcataagctgctagtctggcgcgatcgaacaagcccttcatcttctggaatttagccaggtagttaataattttatggagagagtgctcaacgatgtttatagtcatcgatcccgtcctgtagtcaagcttggatgtatactcatgtggattattggttggatcaaatgtttcatataccaactctacaagctcgtcgccattgactgtaattaactgcctaaagattgagtcagttgggagcccttcgctaattttgtcaataagttgtaggccacctatctttgcagtggccttcatagactccggtaataataagacaaacagttcagccgcagaaagctctagcgtcgctaatagaatagaatcgtcgttcaaaagaacggttataccatccattgagagcttcatgttaatttttcccggagcatcaatggtatctgcttcattgtgtctcaaaacatcttctggcaattcagctgtcggatctgtaaacgtattaagtgcgtagtttatcatagtcagcactgaagttggtgtcaacacgaacttgagcgcagccatagttatgttcacatccctatcaaacacttctatcaaagttccctcgtagctaacaattctttgcgttttatgatagctcatctggaatatgtccttggtggccttatcaggtatattataggaagtggcaagtttcctaaactctggcacattagatccctcgatgtgatcctctagatcaagagaatttagatgcaaatcaagatgcatttctttcgccatgctcttgaactccattaatagatccttaccataaaactgaactaatttttgagatttcatggtagtgccatcgacacatttctgaagagaaagttgtgcagagtccacctttaaatctaactcaaacacaggttggtttagttcagctatggtcatctgggccaagcgcgactcggtctgcttaaggactgacacttctttatccctgccagtgaatcgatgctgtctgaactcatcaagaaaaacatattggtcatgggttgcttccggttcaccctcatctgctacctccaaatttggaatacatttgtcgagcagttgcattaatattttgtattggtagtcgtttaagtataggtgtatcttgggtagtttaccagatgttttaaccctaggtaggttcaatgccttcggaaaaatggatacatcaacaataaattctagagccattcgatcaagaatacaaaaatggttgtctttccttttgacacttagactggatatcgttgacttcacatcaggtccaatcaaaaactgagtatccctcaagtagagatggaaacgatcaaacatcagccgtttcagttgattcgacgattttttgttatattcttcaacgctcatatttgttatttcccttattctttccttcggaactaaatcgctaacgatatgcatttctccggcatctaaaacagcacaaggcgaagaccattcttgcggatccaacggaattatgaatgtcgttgaagaagcgtcaaagactaggttcaaagttttgtgttcctccaggagtgcttgcaggcccagccttgtttgagtagtccaaccctcaacagtagcttctgcggcactcataatagctgtgatcgtatcccaatgtttctttggaggattaaaaaacttcaataattcattcaagtaagctgtatggtagaatacaagcatagagccgagcttgatattcacataggtgtcggcggattcatctagaggattattttcaaacacaagttggaagaatggttctgaaggtgaagctgccctagaagagcggtctgtgtagtggtcgctcacgctcaatatgtgcttataaagggtatccggcgagccatcttccactctcatctcatgtaaatcaaattttgcaagaaatgaatcagacctttgtaggaactccgcggaacattgttcgaaaacaacttcgcacaatttgtatttctttgaccgatgcttgatcactagtgagcccttctttagcagattagtaatccgcatttttaccctatcacggggtaaatcaatggcatctaagatttctttattctcatcaaactctatggcttcgtagagctctttcttttgctcctccgtgattgataacactggctcattattctggttgttcgatgatccccaccaagaggaaaaccagctaccgggtgtcgactccttaagaactggctcaggtgactcagactcctcctttatcttgtccttcgcgcactcacgtctagcaagcgccctgaaaaacttgatgtcgtcgtaagatagctctctatggaggttcgaaagggcctcctcgtccttggcatccggtaaaggaagttctggccctccaaatttgagctttcttttccacaactccacgtatgcgttccgcttttgtcggcgttccttgatgtaggcccaactgcatttatagtttctgtcgtgtatctccgacaggacacactctgcaatatacctgaaaaactcccgcggtttttccgacggagtaaatgacgggcggtgcctcttatacttcactgtcttttggtaccaatgaaacatagacatcgtatggagcaactcttgatactgacagtcgtcaagttccactccaaactcgttgaagaatagctgggccacaatgtgcgcctgctcctcggtagagccctgcttattcagcgtgagcttcccggttcctgagacaggtcttaagatgaattgatgctcgggcacattgtcgccgctcgcaatgcagcttttcatgttagcaatgacaacatcctggtcctcgtctagaatggatcggttgtcggtattccagtacacgcagatagaatccaggttcatcagcttgtgcgtaatcgcctgcgtgatagaaataaagcttggcttccaattcgcgtcggtggacatggcgctcagctcactgagcgtcgcgccgatggtgtacggtttctcgctgaacacacagcgagtgtcctcgtaccgcacgtggatattcagaatcgtgatttgaaggttgtccacaatcttcgtcagcagcgactgcgtgaacgacacgtccttcgacgtctccccctgcgcttccatccgcgactggttgatcgcttccagccgctctagcttctgcagcttcgcccgcagctcgcgctcggcctggtcctccggcggcacgtcccagatgtctcccggcctgcaaaccacgtacacatcctctataatgatcttcacaggctcgtttttcaggtttgaccacggaacagacaacgtcaggtctcccagaaacccaaattccacgtcaatcggcaaattcagcgcgtctaacgactccttgcgcaacttcaagttcctcagcttgacgtccccgctccatattcccacatttagttgctttgggtcgaagttttcgacgtaagagcccagaaaccgattcaataaacccgctgccaacgactctagcattccttattcatgcgcgttcagctctagctatgtaatacttctatgtctttgacctgtcttcaaccaccgactgatataccctgttttgaagtcggcactgcacccttgtaactgtatcccttaaccgttgttctatctggtaaaccgaatttgccatcccttaccatttatcaaatatcatagtagacgaaagtgataggctatgaattatcgagatctctgtaatcatgagctcagggtggcgcgtacgtagggacttctagcgagagagctcgaggtagtgcaagctatcatacgattgagcggtcaattatggtttactatgcgcaactaagtgagcagcaggagcttgatctggtggacaaggtggagctccggttcgcgttggccgaggaggactcttttgagcggaatttggacacattcctggcgccgctcgtgctcaagctggggtcgccgcacggggcagtgcggcaggcggtgctgaagacgctagggtatgtcacggggcggctggggacgttcaagactatgaagctgccggtggagaagctgctgacgcaggcggaacagccgaagctgaacccggacgccgactcgacatcggtgcggctgtacagcctgatgtttgtttcgaagggcgtggagcgcctggataccgaggagcggtggcagctggttccgcgggtgttgcggggctatggcacgacgccggctgcggcgcggccccgggtatttgtcctgttgtggaagttgctctcggactggcaggcgcctgaaccagggacacgggcggcagatgaagcccgggccgcggtacaggtggacgcctccgtgcgcgagttgtggatggagcgcttcacgcagctcttcttactgctgccggtgcgcccgacgaatggcaagataccacgcggctacagttgccctggactcgcagccgaggacgtcgcgttcttcacctacaatgcaggtgtatccttcgatgctgaccagttgcaccgtgtgcgggaagcaatatatcggtttgttgtggacctttttgctccagaggatgacaggatgttggcgcaatttttggtggttgcctccgttgatgctacggccctctcggagcgtgcagcaaccaatttacgtcgcataagggtgccatacgaggaccggtcatttgtggcctacctggtgggtcttttcatgggcagcaaaacaggcggagctccacctgcgaaccacaagctgcaggaagcgattttatccgtgcttaacaacagcatattagcaactacactggcaacagaagtgcccgttctgtgctccattggtttgaactcggactttcacaaattacggtcgctgacactaacttttattcaacatatcgcgaaatacaaccatagttcactaattcaggcggatgcacattcatcgggggcatattcaactaacatagcggcgctgattcgcaacaatctgcataatgaaggctggcctaaactccttttgaacaggtcaaccccaaacttcaacctaagcatccaacagcgaaggtcgcagtatgagacgttgggcgagatcttgaagaaggatttttcccttgtaaaagacctctcttatatcgaatttctcatagactctttgaaaggtgatcttccagatttcaggcctagtatccagagtgctttaagttccatggcagttcacctgccccagcttccgtctgcgtcgaaagagaaactaaaaaagattttacttcaagttatgatggagcatccggatcaatgcgattcaccatctgatcaggaagcgagtatggcgtgtaaatatatcgcgatcaagtattgcaatgcggcattcacattcaatgacgcagacgctaggttgataaacattttgggcacagcaagatgtaatcgctttgacgttatagaggaagcacacaaaggtcttcacccatattggtttcgagtatcgcagagctacgctaaaggactgggggagaggcgcaccaacgcgccagctagtgatttaaaggaaatcgtatttcttcccttcgaacaattgctcgacactgttttaaaagctatcaaaggtgataacctgcaggctattgaagaatgtttgaatacagctgtgcggttttcaattcagaccatagtctccaatgcaacacaaggagctaatacagtaatcgttcaagacgcagactggtctttaagaatagaaaaggcaatcgatatggataaaatagtgcttaaacgggtcggggaagcgattaaaggagttacctcctccaattataccaatttcttagtcttattatccaacgagttaattaagagaaattctaatggtcagaaagtgtcgctgtataaatatgatgattccatttttggtaaggctctactctttttcctgaggaactcgtctccagacgttatccgacagctgaacccaatagccggttccctcttttcactgcttgataaccatcgtgttactaatgaaaatgatttggaacttaccgcaaatctgtatgcgatacttggtgcatatgactattctaacctgtttcaagaaaagatcgcagaccttactgcttctgcctcaaagcaagatatgcaacttttgttggcctgtagctacttgctacctagactggtattagttgacccgcaatcagccagtgttcttgtcatggcaactagtcggcttttaggtttacttctagagcagttacaactgccctcataccgaaaactgacctaccgttgtctttctcaggttttaaagtttggtcttttgaatatattgccagaagaagagcgtagaacgcatctagatagagtcatttcgaacttgaagttaaagctaacgaatgatgaagatgcaaccgctttatggggatacctatctctttatatcagcagtgagcaagactttcataccatgtttcgcgctatcgaggatacacatgtgtcaaaacataccgaatttctcttcacagcaggcgaggctctcacggtaatcgtcggcggatgggcaaacggatggattcagcaacaattagatgtagatatctccgtcagagagctggaaacggcattccctcccaggtatctatccatcgggcttactcgacttcaggaactttgtaattcctcgaagccagctcatcgtcgggctggctgtatgtggcttttgtctgttgtacagtatttgggtagttcagaggaagttttaagccaatgcagagagattcatatgacctttatgaaacttctaggtgatcgtgatgaactggtacaagactctgcgtcgagaggccttagtatcatatacgagttgggtggatctgacttgcaagaaactatggtaaaaagcctaataagaagctttactgactcggctgcaactatgaacatgacgtctggaactatgacagaggacacagctctatttgaaccaggtttgttggataccggcgatggtacaatatccacatacaaagatatcttaaacttggcaaatgaagttggagatccagctttagtttataagtttatggatctcgccaagagttctactttatggtcttcacgaaagggtatagcatttggcttgggcgctattatctccaaaaatacgttaaatgatatgttgagcaaaaatagccagctttctcaaaagctcgtgccgaaattgttccgttatcgcttcgaccctaatgagaacgtttcaagaatcatgcagggtatttgggatacattgatactggaaacggcttcaacgattaaagatttttatccagatataatgaatgagttattagctagtatgggtaataaagaatggagagttcgtgaggcaggagtcaatgcaattgtagatcttattcaatctagttcatttgaacaatatggatcacaaatacaggagctttggactatgacatttagggtcatggatgatataaaagattcagtacgtgaagcaggtttgaaacttgctaaggtcttgtccaaatcgctggtcgctaccataacatcggaagtgaaacagaacttagttgacccagatcatattcttgagattttactaccatttttacttgggcctaaaggcttcaatagcagtgcagaggcggtgcagaaatttgccttgaaaacgattttagagttgattgaaaaagccggaccagtcatgaggaagcacgggcccaagctggtgtacgaattggccttatcgctttccttcatggagcctcaagtgattaactatttgtccctcaatgcagacaaatactccatatcagcggaggagattgacagacagcgagcacaggctctggcctcatcaccaattatgaccgccattgagaaaatcgttgacatgtgtgacgattcttctgttgggccgcttgtcaaaacttcaagtaaggttgtcagaaaatctgttggtttaccgtcaaaggtgggttcagctaggatattgtcattgataactcagaaatactcattaagcatgaattcttattctgaaaaattacttgagctatgctttggctgctttcaagatcggaaccatgcgtcggctacagcatttacgctgccatttgcacatctctttagagtcactagtttggatgtgcgggtgaaatatgcaaccaagctgtcggagctctattttgataccattttagcccaactcaaatccgtgattggtgtggcaatcggcgcactaatcaagcatgcacctacccagttcgaacaatgtgcaagcattttcatgcctttaatttttcttgcaaagcatgatccagacgaatcattatccacattatatgctaacaattggacagaggcttccaagtccagtacaggtactatgaagttatatttggaagaaatttctaatcttgcttcagcaagcatgagatctactagcttttccgttcgactaatgtgtgcaaggagtatttgcgatgttgtcggcagcgtagattcaagcatacctaataaccaggtacagaatttatttgatgtgctgttggagtctagcaaaggcaggtcctgggatggaaaaaatgttgtcattgaagctctggtgactctaactgagaaggccgaatctttctatgttggggataatttcctaaacaatttggtcaagaagacattagtgacagaaatatcaagaaataatgtctcttacatcagaaaaattattgggccatattctctttacctatcacactattacaatagtgagctggcacacaagctgcaagaggccgcttctactgttttagattctttggaagacccggataaccatgacttgtcggagactgaatccaactctggttcaacttggcaaaacagacaggaagtgaatatcaagtcatctaaggcaaatatagaaagggaagaaaaacgcgctacggttctacgtcagcttgcccgtgctgtaacaaccgatactcaggacaccgacaacactttagcgccgtttgtattggacacttgcttacggactttgaacccgacaaactatattgtacccacatggcgtacatctatagcaacatgcgaggttgcctgtaccatgttggaaaatttccatgggacgctttcagatactctgataaaccatttcatattattctggaagacagtatatgcttccagcagtacgccagaaaccatagagagcgttaagatccaattgatacggttcggcgctaaactccgcgaccaagatccgagcttcgcgaatcagatagagtgtgaacttcgtgaacttgttcttaaggacaaatcgcctgttctcttagccgcattacaagctacaggtatccaaccataggcatttcctgcggccgtatgagatatattatcaaaccctttttattataaatgtagctacatattactaaaaaaatcaaaaaaaaataatttcaggagctacaccttaccagctggacgaccctaatgcagagacaatatgtgcccatagaattaatcagcgcatccagtaaataagtagagtgctacctatatatagtcatgagaaatagccgcattttaactgctcaagaaattgggacacaaacttatgagggttataatgcaccacctctcaaacgcaacactaaatgcaacgtggactccttctggatattatagtcggacaacgtgcggccatcctctagttgcttacccgcaaagatcaagcgctgctggtcgggaggaatgccctccttgtcctggatcttggatttgacattgtcaatggtgtcagaggactcgacctcaagcgtaatagttttccctgtcaaagtcttcacaaaaatctgcatacctcccctcaagcgcaacaccaagtgcaacgtagactccttctggatattatagtcggacaacgtgcggccatcctctagttgcttacccgcaaagatcaagcgctgctggtctgggggaatgccctccttgtcctggatcttcgatttgacgttgtcaatggtgtcagaggactcgacctcaagcgtaatagttttccctgtcaaagtcttcacaaaaatctgcatacctcccctcaagcgcaacaccaagtgcaacgtagactccttctggatattatagtcggacaacgtgcggccatcctctagttgcttacctgcaaaaatcaagcgctgctggtctgggggaatgccctccttgtcctggatcttggacttgacgttgtcgatggtgtcagaggactcgacttcgagtgtgattgtctttcccgtcaaggtcttgacgaaaatctgcataccacctctcaaacgcaacaccaagtgtaaagtagactccttctggatattatagtcggacaacgtgcggccatcctctagttgcttacctgcaaaaatcaaacgctgctggtctgggggaatgccctccttgtcctggatcttcgatttgacattgtcgatggtgtcagaggactcgacttcgagtgtgattgtctttcccgtcaaggtcttgacgaaaatctgcataccacctctcaaacgcaacaccaagtgtaaagtagactccttctggatattatagtcggacaacgtgcggccatcctctagttgcttacctgcaaaaatcaagcgctgctggtctgggggaatgccctccttgtcctggatcttcgacttgacattgtcgatggtgtccgaagattcaacttctaaagtaatggtcttaccagttagcgtcttaacgaaaatttgcatcgtatctgttattaagtgtcaactaaacgttcgatgattgctgtgtcagagttcacctctcctaatagctctgccggctggtagtacccggagagaaacctcaaggtggcgactaaattcacctgctttatagtcagccacaagacagcccctgatgccaaaaagaaatggttgctccgttcagagtgatattaatagcacgtgaccgtcgcacctcgaatgagtcgacacgctgacgagaaccacactgccgtacggcgcatcttggagtatgatactctggtaataggatgggtggaaatcaaatgtatgaatctttggttggaagcgtcgctcctgaatacggtggagcctgggttggagttcccatctgggaaacgtcctcctccaccaggcagccgagactcggactgcggtagttatgctctatgctgtgacgtaccatacaggggaactcagcagctggtgactgaggtctcataggggccggaagcccaggtaggctctgggagcgctgatcggacttgtagccgggtgtagatatgctggaacggaagcgcacgacgctgcgacggtggtcttcgagcaacgccgggttctgcatcaactccaacagcgacagggaaaaagagcgtatctgggaggccatatgtgagtcgcgttcgtttccagtggtgaaatccttgagcctccgcagcaggacggcacacccttgcagccattgaacgaagtcttcggagccgtttgcaatcaggtagttcgttagggtcaacgctttaaggatgtgtacggcatttttgtgtgacgacttgttcgcgttcccggagagccgcttctttagaacccgtgtaacgtctagtaaggtcttgcaactatatgtgaggatcgtaatctcgctaatgagagcgctggaagcacccacgaattcgttgtcatcggtggccttccttactttcgcagcggtaggcgaagagcccaggtatttgacggaatctgggagtagcataatcgactgggcctggatccggaattgagatttaatgttttggaaagctatagttttaacgcagaaatagacggcatgcgatcaacgtcgtgttaataatgaacatcgttaaattttgcttctatcaccgggcgttggacgatgaaaaaatgtaatttgtttacagtagatggggtacatcaactcggtgaaacggccataaaaaaagcagcccatgcaattgcgtttcacccaatatttcatccccgcctggggccaccatagctattgcctgaggggtttatcagcgtttcccccgcttctgtctattctatgcggagccaggcgggtatgtacctgtctgtttgatcgtcagtaagtgcatggaagccctgcagaaaaacacccgctttgtctgcaaggtatactaggtcaagtggtgccagacggtcagagctatgacaaatgccgcgagaccaaccgttctgtgacttcacgtaagagtaagattctagggagccatctgcggaaagcaagaaaagcgttttcccagtttgatctgtatcgaacgcaacagccggggagttgagcattagcgggttcatagcaagggtgcctggttgctttcgaaggtcgtagaccaagaaggcaagctctgtcaacacgtagagccaataaccgtttggactgaaccgaaaggtgactaattcgccagtactttcctcagtagaggaagaaggcatgataacaattggcggatcttttggcgcggtgacactaaagatagcaattgtactaaaagtgggttgataggcgatcaaaaggccgtccttgtgtaattgcagttgagcgggctcaccagcatctggaaagtggactttaccgttaacgaaacggtatatttgtgacccatcgcggttcctgtagtggatctcgtggttctcgtttaacgtaactaagaattctgctgccacgaacggcgagtactggatatccacgatacggctcgaagttggactgccaaagattttgaactccttcgtggatgtttcataaatacccatttggctgtcagttgagaagactacgccacttctgtcaactgggaagacgatcttgagctcagctggcagatcgtcaagtagcaaaacgccctctctgttcagcagacgagccttgcctctggctaaaatgcatgtaactctgtcttccggatccaacaaacggttaacaaaaacccggtcgacctcgcacgccgtttcgaccggctgttccagagcaaatgccgtcactacctggcttttcattttccttctttctttcgtttgctgcacatattcttgtgcgtcttctgccatcgcggtaatcaattccgctggaaggggcggggcatcggcagcctgcccgccgactgcctccgtcagctccgtcaacgtgtgtctgagttcatcactctcctgtttcgcgcgtgccgcgacgcggatagccgcgtcgcacttgtacagcgctgacgatagctcctttttgcacatatccagctgactccgcagctcaaatgtctccagcatcacggcatcccattcgttttgtagtgttgacagaaggttggggatgctgtaattggcgttgagcgtagccgagttaactgcgtttgcgagcgcgtactgctggggtgtctgggcaatgacaattagcgcatccttagtcaagcttgtcttggagattgggtctaccccatgctcatcgatatactgctcaattaacctcttttcaaaaacgcatttggattctggtgatacaacaggcgtaatgggtggtttaccgcttactgcaaaacaacactagttagtataatgctgatgggcatatggtaattttagtactatcgcgacgtactagcacaaaacatctgatccttggttcttgttgggacgcggttggtagatgcatctgcgcctgtgaattcttcgctttcactgttcgagatttcgaacacgctcttttcatcaagtcacgtgcagcctttttgggccgcatgagctggcacagctcagagatacccatggcgtgggggctatacatatgtgtacttgtatatacatctggtaagggctagtcccagagccggtcgcagggctccatgaagagtcttctctactctggctctcagtgtcgacgcgaaagtcggtctcagatcgaaatcgtgccccacagcgcgggtgacaaaagtggaagccagtctgaattacagtttggcaacgaggctccccacctctaggctagggttcgagctgtcgccgaagaagtcacgatagatgcagcgttgctctgaggaagacacatgagtgcctatgtggccattgagcctgttcacgatggtgcgcccaccgtcacgcactaccaccgcgccagcgtcctctagggcggccagcaggtcctgctgcaggtcctccacgtcctccacgccgcatgacagtcgtatcaggtcctcggggaactgccgggccttccgcagctccgggtctatggacgcatgcgacatgcggcagggcattgagatcagagagttgacacagccgaaggacacggtgacgccccagaactggagcttcttcgagcacactatgcgttcggatagcgcagtgtcccccgtctggatcgacaagacagcgcccggcccgcggttgaagctgcggtgcagtttgtgctgcgggtgcgagcgcagcccgacaaatcgcgtctgcagcgcgtggttgccgcccaccgcgcggaagccgcacacctcgcgcagccagtgggcaagcaccattgcgttgtgctgctgcttgtacaggcgcaggctcagcgtcttgagcccgcggatcagcagccacgcgtccatcggtgccaggcccgcgccgaccgagttcaccacgaagtacgcctcctccgccagcgcccgtgtggccgccacaatcacgcccgccatgatgtcgtggtgcccgttcaggtatttggtcgcagactcgtacacgtagtccgcgcccagccgcagcgggttgcagttcagcccgctcatcatcgtgttgtccacaaccacgcggcacccgggcgcgtgcgccttcacgtgcgccaccagtgccggcacgtccgccaccttcatcagcgggttcgtcggcgactccagcagcacgcacgccacctctcccgccgccgccaccgccgcgcagaacgccgccgtgtccgccgtgtccacgtgcaccactcgcgcctgccccgtctccgccagcagccccagcagccgctgcgtccccccgtacaggtcgtccccggcaatcaccgttccccgcccgccccgccgcagcaccgctcgcagcaccacgtccagcgccgtcatcccgctcgccaccgccatcacctgctccggccccaccccgtaaagccgccccacctggccctccgccaccgtccgcgtcggattcccggaccgcgtgtagtcgtacgcctgcccgtccagcgtccgctgcttgaacgtcgtgctctggtacagcgccggcacgctcgctccgtgctggtccccgtgctcgcccacgcacactagcctgctctcctgagaaccgccccgcattgctgtccacgcccccgcccccgctgccgcctgcgccgccgttatataccacgactcatcgcgacccgccggagtccttgcgctgagtaccacccacgtgaccgcgccacacccggccttatccgtgaacccgcgcgatgtcacgtgcctcgcacgcgctcgctgggtgcggtgtcgggcaccattgccacaaatatcacgtgatcaacaatttccgcggctgtccgccggacgccggcctacggttctgtgccccttgccgccgtcgcacgcgctgtgacgataggccacagcagtaaacgccggccgggacgtggccgatacgcgcgctcgcgcgcgaattgtcttggcgcgatgtgggtgcggtgtcccgggcagattgccggcgcgaagatcacggctgcgcggccataaaggcgcgcgtggctgcattgaaggcggtgcggccaagggggtacggaccggcgggaagcagcgcgggccaatcggatagggcgcgtcagggtaggacgacaagagatatatcttataggtgcgggggtctgcggtgcgagaggttaggcgtctggcagaaggcaagccatcggagccagtggggcaggccatggaggcagcagactgagcacggcatggcagacaaggggctgaaggtaatcacgatcaaagaccagagcgcggtggtgctggaggatgggacggtgtacaaggtgcaacacaaaaggcagcggcgagtgctgaactgcatgccgtgccacaagcggaaggtgaagtgcaaccgggcgcgcccggtgtgcgaccactgcgagaagaaccggtacgcgtgcgcgtacttcgtgaacgatcgggtgtcgcgcggggggcagaacaaggtgccgcgggagagcaagctgcggttgatgcgagtgatcgagcaggcgcggcgggcggtggagcagggcgcggcggacgaggcgggcggcggcgcggcggcgggcgcgggcggcgcggcagaggtcgtgggcggcgcggcagagggtgcggcgctggagcaggcgctggagcaggcgctggagcaggcgctggagcaggcgctggagcaggcgctggagcgggagcggcacgcggagctgctggagtactaccgggtggcggtggcgccggtgctgccgctggtggacatggaggggtacacgcgggacgcggaggcgttctgggcgacgtgggacggcgagctggacagcgagcggctggacttcctgctgctgcacatgccgctgatgtacgtgtcgctgaaggcgcagtaccacgagacgaatggcgcgcagctggtcgaggaggtgtgcatgtaccacggcctgatacgacagctgtatgcgctgtacgactttccgaacaagttcacgatgcggtcgctgaccggcaacgtgctgctgaactccgcggtcgagaaccccaacatttcgtcggtggcccaactggctcggctggcgcagcggctgcagctgaccgcggacccggagtacgtccctggcagtcgcgaaatggcagacgtccagttccgccgcatcatcttctggcagattttccagctggacacgttgacgtcacttcagaacagacttcctccgctgctcagatacaacgagtgcgagacctcgctgccctcagagtttgacgagggcggcaagctgaacccgaatctctgttttctgaacgccaagtaccagtttgtgatcctggtgaacgacgtctgccggatggacgccgctctcagccggagtgtgctaagtgataaagatcttctagaatttagggagcgggtcgcccagttacatgcgctttgcgcgaacaaggcatcgctgctaacggattactcgcgccgctgcgcgatccaggcacctgtagctagctttacatgctgggctatattcatgctgaacaccttcgccgatagggctgtgctgcttcaccaggatatgctcctccggaccatggccaaatggaaaaaacagaaggatctcgagtctcagctggaacaggtgccgtcaagcaagttcagtgacgagttccgaattttccattctattatcacagatggaggcacgagtattgccgcgtacatgaagaatatctccacaagcaacgcctgcaacaccatgagtatgttgttcccggcgacacttcactgtctgcaagaatttgtcaactactacaaggggaagcacatttcctcattcaactggctgctcttgattggcactctgcctatggctgccgttacttttgcactgaggactcttatggtagacttaatacatgcgcgcgattccagtggcaccatttctttgaagacggatctacgatttaagcttctttaccaagttgtcacaatgatcgagtccagacttcagaccagtgccgcagtttacaagtcttccttgaccctggcgagattgttcctcagactagtgctgctaaagttcggtactccggatgacatggaacggattcagctcaatccaagcgttactaataatattagttcgcagcttcccagcccgctaccgttctcacaacaaactgcctggcctgcaaatgtattgaagctgacacaaaaccattctatgccgcataccacagctcttactgttgaacaaccactatatggcttctcacataatccacgtgctacacaaggccagcaggagcatttcagatcgctacagcggcatggaacatcggaactttctgtctgtaataccgacccacagcgcgcactacaaggtatgccctgtacaccgctacccaccgtgcaacacacgcctccaattagcggatactctctagacaacaattccgaccaaagaagtatttggcatgacttccccaccccgctaagcgctgacgatgccctttctcaggctgagtctatggatcatgctacagagctctcgcacatccgatctgaagtagagcgctacgtcaggctaatcagtgcctcagggaaagctagagatggggagagtgtctcactcgatggtacatattttcaggaattcgaatgcaccctcctagaggtcatccagactacgctttcaatgtagtgggcaggcggtttagtacgtacataccatataacgaccaaatcgcatgcggaatactgcctctttgattgttaagagccaagcctgagagcccgcagtgatgattcggaggggtgcgtgagtttgctcaaggattacttgtttctatgtggaaaaacggtctcagcctctctccgttgctctgctcaattctttggtttgccaaagttgcttagcaaaaagacgaagcagctctagcctagagaaattgggagggaggcactgtgctttgcaagctttttgcagaagctactactgcatcttgtttatttagatggcgatagcaatattgcagcgcccttttgcggaagctggattatctctgaacttgactgtgccaagcaccaatagcagcggtggtctcgagcaaaatcccagttcatcgcacgaagaacttttccctcgaggggggcggtggcagacgatagctcgagcgcataatggagctgatataagcgcacaggaataagggtttccgtaactttatatatacggaatatgaatttttcacttacttgttaagatattttatgacaattggcacaggtaagaagccacctgacagtgcagttgtggctaattgaacactattcgacagtgcgttcactgggagcggctcggagcaacgcgttcagacatcctacatagcggtgggaaaggtgctaacgtgctcaaaaacacacttgcgggtaaggttacagtgcatcctagggatagcatgacaatataccagcaaaagagtggagtcaatctatcgtacgaaaccttgttatcagttgggaatagtactgcgaatggttccagcagtcaattgcatcaagaccttcgacttaacttccaacttcatcaaaaagacattgaacaagaagcaatgacgaacgacctaacgggcagcactctgaacatacccgaaaaccatagcattacttcctgcgtagtgggtgctgagacaccgcgcgattctgacgagctaccacttaccatggatcttctcgatgaatttctgaatctcggggcgcagcagcatacagcgccgcagcagggcaagctaccagcaacacagccacgaagctacaagcaagaacctctagcgaaccctttagcgccgggcacctcatccgggcaatttaacgcccattttcacaggcagttccaagagcagttccagcagcatgcagcgctaccgcctaaccagcgcacctgccattactcatatcagcaaccacagacgtcacagagtagattgcgcaattactcatttgctcccccgggccggcgtctgtctatcacaggataccagagcgataaacctatatattacgagtacgaattctttggaaagcaaagtgcagaagaggaagatgaagctacggcaaatgaagatgatactttgaccacagatgaggaagatctgtacaacctgtctcatctgatggcatcgcccggaggcaaggcacggaaggactctatattcagtgattatggaaatgagatggtcatgccattgccacaggcacagcagataaatatgcaggtcgaagactacacaccaatggtgggaatggaatctatgccacaatggcgcaagatgaaggacattttcaaatggaatctttttggaggcggtaaagtagactcgcaaccgtctccagcagaatacatagagatgaacgaggaggagcatcatcaaccctttaggaaaaggtacttctggtcacgcaggccaaatacgcctgccattcaagctgaatcgcaggaggaggcttcggttaaccctagtgaactggtccgttcaagttcatttgacctccctttaacactggaatgcatcaccccttcatcgacggatgtgacaagctcattcacgactaacacaagtgttacgggaaatgagctgacagagccattctcccatccattgaagatggaacaagccggcatatacttcaaggaacctcttttgaaaatggccgagcagatgtcatcattctcttctgcaccagacccgctggacccgggcatcaccaagaaacgagcaggcatgccgaagactcggggtagaaagccgtcaccagccctagatgctacaaaaccttttggctgtgaatactgtgagcgtaggttcaagcgccaggaacatctaaagaggcatataagatcactacatatgggggaaaaaccatatggatgcgatatctgcggaaagaagtttagcagaagtgataatctgaaccagcacataaagacacattccaacggtgctaccgaaaggaagttgtaaatttaaataatcggacgcaccgcggccttcctgctgtgcacctttagtatgcaatccgttatgcacacatagtgttgcattccgtttctaccttgatcggtgcacatgcgcggagcactggcttgatgctgtgtctatggcagcgacttccgcaagtcctcaaactcttcgaattcttctggcatgtcaagtgcagcagcgagctccgcccgactgaccgcatgccgacgcatcaggaagctcactatcacctcgatgttatccgtgattttgtccagctgctccagcttgctgcgaacgccccggcaatagctgtctatctttgtttcgtcccacttcgtatcctctagcttccgatacgcgctctgcaacgccgccagctgccgcccgagctcgtcgtgctcggtcagcagggccgcccgcgtgtagctgacgccctccgacctgaatgcggccgcccgcgcgtgcttcttctcggaatttatggctgcctgcagctcttgcaaccgcacctgcgactcctcactgcgcgccttcatcgcctgcatctcggtgcacattttgccgaccagctggtttttgaagcaccaatatacattgacgttgccgcacttttccactgatatcagaccgtcttcgtcgatcagctgctgcacgatgtccttgacaagcatagacgacacccctgcgcatttcttaggaatcagcttctccagatcttttatgctgtatatgctgtgctcctcctggaagaacttcagcacccgcgccttcttctcggccagcgttacgacggcacgcttgggcggctagtctgacgttagcaaaactcgtccatctccacttaggaatcttagtgtagtaacataccattgctttagttatgtgatgacttcttgccttctttgaagtccttcttacggtggcaaccgttcagcaagtatatcggagtgtagccgcgctcgttgtttagtacacctaacaacacggctaacaaacacaggcagtcagcacacagaccccgacctacctgctgccagaagccagaatgtataccaggggctagcgtgtgcatggccgagcttggcaagacagtcacttttacgcaggctctctgaaggagcaagcgcgtgacagactgtacccgcgcaagtgccaccaaagatatcagcagggtgcaccgggacagagctgttcagataagcataggacgtgacgagctgatccaagtggcaccatcagcagacctcagcaaggtatcaagtcacgcgcaagccacttcgatcacgtgacaatgcaactgataggggaggccggctgagccgcagccgtttggcttgtgataaaaaaggccactcctggccagcaagaggtaaagccagagaacggtgggcttcgacggacaggctctattgatactaaagcaccatgcgctttaaaagctcacggacagtagagcgagagctcaaagctttagtcagctcacctgaaaacgccaatcgatgcggtgaatgtggggccacctacccaacgtggtgttctgtgaacctgggggccttcttatgcgggcggtgcgcggcggtccaccgcaaggtgctcacgggcgagcagggggggccggagtcgcatgttaagtctctgacgctggaccgctggaccgtggacgagctagaggagattaccaacagcggcgggaaccgccggaatcaccacacctggaatgtgcgcaacgtggccttcccgtatgatggtgacgatgaccgcagccgcgtggaggactttatccgcaacaagtacatcgtgggcaagttcgggcagggcggggggcgcggaagcggataccggccagactcctcgtcccggagggggcacgacgagtttgcagaccgtcgttcgcgctctgcgtctttttcgcgctcctcgaatcgtagctacagctcgctgaatagcgccagtcctcctcggagtgggggaattcccctcctgactcaccgtaccgtgcatgaccacgagatcggtcggtacggcagtcagctggcgactatgaaaagtctggggtattccgacacagacgccattgtggaggctctggtgctatcccggggtgatattaacgtggcgttagatatcctcgataaagatgcgaagcttcggaaggagtcaccggcaccgccgccgcccccccctcgccccacgtcgcccgccgccagcggcaccaggagctctcctccaaagccacagccagccgtcttcgacggcttcaatggtatccagccacagaccacacaagcccagacctttgatggcggcgtccagcagtacctcgaccccgtgaccggccagatctacgtggaccagagccagtatttgcaagccatgcaacagcagcagctccagcaacagcagctccagcaacagcagctccagcagcagcagctccagcaacaacagctccagcagcagcagctccaacagcagcagctccagcagcagctccagttccagcagctccagcagcagcctacagctgtcgacaagaacgcgctcatggctctttacagcaggccggacctatattccagtccggtggaaatccgtcctgataatccccagtatgctgcactacagcagcagcagcagcagcagcagcagcagctccgactccagcagactatgaaccagcagcagcccatgcttttcgcacagcagatgccgcagcagatgccacagttcccccagcaatatccacagcagttcccccagcagtaccagcaatctaaccaaggcacgcaacccccaacggcctcgcagggcgcttatcctggctacaactaccagatgtagttctgtatcagtacgtaattaaaaaccacgtgaaacaaacgtaactagtgacgccacaagcacatctcatcaggggctcagttagagccatgataacaacaaaccaaccgcgttagctttaagttcgccacctagtagtaggactataaaactaggttgagccgtatcggttcacataggttagtcaactggtggattcgtgaggcttctaagcatctcaactggcgaaactcccagcagttgcatatgaatagggcagctgaaggagttattttgcaaatcttagactgaaagacttggctaggcagcaggattggtacgagagtagcggcagagtaggagccgtgtatagcgaagaaggaatgaacaacgttaaatcaggtggacgtccagtggcaatagttgcagagcggtatgtggttgagaaggaaatcggccgcggctcgttcgcagtggtctacaagggacatctagccgacagctcggcagggaatgtggcgatcaaggcggtgtcgcgatcaaaactccgaaacaagaagctgttggagaacctggagatcgaaatcgccattctaaaaaagatcaagcacccgcatatcgtgggtttacttgaatgcgagcgcacgggcacggacttttatctaatgatggaatactgtgcgctgggtgacctcacgttctttattaagaagcgccgtagcctgatggacaagcaccctttggttcggactttatttgaaaaatacccaccacctagcgagcaccacaatggcttaaatcgggtgttagtggtgaactatctacagcagttatcgtctgcgttgaagtttttgcggtccaagaacttggtgcatagagatatcaagccccaaaaccttttgctgtcgaccccacttgtggattacaatgaccccgccgaatttcacgctcgggggtttgtggggatctataatctacctatactaaagattgctgatttcggtttcgctcgttttcttcccaacacatcccttgcagaaacattatgtggctctcctctatacatggcgcccgaaatactaaattaccagaagtataatgcaaaggctgacttatggtccgttggcacggtgctatacgagatgtgctgcggaaagcctccattcaaggcatctaaccacctagagctatttcaaaagattaagaaagctaatgatgttatacagtttcctaaacacgctgcattggagtcagccatggttgatttgatttgtggtttgctgacgtttgaacccgctaaacgcatgggatttacggagtttttttcaaatggactagtcaatgaagatctctccccgtatgaggtagagtccgagcctgacttagaaaccaaatctaagaacgtggccgagagtaacatgtttatttcggaatacctacctactgcagaacgaaataagcgggcatctcctatccgcttaggtgattcctgtactttgcggggtccctgtgaatcaccacaaggggccgatccttacccccaggataacacgcagtctgatcagcacgagcatttacacgcagactattctttccaggtagaaatgggccaagatggacagcaagcggatggagaagagaaaagaaaactttataataaccaggaagagagaagcaatgaagaacgacagtttggtcaggtatctaacggccggaaccaggaagaccagttacttctacatcaaggacggggacagataccgtgcgagcagaatagacaagccttacagtcgcactcccacgtcgcagctaagcaaatacccgataaagactcgaaatcctcagtatcatgtcagaagcatgcagcctcggcaccaactaaaaacgatcaccgtacgacaaggttaaaagagaagacaaaatgttcttattccgacttattactggagaaagaatacgttgtcgtagagaaaaaaagtgtcgaggtaaacgccctagcagacgaatttgcccaagcgggctcgggcgctccagcaattaggctgcccgatcagcatcacaatgacgcctctcaagccctgcaaatggctcggcattcttcaacttcagtttctgccgcaaataccgctaaacagacgttattgcgccgtaattcgaggactttatcgtcaagtggtgcttctacatcacggcgcccgtcattagttgatcgtagattatcaataacatcattaggtgctacaaatgcattatccaaggccttgggtatggcctctttaagacttttcggaaacagtcatcaacagtccagtaatggctcgtcaacgttcaaacagaatcccaatgttacctctttactgagtccgcaaacattccaggatatgacggaaaacgccgttcttagcgctgatcaccagtgggataattctaggcaggcagatgttctccatgatgattcaataatgaaggcgctggagaacttaaccgctaaagtttatgccatttattcttttgctgaggttaaattttcccagattattccgcttcccccaagttccactcaagacccctacactcacaaacggatgagcaatgggagctgtgccatcgatgatgaggaagatgatattgaacacagcccaggagctgaaacttatcgaaagaattcctctggagctaatgccaatactggaaattacaatttctccttagatactatacatgaaatgaacctgaatgacctaccaccaaacgatctatacattttgtgcaccgaagcaattgtactctatatgaagagtctctctctattggcctacgctatgcatttaacttcgaaatggtggcatgaatcagccgataagatctgtcctctcaagttaaatcttttagtgcaatggattagggagagatttaatgagtgcttggagaaagctgaatttttgcgtatgaagacccaatcgattcagttacacaatggtaatcagctttcagctagtaccatggtttcagagccagtatttgtggaaaagttgatctatgatcgggctttagacatatctaagacggctgcaaagatggaaatgcagggtgagtatttagaaggatgcgaagttgcatattctacatccctgtggatgcttgaagcattactcgacgatgttagtgatgaagataactacaatgatgataatttaggtcacactggcgttttggacaagtcggataaagaagtgattaagagatacattgacagcatagctaaccggttaaaagcgttaaggcgaaaacttagtcgctagtaaagacttggatattgcttttcagcttccgcggtagcgtatatttttgggtatttttgtttttgttttttttggttcactactgctgaagttcgtcgtgtaccttattaggcatgggcacgtaatgatgtatctacggatatcacaaatcggtcgcagaatggttatatgctagcttgttccatatgaaatagttttaaatttattcttttttgatctgctttgtatcaggcttggtttctagaatgcaatatggatggtgttcacgacggtaaagagacccaaattgatcataaaattagacatgagttggcccacttattcagttagcagaatatttaaatggactactgctagatcaactgatatagcttgatattgctaagggttaggtaaaggagaaaatatcaattctatatagccggactttgagttcattaagaacagctctatatccttatcatttaataatcaattattgtttatgggatttcattacatatctagtataaaggacgttcatacagatacccttgcaagtttagttatatgggcttcctagtgtgtcattgttccgcttatccaactgtccaagcgatatagaacacgacctagacttgctgtgagcttctttatgccgaaattcaggtgcaagactttgccttcgaaaagacatcgttaacccagaagaatcatcagttttccgtatacgtgctagttttttggcagcgttgattaacctactttcgtcttgggctgcggaggtagaagtcggtgagtgtacagacgttccaccatgcaatgatgagcgtcgcgaagtatccgacgagcttaatacactctgtaaaagatccctagatgacaaatgatgagaatggtcttgcgaactcgtaatcagtacttgatcgacatgtgcctcttgcgttgtggcctgcgcagctgtgtgcggtagcaaccagctattagttagaactccgcctgtttgagtaacaggatccatatttcctcggtcttgtttatgtaattcaggtatcatatgcaaaacctccgcgggaacatcaatactgtcttcaacatcttggctaacgggcaaaacatagcttggatcagtgttcaggcgtacagagtttacaccatcgccggatggcgtattcacagtcctggcagagtttatctgtgtcaaagttgacaagctgtcagaagcttttagctgtccagatatagatgcaggagctatatcggttgcttcttctgagatcgctggctgagaaacacctagggccctgctagaggaattgtctgcggaagaggaaaaacggcggctacgtccaacatgcctgggggggaataccagttcatcatcatctgcatcgcttgcagtactagcagaggaggcgcttaatgtctcgggttggcaaaaagaatcgataccgccgacagcagggacatttcgcaaagatatctcgctcccgtgttccgaatcaataccaaattcaaatggaagagattctgtatctgattttgtgccatcgtagctatactcaccagcagattcagtgctcatatatgcagccgagtccgttgttattgaatccttttcttcatcgctcccatgtaactcttgaaaaataatcttcttggttaatggaggatttccctgtttcaaaggagtagactttgtcacttgcgaggctaaacttcgagaactgtcatatcttttggcaagaattgtctgtgatgttccatttgtaccaatggacaaccgaggggtagcaagttcggatttttgtgatctattgtcaagcctaattgcgctttcagacgatgctattgcagctgttggagtcattcggaagcgactagcaaacgccgcaggtgagagctctgcactagaactggatctggtagttgtagattgtggagaaagaatactgctgactcgaggaatacgaccattccttttggaatcaagctgcaatgtatttatgctcaacggtggtggcgatgctaatatcttatcctgagcttttggtgtccccgacacgttcatgttgctgaaaggacttagaagagcacttgcgcccttgtggggtaaattagaagaagtgaattgctgatatgaagatgaaatccgctgatcgtttgtggggaaagagggagtaaattcagcttcgacgtttgtatcattcacagcgtagttatcaatgtaaaaactgtccaaagaagcaaaggaagagttgaccggcaacgaaacaattgaattgggatctctgtcattatcgaatttttgtaattcacgttgaaataattccctggcacttaattccgcctgaatgggtggctggtgcaatggcgatggggtagagggttgacccggtaggaaatctttactatttgcaatagacccttcgcttaatataaagttaaggctgtcgatatctgtgggtgaaaaggtctctcttctgatggaatcaaatacggttgggctgtgtctgtctttgagatctttggtcttgggctttttaaggagagcgcatgcgtctattaccgaagtagggttcagaagaggcttatttttaaccactccggaatcaaaaagggtatcaatttgtgacttctttagtcctttacctatgccgttaacagcattgtccacctcatcgtgagagacagagatttgtttgtattcttcatcctggtgtcttagaaacttttgcttttccgcctgcctcatactgattctctgtccacttagcccatctacatgatcaaaatcccaacatacaaacggatgtgccttaatgtcaacaatatttattcgctgcattggattcttttctaagagtttgtttaacaaatcctgtgccgatagatattcttctttgcacgagatcatcgacacgccgttggattgcatgaattctagccttggaaactctagtggatcgttaactatcttttcgaataactccatctcatattccgcaatgaatggcaactttccaaataacaaacagtataacgtaacacctaacgcccatatatctatcatatatgaaattaaggacccagaacatgggttgctttgtctatcaatgtttaatttttcatatgcatcactgcctaaacatatctccggagcaaagaaagctggagtacccgcggttttcgccaattccaagtcatcgggaccttcagcccccaagacacctttaactgaagaggaggaagaggagcgtgacgagggtgtacctgagttcgatgaagctaaggacacaccaaagtcagaaattttcacgatgtcatgctctgaaagaagcaagttggctggcttaatatcacgatgaatgatcccctgataatgcaaatattccaaaccaagtacaacaccacgtagaatctcccgcgttcgctgaaacgtaagcaaaggtggcccgcgcgcagcagcttccaactggtcgccgggacaccactttacttcacctttggaacagtactctagcaccaagtatattttccgtgacttcatgtcgtcgagaacctcgatcaacttcacaacatgctcgtggtcacacttcttcattatcgctatttcccttcttatcttttcactctcctcacgtacaggcgtcttcttgagcttccatgaactcttcttcttgccgtgtctgtccacgatcttgattgcgacatgttgtttcgtcacgaggtcaagcgctagttttactttcccgtgttggccgctcccaagctcccggattatctcgtaggtattaagcaccttccgtttcgaaattgggtcgtactcaagcgatattttgtgtgtctcttttaccttccgccccccaggctgtacatgagcagccttgatgtggttctggtgcagtggatgattcaactgccgttcgcgctggcgctccaacagcaaattgagcgaatcgctcgatgagagctcgtctgcctcgtacccctccactttgcccggcatgcatgttggttcgccatgttcgccccggctgatctctaggttcggaccgccggccgcagcaacgccttcagattctgtaggctcttggttattgttcattcttccctcggcacattaaagtcatggatatcacacacctatagctacagcagagatggagaacagtccagctcgcggggtaatcaaaggttcttgcccaattcgacaaaaaccaccaaatgaacccagaagacgctaaaatgcagggcaaaaacgctcttgcagctgtattcacgtatgaactttaaaatcccgccaacagctcggacgcaggacagaatgtacctcccttcaggcctttaccagtgctatacttagtcatcgtagtacagaactactgcgtgatgatgtaaaaaaacaaaatacaacttacgtttatagtgatatgtaacatagctatgtacgtgtatcacgtgatcgcagttcatctaccgcttcggcttaggcagctctgggaaatggtatgtttgcagtagttgctgcggatcagtgttgctatatgcctgttcctcttcacgagcccgttctgcgcgtgctgccacgcgcgtccggcgctcgagacgagacgtcagcatgaccgcactgagtgtgtatgtagccggcttattgcggagagtcgctaccgtggccagttcccgttcgtattcgcggcgcagatccgccgcagagacctccgcaggcttctcctctttgtcctctgtcttgtcctggccctgcgcggacacattaccgtccttggcggggaccgcaggcttcttcttggaggcggcgaagcggccgagccagctgtcccatccggcggcggcagccttttcggaggcggcaaggcggctggcaaggtctgcgacgcggcggcatgcggcgtggtacgcgggcgtatagtttggctgcgcaaactgcgggttgtcctgcagatgcaggtcacagcaaaaaaaccaatcgccgctcgcggcacagtggaggaccgtgaccgtgcgactgtcgcatatcaggcatccgccggcgtctctcgcggcgaccttgcgtttggcgtatttgtccatggcgaggggctggcgcgttgcacagagcacggagtccgggcggaacagaataactggaatcgaaaatgtcgctacatatatacacgtctatctaaagcttcttcttggctctgtcccaagagctgcggggtttcttgtgtgcctttctggcagtgctgtcctcgaggcggcgcttcgagctgaagatgctgaagtcctcaccgccgatcatgctgactttggcaaagcgctcgcgctgcttggccttgcgcttctcggccttgttgccgaccgagttcaggcgcgtgaagttctcctcctcgaagcgcgtcatctcgctgtcacggtcgtggtctctggcagacttgatcccgcccttcccgtggtccacaatgttcgcgcccacagaggcctcccactcgggcctgtcggcctgctcgcggatgaactcgtccattgcctgcatccgcgagcgcgacgagcggtccttgtggtcctgtgcgttgaagcggtcctcgaagtgctgtccccgctgtggcggaagagctgcggcgatcttgggcggcttatacgtcccgccacgctcgtcgccgcggcccccgcctggcgcggccgcggccgccagcgcacccgcattgggcctgtagctcagtgcctcctcgtcctcctcatccgacgagtccgcgtccgcgttcgcgtccgcctcgctgcgcgcccgtgcgcgctcggccgctgccgcgtgctccttctgcagccgcacgtacgcgcgcgtcagcttgtccagttgatagcccagcttcttctccagcggcttgatgccgcgctccaagcacacccgctgctcgatcgcgccggcacgcccgcgctcgcctgtgctgccctccggcgatagcttctcgcccactaggagcagcaggctgctcacgtatgccagcatactaccgttcttcagcgacagcagcgacaccttatcgctgcccgcttcggtgccactcttcgcagccagggcagtcacggcctcgtctgctgcagggccggcttcgtacgtctgctgcagccggtctagcgcggcgtccgtctgtgaaagtgactcattgatctgcctcagcacttgacgcagttcccccatcgcaatacctcactgcgagccagaatatagcgttgtcgatctaagcgctccaactgctcaagcccatcgcatggaaaattttaatgtcagtcaaaagaaacgctgctagggactgaaaaatttgccggagcgatgaggttagagcggtctactgacacaacggaagcagaagcagacctcagagaagcttccaggacccttctgccacacccaccatgcctcagaacgagtatatcgaacagcacatcaagaagcacgggcgccgtctggatcacgaggagcggaagcgtaagcgggaggccagagaggcgcacaagatatccgagaaggcgcagaagctgactggatggaagggtaagcagttcgcgaagaagcggtatgccgagaaggtcgccatgcgcaagaagatcaaggcgcatgagcagtcgaagctcaagggcgcggcgaagcccctggaggacagcggcgaggcgctgcccgcgtatctgcttgacagagagcaggccaacagcgccaaggcgatctcgtcgagcatcaagcagaagcggctggagaaggcagacaagttctccgtgccgctgcccaaggtgcgcgggatcagcgaggaggagatgttcaaggtggtcaagaccgggaagtccaagaccaagagctggaagcgcatgatcaccaagcacacgttcgtgggcgagggcttcacgcgccgccccgtgaagatggagcgcatcatccgcccgtcggcgctgcgccagaaaaaggccaacgtcacgcaccccgagctcggcgtcacggtcttcctgcccatcctgggcgtcaagaagaacccgcagtcgcccatgtacacgcagcttggcgtgctgacgaagggtacgatcatcgaggtcaacgtctccgagctggggatggtcacgtccggcggcaaggtggtctggggtaagtatgcccagatcaccaacgagcccgaccgggacggctgtgtcaacgccgtgctgctggtgtaggccggcagagagcccgcccagttactcgacctgcatccgtcggagggctcctccaccgtatcgatagaactcagatcagacgcgatggcctcggctaggtccggctacgccgtcatcattactgcaagtaagacagggctgggcctctcgcgcgcccagaagacggccaggacgcatgcgcccctcgtggcgcagctcccgcccgacgtctgtagcgcagagactgccccgcacctgccgcctagcttcgtcgatagcggcatacatagagcggccggacgccatgcgcgcgccggtccgtcatttaattcagatagccactgcgcacgttacactagccacgccccggccgcgcccgccatctcgcgccgtccccggcccctgcgctcgggacggccgcccctgagagacgctcgagggccgcggcccggctgtagtgcgtcgggtcccagttgcctggctacacgccttccggccaccaagactacgtaccgcgaagaactcgcatacatagcgcaccagactgcatcgcagacgaacccagccggccggctgcgttttcggagcatgcagggcaggcgcgcttcctcgacgcggccgccgggacgcagcgtaccggaggcttcgcgactacggaaattgtccaacgcaaagctgctcgtagttttcggaacggtttcactagtgtgaaacgccaccatcgcgcacgcgcaatgacactggggtaagaccaaaaccttcgccctgcgctataattagtaagcgcgcacggtttctggcgagggcagggcctagtgactgcctcctgcggcagacatacagccatgccaatgtcggaaatacacccacaccgtgttgaataatgtaagaggcaacgttgtcaataattttcccgttaggtgagaagtcctgaatctccatcggctcgaagcacgcggcccctgtacccagagcagtgaatgagaaggaatatgtcccggcgctcatcatataatgcggagctgaggcatcggatgtctgtagaggagcccaaacccccgaaacaaaagtacggaaggctgatgcggtggctacataaggtgtgggacggcccggcccatccatcggatgaggtgcccactcggtacagcaggctggggttcatacagtcgattgacggcgtcccacggaggctctggcggggggtgaataagaccggggtaaaagctataattcttgtgttatatggctgtctgtggctggcggtcgggctgggcatactgtatccctctcttgtcgcgctgccttaccacaagggaagcgaggggaagacgccggtggttgcgctgagttgcacgagcaagctgcattggttggggaaaaataacgattgcgacctcaatgcgcggaggtgcaggccctcgcccaatgaggagcacattgtgcgctgccccgcgctgtgcgaccacgacggcctgcttttttctgcaataccggtgggtgacaagctgctcaagtataccatgcacgtagtcggcggcggctcgcgcgcggacgacgcgagagcgatcacgtacccctaccgcggcgactcgacggtgtgctcgagcgccatgcatgcgggtctcatttcgccggcctacggagggtgcgtgcgcgttgcgatgaggggccaacaaaacagctacccgtccagaagaggccgcaccgggtggtcagcgaacttcgactcgttcttccccacctcctttgagtttctaaagctggatggctcccagtacgggtgtcgcgacccgcgggtgccattcaccgtctgcaacatgatcttctcgctgccagtcctgtacttctacaacatgctcgtcgggttttgggtgctgatgctcgctgggtactggacgctagtcctggcgatggatccgccggtgttcatcgaccccaacaaccggtattcgatctattcgctgtggagcatcggctgtgagcggctgctacccctggggttcattctgtatgtgatgtggcgcgtcgcagtgcgcaaactggagggaggaccgccgctaatgagaatactgctcttctatcctctattttggttgggcactctgaacaatatcactttcgacaggttgccagtggaccgcctgacccccaaagaccttcaggaaagggcgggcacagctgcagccgtgtttattttggggattttgatagctgtttgcgttgcggtgcaagcacacgcagtgtggaaggcaggccgcctaaggaaatacgtggtgctttacctgggccttgttgcgggattggtgtttctgggcctgttacctggtctgaatctcaggatacaccattacattttgggacttcttttccttcctggctgcgcaacacgcggcccgtcggcttatctgtttcaaggtgtgctactgggccttgtgatttctggcgttggtaaatggggattcgcgagcattgtcgagactaatttggcattagcacgtggtgaagccggcttcacagataaaccgccaactctaaatttcgatccagcagttccacatgctgtttcgtggacgccgcgtaccgaggcgggcatcaacggcagcaagtacgacgctttttccctcctagtcaatgatattgaggtgtacgttggatcaaacaccacagtggaccttgaggtgctatctgaggaaaataaagagttcggttacatgttgcggaacgcaacgcagggcgcgagagccggcccaccgctgtacatccgggttgccagtcggtcccaatacgatctccatgtccgtagtgactatacgagtgccggtgtgctcgactggtcctcgggaagttggacccctccagataatgctgtggttacttgactagccatatcaccgacatttcttgaacggtatactaagtagcgtgcattttccattcgcggaggaggccccgatgggaagagttgtcttggcgttacatatatacatctgttacccggatatagtccctccgaacccatattcccatatataaactaagacgccccactattccctcaagtgtgtaccacctccagcagctagctgactttgaatgcgctttagaggtaatggaggccaccgctgctcagaaagtgttagagctggttaaagatgaatcttccttggcagacatcgcacgaattaaggaacagctcgtcaaagagaaatcgacggtggagtaccaactgcacaagatatccaaggtgcgctacgaggatgtctacaactgcctagagcttgtaagctcgactacggggtccgtgcaatcgttgcgcgagaagctgcggaacgtggataggctgagccaagagaacaggtcttcgagtgagcggtaccagattatcaacgacgttacgcggatccatgagcttctaggacgcacctcagacatatacaaccggattgtgaagttcaccgacttctgtggccagattgagagctacttggatgccgagatcggccaggatgcactggagtctggctgcccgcggctactgcagattcactatatgctgacctgtgcgcgcgactttcaggagcagatgacggtaatggccaacgtttccactgaagatgtgcagcgaacgatgaagaaggtgtttgcaaaactaccagctcaaatcgagaaatttgataagatgctggcccgcatcatcttcgacctgcttgaagcggtgcgtacggaaaacaagtcattaataatacgagtgtgcaagatcattgactatgaggaccgggaggataagcgaatcagcaagacgcgcgagattattaaaacgaaggagctagaaatggaatccaacaagatcaggaaacttccgaccaaaatgtcgcgcatagcagaggattcaaagagtcaggagaacaagtaccccacagagcaggcactctttgaagaaatcatgaacggtaccatccagacgaggactctacctcgtggctatcgtgagttctttttctccaccatccgaaagtccattgcggagctctttgttgatgttcgcaaagagtacgctgccgaaaagcagttcgacgtgctggaaaacctagattggatcttcaatgagctagtaatcgcgaaggaccatctctgccggctctgcccgagcgagtgggatatttttcgcgtatactacaccgcctactacgaagagctgaacggcttgatcacggagttgatcaactctgagccggagtcgctctacatcctcagcattctcgacttcgacaagaatttcaccaagactctcaaaaaggactttggcttcggcaaagacgagattgttagcatcataggcgaggagcagaaggcccagctacttcaggactacttgcagctcatcgtcaacaaaatgcgcgagtggctcgacaacctcgagaaggcagagctccagatcttcctcgagcgcaccacgccgccccacacagactccgagaacctgctcttcctggagggcaccaaaacatgcttccagatgttcacgcagcaggtggaggtcgccgcaggctcgggccaggcgaagatcctggtcggcgtcgtcgagcgcttctgcaagctcctgttcgagcgccaaagccactggatgcaggccatttcgtccgaggtcaagaagtgcctccagtacaaccacaagtatgagaaagaccccgacaacatcgcgcaggaggaggagtgcgccggcggcctcgtcgagtacctcgtcgcggtcgccaacgaccagatgaaggccgcagactacgccgtcgccatctcgcagaagtacggctccatggtctccaaggtgcacgagcgcaccatcacgaaccgcatcgaggagaccctcgacggcttcgcagaggtcgccaagtgcagcaacagcggcctcgtcgccctgatcttcgacgacctgcgccgcccctacgccgagatcttcagcaaggcctggtactccggcaaccaggcgcagcagatcgcagacaccctctacgagtacctcgccgacatccgcagccagatgaaccccttcgtctactccaccctcgtcgagtccgtcatcgaggagaccatcctgcagttcctcgccgccctgcaccatggccacgccttccgcaacaagcagaacaagttcctcgactgcatgaagcgcgacttcgagatcttctacaagctcttcgtccagtttgtctccgacgaggacaagctgctcatcgacgacaagttcaagctcatggagttcttcatggacttcgcctgcagcccgctcgacgtcgtccccgacacctgggcccagtgtctgcacgtctactgggacacccccgccgccttgctgcaggccgtgctcgcctgccgcaaggacgtcgactctcccaccgccaagcgcctgctcgccgacgcccaggccgcagccgccgaccccaaacgcctcgccaccctcaaaaaccaggacctgcaacccacctttattagccgctttacgtaagttacacactcaacgcgccaaccacaccaccgtcacaagcacctccgagcccgcccgctgcacccgcacactgtgcgcgccgtcacgcttgccgtcccatgccgcccccgcgtgcgactgtagcgtttgtccagccgcccccgcgccacggatctcggtggccgtcacgacaaacttgtgctgagacgacgccgcagcaagccgcgtgaccgcgtcctccacacactcccctagttgcccgttcccctcgaacgcctgttccacaagcgataccagccgctcttccgtaagcggcgcctctgcgccaaacgcgccgcgctgcacactgtattcgccgtccacgtgcgccattggttggtgaagggaaagctgccgcgcgtgccgagcctttatcccttcagtgggcgtcgtacacgacggcggcgtcgcacataaaaaaagggcgggctggcaaccgactttcccgctatcggccgtcgtcacgctacatgtcctcgacaccgttactgcaaaaggcgcctggcaagagaatcgcgcttccagcgcgggtggagccgaaggtgtttttcgccaatgagcggacattcctttcgtggctgagcttcacggtcatgctcggggggctcggagtcgggctgctaaactttggagaccgggtggggcggatcagcgcgggcctattcacgctggtgtccatgggcacgatgctgtacgcgctggtgacctaccactggcgcgcggccgcgatccggcggcgcggggcgggcccttacgacgaccggctggggccgacggtgctgtgttttttcctcctggctgcggtggtcgtgaatttcgtgctgcggctcagccaatgaaaaggcttgtgtacctatgtattctaagaatccgcacgtcattgccgcactcggtgttgaggtgcggcgctcgagcacaacggttttcgccccgcaccctgcggggctgcggggctgcgcggagtatataaggccgggggcgggcgcggcagcgaggcagcagcaaggatgcttgcgactgcacaggtacgtaccctacgcgcgctggtgcgctgctactcgagcctgccgctgacggtgcaggtgcgcctgcccaacggcaacagctacgagcagcccacggggctgttcatcgacggcaagttcgtgccttcgcaccaggcgaagacgttcgaggtgatcgaccccgggacggaggaggagattacgcacgtgtacgaggcgcgggaggaggacgtggacgcggcggtggcggctgcgaagcgcgcgttcttgccgtggtcgcgcgcggaccccgaggtgcgcgcgcagtgcctgttcaagctggcggatctgatcgaaaagcaccaggagacgctggcgaacatcgagtcgctcgacaacggcaagtcgctgctgtgctcgcgtggcgatgtcgcgctcgtggcgcgctacctgcgcacgtgcggcggctgggccgacaagatctacggcaacgtcatggagaccgggcccgaccacttctcgtacacgcggcgcgagccgctcggcgtctgcggccagatcatcccatggaacttcccgctgctcatgtggtcgtggaagatcggcccggccctcgcgactggtaacacggtggtgctcaagcccgccgagtcgacccctctgtccgccctgtacgtctgtaacctcgcgaacgaggcgggcatccccaagggtgtgatgaacattgtgcctggtttcggaaagattgtcggcgagcatctctgcacgcacccagatgtcaaaaaggttgccttcaccggttcgactgccaccggcaggcacatcatgcgcacctgcgcggaaaccgtgaagaaggtcacgctcgagctcggaggaaagtctcctaacattgtcttcgccgatgcggacattgacaaggctgtcaagaacatcggcttcggtattttctacaatgcgggcgaggtgtgctgcgcaggctcccgtgtctacgtgcaggactctgtctacgacgaggtgctcgagaagttcaagcagttctccgagaacctcaaggtcggcaacccgttcgaggagggcgtcttccagggcgcgcagacctcccagatgcaggtcgacaagatcctgtcctacgttgacatcggtgtcaaggagggcgcccgcatcgtcgcgggtggtgagcgtctgggccgcaagggcttcttcatcaagcctaccattttcgctgacgtcaacgagaacatgcgcgtcgttaaggacgagatcttcggccctgtcgtgaccgtttccaaattctcgaccgtcgatgaggtcatcgccatggccaacaactcccagtatgggcttgccgcaggcatccacactaccgacatcaacaaggccatcgacgtgtccaaccagatcaaggcaggcactgtctgggtgaatacctacaacgacttccaccctaacgttcctttcggcggcttcggccaatccggtattggctctgaaatgggtgtgcaggcactagacaattacacgcagaccaaggccgttagaatggccattgatcacgttaaggtttaaatggttagacacccggtagctagacgttacgtaatattacatatacggtaatctatggtaagcaacactgccccactgagatcaacttccaagcgcgagatccggctttcgtgtgactagcacccatacattcaagctcgacaacacccacacattaatttttctgacttggatctcaacaccggcctgggcgggtgacgctctgggcagagcagcccgtcgcgcggcaaccgctgcgcgagcctgtgcagcgagagcaggcagctagtgggacgctactctgggattttttcaactgtataacgaatattcgtacttgacaaaggctcgggccatttacaactgctacaccagaggatataaacaggaatggtatgtttaaagtgggggcggctggtgcggggccagcacgacggggctcgatgcaaagcgatggtacaggcgccgacggcggatgagcgacaggcatgcaggttgagatgaaaatggctatcgaactgcgctgcagccgaagggcggcgaaatcgcagggcgaggaggtagctgcgccgtcgcagctgcggaatagctgcatatacgcgtgggcgccagctgtcgcgggtcgagcgggtcgaggttgcgtttggcaggatactaacttttgtgcagtctgacgctatcactatccgtaccagaaaggttctcaccaacccattgttggctagaaagcagttcgtcgttgacgtcttgcacccaaacagagccaacgtctccaaggacgagttgagagagaagttggccgaggcctacaaggctgacaaggacgctgtttccgtcttcggcttcagaacccagtttggtggtggcaagtccaccggtttcggtttgatctacaactctgttgccgacgccaagaagttcgagccaacctacagattggtcagatacggcatggctgagaaggctgagaaggcttccagacaacagagaaagcaaagaaagaacagaggtaagaaggtctttggtaccggtaagagattggctaagaaggccgcaagacgtaacgctgattaagcaaatcatcattaatccactaccaaatctttttgtatatgtgtgttaatataacttaaaatataaattatcatctgttatcacgcgggggcacctgcaactgtgagcctttgttttcaggcgatgctttgagatgggaatgaacaacacgattttgcagcctcgcgttggtgaccactgatttttagaactacttctgcttatcttgtgaatgccacttctcgcacagcgcagtacactgctgatagactgtacgtggagggatgatatttggcctgggaaagctattctacgttattctgctgctcgtcaatgcagttgcagtcctgagcgaggagcgtttcctaaggagaagtatgtattttgcggcggaagggtaaactgcctcccaacatatgactgacaattttgtgcagttgggttaggatccaagtccaatcagccggtttttggccaggcggagaactctacgaagtcgaaactagtacatctaatcagtgctgtccaaacgctgctaaggataccgttgatcggcattaacatccttgtgattctgtatgaactagtcctaggttagtccggcgaccagggtctcaccaacacagctgccgctcgcctacatatacctggatgcgctgctgcatgtcggcttttcgccggagaacagctgccgttgcgacgcgttctgttgtactacaaccgccagccgaagcattccaaaaatctatattcgctgtatacgttacctagcagtaatcttactacgtataaagttccctaagatgtcttgctcccctattaagctcctaacacgattggagtcactaccctcattaatagtttccagacgtatcttaaagtatcgcagcatacaatcgtaaatgaaaaggtattgtgtaattgtctggaccatggatatcctttgtttcctaaaccgatcaataatcgttacgatcggatcaaaaactccgcttgcagtagacttgctggatgcccactgttcgctctgatgtgcaatttctgtgaggtttgatattactgaatcaacagtgcaaagtgtccctgtcctgccgcaccccgcagagcagtgcactagaacagttggcatttcatcctcggcaaatataccatcgctcattaactgctgtatcacataatccttcaagaagatcatatctataatatccttgggactatccagtattcctaagtcgggccagtctttgatttgtatttgtagaagctcgtaggaagacttaccatcgttatatgttattttgatccgccttataaataggacttctcctttatgctcctccagcatggataccacgatcccattatactcgccgtcggcccaaaatttacaacatttctcgatgccatgctcaaattcatcggttaaactcaggacaactggtacattgttgtttatgatgcaagtgtaaaagtcgtgaattgtttcggggagtggggcttgtgttgcaatatagcgaccagcactgccagacttcttgccggaatcaaatggactcgtcaagtagttagcattaatataggtgtcaatgacactatccttttcaaatggcactgttgtggagcgaagctctgaatctcgacggagaactacccgtgtgtgttcatatgggaagacgtccttgtaccggtttttcgctcccagttcaacacccgatgagatagttatctctgggtcgtattccttatcataatcaaagtagtttgcaagttcagcatcatttatgtcacacggtatagtactgacactgttaattttatccccaaagggcgtgttcagtatccgatctaatcgtgtgcgctccagtatatctagccgctgaaactgttccacatattgcatcttcgacggtttgagcattaagtcttgaaaccatttaggaatcacgcaatctatctcctcttgtttgtataactctgttatcttcgcatattccaactgaaaacttaacttcaatgggaacttgaagaagctttgctgaaaacgggtcccatttgaatctgatgtctcatcaaactcagaaagttttcgattttcgtttatgtctacagcccccaaatagctctcgagattgctattctcctcaaaatgccgcattttgaatacgcgtggaaaagcatgtgagcttccgttttgcagcggccgctgcgtgggcagttggaacttaaacagctgcgacatcggagacgtggtcagtggagatggtagcggttctaatggcgacccacggaaagacgatggagtcgaaagcgacgacgccgaagcacacagccccggtggctggcatagaaggtcatcgtctgcactagccggcagcgcttcagatagctctgcaaactgcagttggaactgctgatatccatccgagagaatgtagacatccggcacattctgtccctcggcctcccagttgttctccaggaacttcgcagataggcccgcacatgctagactgctccagccgtctcccttcattggcagattgtcgtagatgactatcgaaagactgcgctccccctgtgtatgctcgcgcagccgctcccggacgctctcgcggtctccaggaggcagattctccaacaacctggcgaggctgaacgttttccgccgcagcagcgtggacgggagacacacatgcagcgctccgcgcacatgcgactttgaatattccacgaacgggcgcgtatcaaccacaactgtgtttgcatcctcgttcagcatgttccccagcgcccgcgagtccatcgtccggcaacccgcgtgcagtggaaaccgaagccctccgcccgcagacacgcctactttgtacgctgacgacccatgcggcacagccgggccctccaccatacccgccgatcgcgttttggcatgagcgggtccgcccggtcctccttcctctgcagtcgtggaactgttcgacagaatcgacaccgaatccgaaagcgtcgacttgtgtccgggcccgtaccccacccggtaatactcgcctcccttcagcaccattattttctgaagccttagtgtgttgtcctgtacttgatgcctgacagactcttcaccccacggctttcccggcctgcaactcggtgctgtgtcttatgtgagccctattcagctccactattgccgtgctccaagaactgcagcaaaccagaaattaaaagcacgaaatagatggctacacctgctttctgacacctagcttaatcgtagtcagttgaatttatataacagggcagctaagtttacaacgttagcttgcgattttttttcagcttgtcccagtgcgtagtagagagaatttacgaagcaacgaccctgggttcttgagatgctgcggtaacaagccgttagcgtatgtcgtgtccggcacattcgtcatttcgcgactccgccaaaccggctgcgctagaatcgtgtgcgctgcttgcgccaggtccaggcagcaggctgtctcccccaacgacaggatccgtcgcgccacagttgaggccggcgcaggagacgtaacggccttgccgggagttgcaacaggtacggcagagatcggcttattcttagtaacgaggcttggccagaccctgcggctctgcggctaagaacaaaaactatggacataaccggaatcgaaccgatgacctcttccttgcaagggaagcgcgctaccaactgcgccatatgcccaattattgtaaccgttgccaaggctgggttgattatgacttggcactgggcgtcacatgatcggtgcttcgcaggaatgccagcaggcatggctggcacgaatgcgtcgccaaatattgcacagtgcttcgggcgtgcctcggcggaagctgagttcgattgcgtccggactgggcggtatgcactggtgccacacgcgagctgcaggaatgttctgtaattccgaaccgcaacggccgcgcatcgaattccgcaacggccgcacttgcagataagtgagctggcgcaccgtcagcggtgcgcgcggtgacgcagctgcgcgcataggggctagcgccttgtgcgtcacacctgctccgcagagcggggttcattcacgtgaccactgcccgaaccgaagatgtgcaatggacacgggcgggcttcagaatgcgcaccaagcgaatgcccccatgccactttttaacgcaggagataacaaaccacctgacgctaaggcacaccgcccgcgcgatgtgccaatgttgaagacgacacacatcacgtgttgtggttttgtgtctttatgtcaatgtgcagttccgatagcacaaatggttccttggcccagttggttaaggcaccgtgctaataacgcggggatcagcggttcgatcccgctaggaaccatttttttatatgctacccgggccgcccaagttccagacacagagcgatggaaacgtagagttacagaatggcattgcgcggcggtatgtatctattaattaccttctcctcgacaacgtgccgctgcggaacggttggtaaggattgtagggtttgtgcacagcgtcgctatggtacggggctggcgagccatagcgcgagcccgctattcttttttcgccgcgtggaccattgcgagggaaatccagcggatgcctgcggccctcaggggggtttagcgtgcggccctttgatactggtgccggcaggctagcccgctgtggcgcagcagatgcctgtgagtttctcgggttgcgcttacgcttcttactcttacggcccgcgctatttgagtactgggcctcgtcgatttcgtagtcgtcgtagttgatgttgtagtcatctacctgttcgtccagcgcctcgcgcgcctcctggtgccactttgtgaggtttgtgaagtaatctgcgcgcagctcgccggctaggttgtcgccagaaaaggcactgccgtcgtcgtttgggacgcgcgaggaccgtgcttgcgggcagtcatcgccaaagtggcctttgcccgcgcagttgtagcagaatatcttgtgtgatgccaggacacgcttctctttcgcgccgcgcaggcagtagctgcgccagacgctcggacacctgtccctcgagtgcttcttgctgttgcacagcgtgcaatagatgcgtttccacttctgtgggcagttctgccggtagtgcccgctgtcgttacagtgcgaacagcgcatcgtgcgcgggcaatgctgcgagtagtggtcatccatcagcccacagtacgaacatatcacgtgcgggcagttcttcttgatgtgtccccgctgcgagcagttcttacacttggcttcggcctcgtggatcgcgtccgcgtcgtcttccaccccgaagtaccgaccctggccccgcaggttacggagcagctcggggtcgttgtcgacatcgtctatggacggcgcaacttgcttatcatcctgccgcgacagcagccgcccttgcataaacgtcagcccatcatgtgtttcgacctcagaaagcgcgctcattgcagcctgttgctttctgccgctgctgttctactgcctatatgtgtgcatcactaatctttcttggggctacagagaaaattttgaacctgccagtcacctccgcgacgaacagcgaccagtacaaggtctagctggttgcgaaccccgcctggcgcttcgcgggccgctatgcgctattccgcaacgccggcggccagaagctgccggcgtacgtagcaaaagtgggctaattcgcagcgcgctatcgagctcaacgcgatacagagtttgtgtagaagcctatagtatggcagtggacgtagcagtagtgcaggcattgctctttagatgcgaatgccccgcctatgtagcagagctagtgccaagcgcggtgcttggcgatggctagtacggacgtgatgagaaatttttcactgttgcgccacttcgtccgatgaaaacatgccaacacctagccagtggttttgaatttgcacgatacgatagctcatcaggccatgtgtactgccgaggctgcccaaaaggttcaaaacctgtcgttggacgagaagaacgccaagaagaacaagaaacagggcaacaagaactctgcgtacttggacccggagcctgcgttcattgatgagcggatccagctatttgaaaagctccaggcggagtacaatgcgaaggtcgcgtcgatgccgcgcgctgcgatcagcgtggttttgaaggacggctccgagaagccggcagttgcgtgggagacatcgccaatggacattgcgcagcagatctcgaagtcatttgcggacagacagtgcatttccaaggtgaacggagagctttgggacttggagcgcccactggaggggtcagagggcgaccatttgaagctggagttcttcgactttgagtcgaacgagggccggcgcgtattctggcactctgcggcacacgtgctcggcgaggcgtgcgagtgcaacctgggtgcccacatctgcttgggtcctccaacggatgacgggtttttctacgagtttgcatgcaaggactcgatggaccccgacgccccagagcggacggtttcgcaggcggacttccctaacctggagaccgtggccaagcaggcgatcaaggaaaaacagcggtttgaacggctggtcatgaccaaggaggatctactgaagatgttccactactcgaaatacaagacgtatcttgtgcagaccaagatcccagacggcggctccaccactgtgtaccgctcgggcaagttgattgacctatgtgtcgggccccacatccctcacactggccgcataaaggcgttcaagttgctgaagaactcgtcctgctatttcttgggtgattctgagaacgatactctgcagagagtgtacggtattgccttcccagacaaaaagctgatggacgcgcatttgaagttcttggaggaagcggccaagagagaccaccggaagattggccgggagcaagaactgtttatgttcaatgagatgtccccaggttcgtgtttctggctgccacacggcaccagaatttacaacaatttggttgagcttctgagaaacgagtaccgtaagagaggctatgaagaggtcatcactccaaacatgtacaactccaagttgtgggaaacctccggtcactgggccaactacaaggagaacatgttcactttcgaagtcgagaaggagtcattcggcttgaagcctatgaactgccctggtcactgtgttatgttcaaatcgcgtgagcgttcctacagagagctgccatggagagttgctgactttggtgttatccacagaaacgagttttctggtgctttgtccggtttgactcgtgtcagaagattccagcaggacgatgcgcacattttctgtgctcaggatcaaattgagaccgaaatcgaaggtctatttgatttcctaaaatacgtttacggcgtgtttggatttgagttcaagctcgagttgtccacgcggccagaaaactatgttggagatctagaaacttggaacaatgccgaggcgagattggagtctgctctaaataagtggggtggtgactgggagatcaacgaaggcgacggcgccttctacggtcctaagattgatattatgatctcggacgccttgaagagatggcaccagtgcgccactattcaattggacttccaattgcctaacagatttgaactggaatacaagggcaagggcaacgacgagaacgcctacgagcgcccagtcatgatccaccgtgcgctattggggtctgttgaaagaatgacggccattttgaccgagcattatgctggtaagtggcctttctggctatccccacgccaggttctggttgtcccagtgggtgtcaagtaccaggactacgcccagcaaattagagacaagctggttggcgcgggcttttacgccgacgccgacctaggctccaacaccctccagaagaaggtcagaaccggtcaaatgttgaagtacaacttcattttcgttgtgggtgagcaggaaatgaacgagaactccgtcaatatccggaacagagatgtcactgacctacagggtaagaacgagaccgtggactttgacctcgtcctaaaacaactactcaagttgaaggaggaaaagagggcagacaacgtgctgcagtaggcgcagactgtagtgccttcagcccgccggccaagaaaaggaaagaatagtctccaagtaaatatgtaggtgtcatatagcgtaatgttgctacttaggaccatctatctcgtcccaaataccgcgccgctcggcgttgagcagctcatcgaactcattctgctctctatctgtgtttggcggtgcaggcccggaaaagccgcccatcgaccgcctccgtacctgatcccagctgtcgcctgatgtctgaggtatcgaattctgctggcgcacccggtcccacgccgacagcgagttgctgggctccgtaatctccgcagaaaatgggtcttcgttcgcaggccgggcgctcgcttccacgggcgcggggcccgcaggatgctgcacaggtcgcaggtctggtggcgatgtcagccgcgccattggcgactgcgccagcgactcgtgcctatacatcggcatgttcggccgctcgccgcgcaaaatcccctgccagagcacatgtgggtccggcatgcgcagcgacggatcgcgcgccgttttgttgaagtagtctgcccacaccgcaggcatgctgtcgcgcagcaactgcagcacctcatgccgccgccgccgcgccgccgcgccgccatcctcctcgaggtcgtcgtagcgctctaccggcgccacgctttcgagcgcccgccagtaagcatacagcccgcactggtacgttcccaccaccgtgcccgccaccccaaacaggaagctccgtgacagattgactccctgccggctgcgcagccgcattgcctggtacgcaaagtccgccccgaaccctgcggcaaagcccaccagccttccccacaagtgtgcccgcgcgaccgactggtacgtctggcctaaccactcccggtcagcaggttccagcacgctatccttctcgtaaaagcgcttcgctgacttgtaccacgcttgctgctgcgtcccgtagcctgtgaaactgcccagtgccttgtcgttggggcttccctgtcgagggatatactcatcgccgcctccgccaccgtctataccatcgcctggtgccatatccgctgtgttaccgctagctgcaatgctttggcgatcgccctagttttcctgggatgtctaataggctctcctgaccgcccttcggccccggatctaagtacatcgtggtgatggtgccgttatacgggtgacactatgttagtctgatgggctatccacacgtgtttaaccatgcagttgggcaaacactgacactagcagcagcaagataactagcgatggactacttctcggtcaagcaacagttctacacgggcaattacaggcaggctctgcaggaggccgaaaagcacaagacggatgacgacacggtggtgtactataagagtatggcgcaactggcgctaaaagagtactctaagggcagcggcaatgcaggactacaggcggtgtttgacgcttacgtggactgcagagagtcgggggcgctggacaagctcaagcaggcggccgaggcgcacccgggaccatacagcgcgaacctggtggcgtgcgcgcaggcggccggcggcgactacgagggggcgctggcgacctgcaaggacggcgacgccgcggaactggtgctgacggcggtgcaggccgcgctcctggccgggcagcaggcggcggcagccgcgctgtttgaggcgtacgtggcggcacacgaacaggcaggcgaggacgagatagtgctgaacacggccgaggcgtacctgaactttgcgcgcagccgcgaggccatgggctcgaacttttacttcttcgaggagttgtgtcagacgttcccgagctggcgctcgcagctcgggctcctgaacctgcacctgcagcaggcgcacctgccagaggcccgggcaatcatcgacctgctggaggacgagtactatggcgcgatggctggcgcggcggcgttccgcgcagatcttctggcatgcaagatcacatacgcggccatgaatggcgacgagaccgcggcgctgcgcgcagagctgcaggagctggacgcagcgcacccgctgatccagaagcacctggagaacgacgcgagctttgacgccattgtggagaagtactcgtcgtctatacaggacgctaagtaggtgtgtatagtgctcatcacccggaggcgctggcaggcgggcgaaatctgagccgggtaattgcccagggcgatccggccgacgtagcataataaacataaactccaccatcagtcgtgtggtaccacctcagctaggacgaggaaacgcgtgtgcgatgtcagaagtatcggaggccgagaagcgcagaatcctacgcgagaagcgcaagcagaagttctcgaaaggtgccgggtctgcaaggctacataaaatcacgacgcaacagccggggggcgcgtccggtgactctaccgtcacttcagcagagatatctgacaatgagggcagcttgcaacgcgggtctaatagtgggcagtcaactagagagatagacgacttactggcagcgatggacccgcctatagagccggcggagccgctggagtcggcggctccggaagtagcgtttatccaacaactcatgaagatgcagcaggggagcgctacgccccctgctgacgagaaggccggtggtcttttttccccgctgctggaacggctggcggagcaggaggccggcggcgcgccagtggtatcgggggaagtgggggtacatcagtttcaggtccgccaactcaaagcgtacatgctgctgctgcggtgggcaattctgctgccgttcatatactacgtgatgcacccgggcaccgcgcattggctgcatacgtctcggtttctgcactttgtcatggagccgcgcaacttcttcatggtgtttacgaccttcgaggtggccagtattagcatctattaccaagtgctgcttacgctagaaaggacaaacaaggtaaactccctctcgtactcgagcaaacttgttacttgggccggcctcgtcccggatggcatgctacctatcgacaacttacaggggaaagttgtggttgcattgcattattgggatatcctatctatgtacttgacggacctgtcactctgtctagttgctgccgggctgatgaaatactaccacgccgctccgtaaggcgtcgcgggatatttacgttctagataatatataatgatttgctgtcggggactcctccccgccccccccagtcgctccccattcgacagcagttcaattttacttggcatcttgaccaatgatctccatccacgttttgccctcgttcctgagctcctctgtgacttcatccttgatacgcgcaattaagccagggcctctgtatgcgtacgcagtgtagagttgcacaaagtgcgcccccgctttggcaaactcgatggcatcctggccactactgataccaccacatccaaccaaaaccaggttcgtgtcctttgtgtattggtgtatcgtgcgcaaagcttttagcgcaaatggtttcacgggcttgccggacaagccgcctgcctggtttttcagctcctcatcgacagtgtacagcgagtctggcctttggatagtagtgtttgaaacgatgataccgtcaatactcgatttcttggccgcctctgcgatcgattgcaattctggctcggtcaaatccggtgcgattttaaccaggacaggtggcttatgggtacttgcaccgagcacattgccctcgttgatcaaagaattgcgcttagccacaatcatggataacagctccgtcaatctgccctcctgctggaggtcgcgtaatccgggcgtgttcggagaggaaacattgatcactagtacatcggcaagggactggaacttctcaacaccacgcaggtagtcctcaacctcgtcaccattcttgttctttccgagattaattcccagaagtttgtccttgtaaagcgccagagagttcactgtatcgtccctgaagtaagcgccaagaaattgacgcacgcgggaaagaacgttatcgtataccttcttatgaccagaagaattgaatccataacggttgatgacagcctcgtccatcggcagacggaagaagcgcggcttggggttacctggctgcgccaatggagtcacggtcccaatctccacgtatccaaacccactctgagcaatgccatcgatagcctcgccgtccttatccagaccagcagcacatccaatggggttgctcatcgtcttcccaaagacctcgacctttaagactgggtcgtccttgtcgaacatcaattttggcgctaatccatacttgaggaaccagattccgagcttatggccgtcttctgcgtccggagtcacgagcctcaccaatgggcaggatacgtattcatgaatggcagaccgcgagttcatgatgtagaagcccgccatggctcccaccaagacactcgcagtacctatgatatatctagaagcaccacccgcaacgcttgcctggagaggcatgcccttattggctgcaaataagttgggtgatctgaagcatgccgtccggcaccttccaaacatcttgtaactcatcgtggtatccgcttggcttgcgtgcacaaccagaagatagagcttttgaaaagtcgttccaagaaagctttttccgctagcgaatcgaacagcggagtgaagactcacgactaacggggtctgtcagctggactcgaaagaagtgccggcgcaagctcatcttgttattcgcctcccaagtcgtactagtggctgggatcttactcttcctacgttttgtcagcaaatcacgggtaggagcgaaagtgagctggctaggaatatccggccgttcaaccgcttggcagttagcaaatacagccgaagaccttgctggaaaattagagtttacagaggggatgctgcaccaaccaggaactggacagttgtctcagtggtcctttggcaaggtgtaaatcatggcattacccgaagtttctcgatggaacaagttgtcaacaggcttccaatgttggtactggtcaattggaagctcgggagtagtctactatcagaagggggtggtcactccgggaatacctcatcgaactcttaaatgagctagtgtcagttggtcacgtgactaatctctctcttgtttcttttttattgaaaaaaattcgtgctaatagtcttcaacactgctaggcgatgagctagtactagcggtagtccttaagtgcttgaacactgccctccaccatggctgcgaaggtagattctaaaggcgatcctgtgggtcgtatagcgaagaccaatgcggaaaagtttcagagaggaggtggtaagattaaccataagaaaataaaagataagaagttgagagccgggttgaagcgaatcgatgagcagtacaaagatgccgttgctgctgctgctgctacggaatatttgcttcctgaatcccagggctatctggaggctgaagatgaaatggagaaaactttcaaggttcagcagaccgagataaaggatagtgtggacatcggtactgcgaacaaggcgttggatctgaatctgaaggagtttggaccgtaccaggcgggctactccaggaatggtacgcatctgcttattgctggacgcaagggacatgttgcatcgatggactggcgtaagggagaattacgcgcggagctgcacctcaatgaaacagtccaggcggccacttacttgcagaacgagcaattcttcgcggttgcgcagaagaagtataccttcatatatgaccacgagggtgtggaaatgcatcgcctgaagcaacatattgaagttaagcatatggagtttttgccgtaccattatttgctagctactgcagggcagactggttttttgaagtatcaggatgtctcgactggacagttagttgcagaactgaggactaaactagggcctacatcctcaatggcacaaaatccttggaacgctgttatgcacctaggtcataataatggtaccgtgactctgtgggcaccaaatatgcctacccccttggctcgtattttaacagctagagggcccgtcactggtgtcgcggtagataggcaaggttactatatggctacaaccggagcagataagtccatgagactgtgggatatcaggaacttcaaggagttacattccgttgaaaacctgcctataccagcaagcaatgtgaaaatctctgacatgggcttgcttgcagtgtcgagaggaccacatgtgacactttggaaggatgcctttaaaactagctcagattttaagcccgttttcaccagcagtcggttgcccaacaaaaatacaccatacatgtcgcacttgtttgctgggaataagatcaatagccttgcatttgtcccatttgaagatcttcttggcgtcgggcatcagacaggcgtaactaatttgatcattcctggtgcgggtgaggctaactatgatgcattggaagttaatccttacgagacgacgaagcaaaggaaagagcaggaggttagatcgctactgaacaaattacctgctgattctattgcattagatccaaatgtgattggtacggtcgacaagcgttctgcgcagattagattgaccgccaaagacctgacccaaatcgcaactgatgaagacatgaaatctaaggagaatagagacattccaaaagcaaaccctgctgtgaagagtaagaattcaggtctgcgtacattcctccgtaagaagacgcagaatgttgtagatgagaggaagttgagagtacagaagcagttagaaaacgaaaaggaagcccgcttgcggaagcaacaagctgctagaggtgagctaacagaagataagaacctagttgacgaggcgttaggcagattcagttgaaaataaaatcacctcattatatacttgtttagagagagctgcaatcagtaagttctttcgtttctaaaaaaatacccttttcctaatgtacataatcgacgcttccaaattatcagttcagaattctaagtcatcctgaaccttgaagggagcaggcagaggagcatccgtctctttttcctgtctaacggttttgattacttcgaccggctcgtcaggagttttgtccgatagcactataacgccattgctacccttaaacttgcgaacgggagtaaatctctcatcctttggaaatgcaatatattttaattgctgtggtactacacgcgtcatattctcaaccttatagtaggtcgaggtatatttaatcttaaattcctcttcagggacatcggcgtcatgctcttttttatcacgctgctcgttttcaaccttgatctcttccttggacttatctggctctactgccttgtccttctttgactttttggccctcgccttggccttggccgttgttgaaagaacagcagttgcaactttctcgatgctcttgtctatatcttcttcaaacataggtggatagtcgaagatgccctctttcgtgtggcagtggaaggaaaacttagggatctttaggtcatggctccgaacgccaattgtagttgtgggagtaaatgaaagagaaaggaagtgggctaatgggaaccaataccaaaattgcgtaaacattgctagtccaataacagatttcgtattcaaagttcccatctccgagttctcaagttggatagtaacattccgaccacctgcattgataatcccctgcgcaacacatgcaccaaactttgcaagaccctcttgatgcttgttagctatgacatttctgagctgttcattcacatcccttaccttaacattagtcttctccgtttgctgaattaagatcatcgacaatgcgatcatcgcagcctggcgaacaaagtcaacggggtcatttgtcaacggttctaacacatctatagcggcctgtaatcctcgaccggcgcaggcaacgcctaaggcaaaagcggtaccacatctaacatgagggttatgggattcagacagcaattcaacgatcctagggacagtggtgtaatcgcggatgaggacaaaaccaagcgcagtaacagaggcacgtctaacgtcatcgttagagtcggatacagcaacatggagaagtttctttaccgcttcgttactactcgtgcctgcgtaagccaatgctatcgtgtaaacagcaccgtaacgcatggaatcattttcgtgctcaagcattttcttaatcgtttcatctgccaattcttcacgcccgtagtttagcaaagctagcgcaattgccaaccctttcgtgatttcgccgtgactggtttcctgtgcatacgtgtataggttttcagcaacagtttcatcgcctgaacccaacatcgtcaaaccgataccaagtgctgcagctgctcctgaattggcggaatccgcatagagaacctcctttaaggcttcaaatatttcagtactattcgaactcataccagccaaaccaattccaagagaagcaccatgtagcaagacatcaacgtcgtcatcagttgcatttgagctattctccacaatctggtctttcaaatagccaataatctccttaccatacccagcatagatcagaccaaggccataaagcgaacctcccttgatataacgggaagaagcacgactccccggtagataaggttccataatttttttgccaccagtgagatttccctggtgaataatacctaacgatgcagtggctgtgaacttagcccagttttgggccttgcctagccactgcaggttggctctaacgaatgtatcgtctgtagtaccagcgtgcatgaatgcattggagacactgactgcagtatggaacaaagaaaacttgccgtccatagatgacttcgacttgttcaacaagctcctatcaatacgcttgttcgcatgcaggaacgtgttgtagaaatcacatgttggtaagccagataggatctccactagcctgtcattgccctctcccgtgctcaaagtagcgaccagctcatttaatagcccttgagatgcagaagtgacgagatcgaatgcaatttggtaggcaatttcggtattcttctctgaaactaacttgtcaaaaagtctcgcggcaagtttcgagtcgttcaagttcacaatgatcttggatactgcaaagtaatcaggagccttcagcctaattaggatgtcaaacaatgcatacaaaatgttgattttgaaatgggtgttgctgacagtagtcgtcgcagcaatcagcacgtaagttattaacttcagcatattaggctccgaagtctgctgagtaaggatattggtgaccacgtctagccggtagctctccagcgcaatccctaaagccagtttgtattcgcccgccgtgatgcacttgtttaacatacgctcgaatatgctcaccaactgcaggtcaatctcacttttctctttgccataattctcagtggccagcttgatgtacatctcaatgctttgtgatacaattgtctccacgtacctggatttctcgtttatatcgaagtactcctctgcagctagcgcgtacctgacagcagattcgtactcccccagattgtagtatatcttcgagacaacaagcgccgccagcttccgatcctcaaacttgctgtcctcataaagcgcctcgatatcagtgatatcgttcgatacctccgaccacagttggtccacaacttcgttaattgagtgtaacgcataagacttcacagtgtggtcatcctcccttaacagggctagaagtggagcagcagtgatcacagacatcgtggtaattacaattctgactaggccacgagaatattcaccttggtgcttgtcttctacacttctaccggaaatttgccaccgaaattatctgattaatggtggtgctgcgaaggtcccttatcgtcagatatgatgaaaacacgagacaactatatcacgtgctattttgcaagcatacgtctagatctatatggacgacagtgattttatatcctaattattctatctaatagagtaacctgatggagatcttgtactcggtagcattcaatttatcataaatgtctttgatatcactgtagttcacattcgagatgtccgccatcagataagcgatgtcgccgctagagtcggagaactgcttctcgatattgtggtcagacaagatattgttcacagtttttagcacgccgggcacattttggtgaatatacagcacacggacggtgttctcttggtccaggtcaagcgaacgcaacgagacctctgggaaattcaccgagcccacggaggtaccgtcgttgatatacttgctcaaggaagttgctacctcgacgccgatggcactctgggcctcctctgtcgagccacctatgtgaggggtgagaatgatgtttggcaaggacaccaggtcagagatccaagggctgagttggttgccgaaggcaccgctgccgttcttcgcgggttcgtgcgggaaaacgtctagcgcggcaccagctatctttcctgccttcatcgcctggatcaaggatgggatatccacaacggttccccgtgaagcgttgattaggtatgcaccatttctcatcgccgcaagttggggggcagaaatcatgttcttagtctcatcagtggccggcacatgcaaactcacaaagtctgagttgttgagcagctcgtcgagagtagcaacttgcttggcggtacccagtgccataattgtcacaacgtcgtaatatagtacgtgcatgccaaaagcctcggcgagcacagataactgggagccaatgtggccgtagccgataatcccaagggtcttgccgcgcacctcccagcagtggtgtgagaccttgttccaggtcccggtgtgcatctcaatagagcggtcgcccaactgtctagccagagagatgatctcaccgattactagctccgcgacggaacgcgagttagagaaaggtgaattgaacacggagacacccattttcgctgcgtagtcgagatccacctggttagtaccgatgcagaagcagccaatgcacaccaggttcttggcgtgtttgagtatttccggcgtcagtttcgtcttcgaacggataccgatcgcatgaacgtctctaattttctcaattagctcctccggcccaagcgagctcttgtggaactcaacctggtagccttgcttgtcaaagatgtcaatggcggtttggtttacattctcaagaagcaatattttaatgtcgcctgtcgagaaaggcttcagcgccttggcctgtttcgcaacgctcgtccggggtggaagtgtgttcatgaaggaggtcgtgggcgaggtggagaccacgccaggagagcccgacatatttagtgcgtcctggaacgcagcttgaaggttgttgatctgttggggtgaagtcatagcgagtataaggactcggggtagtgtgtaacgatctagcgaacggccagagatactttgggctattatggcctgctactggctttatatgtactggcttcagcgctgtctgccgacgcggtaagtgcattgtctacagttactcatcctgtgaagccacattattggcttccgtttatgaaaaattttcactttacgtaagtaatttagaaccaagctttatctgcttccaaatggctagcctgaagcctactggatgtcctactgtatcagcctttgatattgtggtctctgccagtcatatttgatgatgactagataaccatccttttagttccctctttaactggcctgtgatgaattaatacgtatggtggactttaacgtccaccaggcccgtatttagatcgccttttacggaactgacttcgtaggtgcgagtcagtcgttcgcgtcacatggaacccacagtaaagagttaaacattaagctaacgcaaagaataatgactggttgaagaggtgctacagagatatagtagatgattgacaagctctaagtaaccgctgatgtaaataacatttctgctaagccccaattcaaatttagaagacacgagtaattttgacactaaatgccggtgtgtacgattaaaattcaagcgtgcgtcagtgactgccagaacagggccctttactagacgaatatttgattttaaatacgaccgactatatgcagcagcgatcagccacggcctaagtgagctacctactgttttaaggaatggtcaccgttagcgtccttgactagcactcccgacttgaccaggttgtcaaagagatcctggggcatccagccttgcgtggcactaaatggctcggctatcagtttttcgtggtaagcattgagcttctctgcatgctggcgtagccactcctcggtaaactcgactgggaattgctcactgttggtcaactcgttcttggcgaatagttcccagacttccttcagctggactagcgcctcatcaataagcaggtactcttggtcatacttgcgctgcaccgcgtacacgtaagggcttctgagcagtttcaccagaggggcaatactcgagatgaggtgcttagcgttttggttgagctgagactcccacaggtactggttgcgggtacgcttgtacataaactcgtattggtccttttcttgagcgttcagcttgctatagttctcgacgtcgcgctccaggtcatatatcttggggccgtcgtaagcaacaaactgagggttgttgtgcagaataaacggcttcacagttgtgccctcgaagtccagcagatatggctttccattctcttcgtgcaatataacgttcatcggatcaagatcgggatggcacaggcgaggcttcacaattgcgtccatgtttgggatgcttttggtctttaggttgtacatgactggggcaagcttggctaggttctcaaaagcagtaatctggtcccggaggacttgctcgtcgatctcggcctcgggggaggcatcggcctgcttgatagctagacgagcccgagcgttctccgcttccagggagccgagggacttgacgatatccaatggctgagatatagtccagggccctagatactgctttcgctgttcgaaaggtaacgcgctcttcttcctccagaaacaacgctcaacgctggggccaattctccatctatcagcaaggtcgccatcggtgtcggatttatacgctggctcgtttgactcacggtaatccttggcgaaatacaaactgccgaatgcagtgaattcagtttctgctagcttggcttggaattcagagatgggctgaattacgctattcagcttctccttatgactcccatcggcgctgtcgctggctaggggcatccagtccttcatcagcagacggcccggaacatactcttcgagaataaacggctgtctaatcggattcagagcattgacgccaaaacagaaaactttcgggacgttcatgcctagctttaggtctgcaaagtccatagttgcaacttcacttttcacccggtaggctagtgtgttctcctcgtcgattccgtatggaatacgcaagacgaacgatttgcccgcgttagtgtcaattttgtatatgcggtggtgcttgccctcatggaaactggccatggagaccacccgcacgctctcgccacgcttcggcgtgcctaggtgtttggaagtgacattatgcggtagcgacaccgttagatttggattgtatgaaggtggtggcaccgcatccgtcttcgccgtcttgtctgcctgcgccgactgctcgtgcagatccgacaaaaccttgttcagcccctcaatggagaacctagtaacacgcttctccttctcttgtttgtcgttcttcagccaagagccccagccgtacttgaagaacgcatcccgctgagggtcgttctcgtccgttagcttcgtgaacacttctttcggatcattgctgagagagcgctttaacagcaatggtgcggctctcaatagccgaacattcttagactgcagcttactagctgaccgtagtgagtgcctgagcataactgcaaatatattcaaactaacctacggtcacccatgatgggtacaagaactagtagaccatatgtttttttccaacatgatattggaaaaaatcccatgcgaaaaaccctgactaacccaacattcatcgggccttaatcggcaatcgccagtagttcttacatatatgccccgcatccaacgagcttcttcagccaataattggcagtagacggggtatgcgcatcgggaacatgttacagtgatcagcccgacaaagataaaaaacgaaaacgaggcattaaaccgatacatcatgtatatatatatatacgattgtcctgtacctgtatataggcggaaccaaaacggaaaaacaaggtgtgctaccagcgcaattagtggcgtgaggacgtgctgtccttctcactgtcagttatgctcacagccgcagggatgctccgcatatcatagaggtatgaagtgtcatcgcccagcgtactggtgttgctttcaagctctgagttgaggcgatgaatattcagttgatagcgcgcggaaccagagaaattggtgtcggcgaaggaatccagcgagtcgcagttgctctgggacggccggtcttcgttgaacaggcgcattttctcctttagagtgagtgatgggccattggggaaatctttgcacggttcttcggggtgcgccttcttccaatgtgcagcggcgttcatggaattggcgaggttgacggaatactgggtgatgccgtggcgaggcaccctgcgcccctccacaccgtccttcgtggctaccatcgacagcccggacgtcacactagaccgcgacagcggccgcgaaaccggcggatattgtagctcgtcgtctaggttcacctcatacagtgcacgcgtggatatattgtccgtgggtgtttcggaattattacagtcgaagagagacagtgtcgagatgtctctcgagggggggtgtggtgacatggatcctcccagattggttcccatcgtccagcagtgtcggaagagtcctatggaaaatggatttgtgcaaggagtctttatcttgaatggcgccgtgcatcggatgcctggtgaacttttacgggatccatgccatatttattgctgcgaggccatttgcttatacaagcagttgctttttcgaacactgcttagtggacggtggaaggcagctccttatgcgttgtgccgcgtgaaccccttcgcgaagtcccatggcctcttggtctagccggcggcggtaatcccgccgtcgtacattctctcccgcgtgcccccgttctccctcgtccgcatcacctttgtcgcgtatcagcatctgattatacctaattcctaacgcacctgggccatcccctacttgcggcttttccgagcgtgatttgacgctcactggttccatgcggctgtgttaccggttcattgccccgtctatggaaggacgcacttagaggcccgcagggtgaccaacggttgtccggcaggctgctgtccggcttgcttttcaccattagaacagtttataatattacttccatacaccacgacataatattacccggataatcaacggcggctaatattcggcgggagatataaatatgatggtggcgaaacattgaagattgccaacatcaccatgaaagatcggtgaatggcaagcatcatacctatagaagcagtcggaataagattgtttcattaagaacattatcaatgtcgacaatacaacaagtaaaacagctaacgaagaccaaaactgccataactaccgagcaatcgcagaagctcatccagacgatgctgacaatgtcatttggctgcctagcatttctgagagggctatttccagatgattcattcattgatcagaagtttgtacctgaaaaatgcaacaaatcatacgataaggagaatacgccgagcattcgaattaagacgctggtgcggggacgatccgaggaggcagatatgtttctagactgggttgaaaagggcgtgttcacagctattcgcttgcgctacctcaaggccatcttgcttgggatatttaccgacaaaaacaatccgcacgatctgctggagagctatgtgttttctctagaataccccacctccaacacagtcacacttagaataaacggccaagaggaggctatttcgctgctggacagcagaaagatgatgcagcaactaatgcggcgcttcataataatcactcagtccctcgatcctctaccaaaagagcgctacttgagcatgcgcctcttgttcaatgagaatgcaccaccggattaccagcctcagtttttccgggatgcatcgatggagcccaagaccactattaaagttcctgaccacatggatatggatgcggtgtctgttggttgcctcgacacccaccatcatacaatggcaatcaaagttttatcgttagtagatgtcgatgcgcaggctagggaagagccaaatgcaagggccatcgacccattcgaattggttaaccaacctgtagagctaaaggtagattcgattggacagtctaaatacaacagccagaccacaaatatgctacaggactacctgcggtcctctcctgacaacgtgtgtccaacacaagcactggataaagaagacgagtcccaacagctctcgccagagggccaagagagttgtgaatgcggcatgtcttgttcagtcagtttcaagattgagtgtgacacttgcaagagacagcttcacggcttatgctacggaaattctcgttcgaatgttgttcagcagtgtattacttgcattgtagcggaggagctcaacttagatccgacaacaaaggaatttcagatgatgatggttctacggaaggcatatcgttatctaaaggataatcttaattcctgtacctcgacttcttttctacaagagacgctgttcgatgggaacaatagtgacactaccacaaacatgttagccgaagcgctttcaatctttatccaagacaaggtcatagtacttgaccaagagcgcaagaggaacgcaaaggggcaatttacgaaggactctgtgttcgttgatgtggaccaccaatcagtatttactccagatggtttgctgcatccaggcaggtatgcaatgacatttattcccaactccaagaatgcccaaaaatgctatacagagctatgcccggcatccgctgcacaagtaacagcctggacttctgcggtaagaaggtctcttgcccacctcaacagaactaagcgacatgtgaatagcagctcgtcttcgataaacttgagctccttagcaattgacgaggagactctaaacccaattccgagaggaaagcgtaagaatatccgcctcgaagatgaaagcgtagagaattatccagatagcttgccaaataaggttaggaaaataagcgtttcgaagaaaactttgaagagtgcttggtgattttcactgatcgactttcggtcgtctaacctccgagtgattcataatatttcgattgtccggtagcacggagaagacctaaagtgaaaaaaaaaatatgcctagaggtagtaaatgagcttacacagtccatacttaatatctaggaatagctacatatttatatttctggtaattaacaagcatagttttgaaaatgctgagcgcaagaaggatactgaggctttctaccgttggaattagggccttcagctatggtagatcacagtttgcttcaggaaagtggcttgacagaccgcccacgttactacaggcagggcaagcaatacatgagagcaggcctcacatgctgaaggcgggggaattgactcccgggataacagcgactgagtactttggaagacgcatgaagcttgctgagaggatgcagcccaagagttgtgccattatcgttggagcagagctgaaatacgcatcagggcctgtattttatccattccagcaagataacaaccttttttacttgacaggttggttggaacctgatactattatggtcttggaaaaacctactgctgacccctcagacgtaattttacacatgtttgttccgcggagagatgctctagtggaagcatgggatggtccgcgcagtggccctgatggagcaagagagatatttaacgcggatgaatcgatggagataaataaagcaagagaagggttgacccacatactgaagagatgtgattcggtttactacgattatccaactaccaaaagttcaatgtcttcgggctttaatgatgtattcggcgtttctgtgccaagagcgcacgaagcagtacggagtatgatcggttcgtttgcggttagtgtgaaccgcttgtcaccgctgactaccgcgctcagatgtattaagtctccggcggaaatagacgtcatgcgtaaagcgggtagaatttcgggcagggcatacaaccaagcatatgcgcaaagatttagaacagagaggacacttcaagcgcatctagaatacaacttcatcgctgggggatgcgataagcgcgcatatgtccctgttgttggcgcaggcaaaaatgctctctacatccattatactaagaacgatgacgtgatgtatgatgacgaattagtactcgttgatgcagctggttcattgggcgggtactgtgctgatatatcacgcacgtggccagtatctgggaagtttagtggacctcaaaaggacttgtacgaagtcgtgctggcagtgcagcggaagtgcatatctctttgttcggccaatttgggttactcgatacacgatatccatgagaaaagtgttgcatttatgcgtgaagaattaagtaaccttggcctatctggtgctcacttttgggatgtgaacaaaatttatcctcactatatcggccataacctaggcttagatgtacatgatgtccctggcgcatgcaagagctccccactacaagagggccaggttattaccatagaaccaggtatttacatcccggatgaacctgaattccctgcatacttcaggaatattggtatccggatagaggataatatagcggtggagaaagatacttataggaatttgacggtggaggcagcgaaagaaattgtagatattgaaagcatcgctcaaaatggcgtgtctacaaagatgggggagacactttctccactcgaagactaatatctcgcattccactggatagtaaaaagcatattaatgcattatttatacattctcaccttcctcaaggtgttcttcttcatattcttcatcttcgctttgctcatgtaattcgaaagcatccatatcttgagacctattcagaggctccactgactgctccttaagcatgttttcaatgaaacttcgtagagcatcattcttttgcttcatgactaaaagttttgaatctatttccctttggatttggctaaccttgctcactaagttacctaccggaagatcttctttgtagtaaacgagatccccttctatgccgatattgatgtcaaatttctgaatgagggatgatacatcagccattaccgtgtcatatggtatatcaagtgtcctggcaagatatgaaacagtgaccctttcagagatctttatataaaataccaaaatcttgctgcgcatgtggctattaacactgtgccagactggggccaaaaaacagcttctgttagccaattcctgtataggtcccaaccatcttgcaaagaatgagccgaagcttgtgctgacaagcaggttcagacagacatgcagctcaggtaacccctgaagaagtggatttagatcttctaatagaaggaaatcttgatagttctctaatgggattgcgaccagcacggcaatagtcaacatcaacttgtattcttctttaagaatgaaaatatctctcccatcctcctctctcagtagataatccaccagcgatggatgttcgtgtattgaccgcaccatatggtgcactgcaataaagtactcttcctgaaggaaaaggctcgcaaagcccagcatcctgcaatcgctaacttcatctgtaagaagcaggctacttccctgtgcaccattccgaagataggatctgagacctatgtcgagttccgaattattaccgtatgacttccccaggatgttcagcctcatcatgcacctacaccattctatgtatcccacgtcgccgactgtcgaagattctaaaaggctaatggccttggagtaattatgcgccagcgcattttccaataccagcagctgcaatccatactctgaagatatggtatccggatctgcaacattatggtcctttcgagtaccgaggtatggcagaaagaggctgcgatgcggcgaagtcgagaggctcaagttcatgtctgccaatctcccctcaagcctttccactaacgtttccttatcagatatttgttcccatgcaaagaatagacgctcaactgcaactaaaacctcaaattggtccatattgaaggccagctccgatctcagaggacagacgttgatttttcgcccttggtcacctttgatcgttattggcaagtataccgatgaaattttcacgttctgattctacaaactcgaatgcaatgagagctactaagagaagaaggggcgacacaatccaagatgttcctcagaatccagttacgtacatttatgagcatgccagtgctacgaaagaccggtctaaaatctaaactcagcgctatccaggccgggaagacaacggtcccaatgacaaagaaagagcttcgagaacgacaagcaaaatatcaactcatggtcaaaaggctgcaaaagacaccgtatactaaacagcaggctattcatatccttgaaaagcaatatggcttccgcgatgctgccaaaacacttgaaattgggccattatctgaaaaagacactgaacttctgcagcgaacaactgacaaaaggcttatatatgctatactgggggtcagtggcgagcagttacgcgatagcaagttggtggcggacgatgttttgaagttttgcaaacgtgggatgttgaacaaagcattacttctgatacggctagcgaagaaaaacggcgttgtcggcatgaacatcttgatgcgtcactactgtgaggttgagcagagtgcttcgagtgctatcctactataccaatatcggctgaaatggggcataccacctaacgagcatacccccactattttattcagcggaatagctcacataaagaaaccactctccaagcatcatgcagcgaagatcgttactattgtccaggcattaattgacgaaagacaactgaacgccatacactttaacgcggcactggcatgccttgcgcgctgccctgaaaccgaatatctgttccaatgctttgaactcatgccctcttacatggaacggtcgaaggtcgcatacactgagcttctagaaggtatctcaaaaatcaaagatgacattgaagcgatgcaaaagcttgattatataatgaaaaagcttcctgtcagggccgtgaatgcaaaagctttattctattatcttaacgtatggaatatgcggggaagtcccgatctttcgaagtgcactctagtactctgtgatcgcttctttgacttgggcgtacaggttgaactgccggttccaaaaggagtacaacttccttctctagatacatgggggttgttgaagaagctaacactgaacgagcacgtcctcgggatatttttggagaactgtgcaaaacatggcttatttactcttgccatgaaggtatacgagcgtgtaagaactgaaacccccgaaatattgaatgagaagtcgtatcatcacataatgcaaatcttccgtgagaaataccctacatcctgtttagataaaaacctcgaggtttttgaacacttacgtttgggtttgggtaaggtttccgtcgcttcgcttcgggaaatacaccactcaatgactagagttcttgcgaagcgctatattcatgatgatcttacgaaacttgaggatactatggagaagatacatacattcttccagaaatatgattcgacttcgctacatggtaagaggatactgaacctaacacagagcacggtatactggtctatacttaaaggaactgcctcttccgacaagctgactttaacgaggaaaaggattatatctgaacagtttatccattcctacaatggtgatattttccgcctaaagcatgcgaatgacgctgatcgctctcgtctgagggcggtgtacctaaatgccattcgtttctactcaggttaccaagataactttactctaccggtcgcagatgtgactgagcttccacacgactctcttgagtatcagaaatatcagttcagaaaactactatcaaggttcaaaaagcgtatactggaggagctgcagctacttgagagaaagcagcctatccctgccaatttgatagaaggcacgaagcaattgggtgacaggatacttacgacgcctgtaccgggtatactccaaaaggaataaacatgtaaatacaataaatactattcagagaacaccgttttagtccatagaacgctgacgcccttgtcgccaagcaataaagataatctattcacaagtatatatagaaagcctaaaccgtacacaacacacggatcttgacttaatagaagaactactcaaagaacttcttcatcttctctagccagttgacgtactcagcgttctccttgtggccagagtatgaggtgatgaagctcatgaactcgtcgttgatacctctggacaccaagtactgctccagagactgctgtagagagtcatctaagttagggaatggtgggccctggtaggtgagctcgcgcttcacctcggcctcggcggtctcgctgagagcagcttcggagctgtcgaaaggcgtcaccgagttgatgtagtagcgttcctctgaaaccgagagcaacaggtcaaacgcaacggcggtgtcgtccgccttgcgcacgacaaccactcttgcattggtaaacgtgttctccaactcctcgctgccctccgcatcctcctcgggggcggtctcatagggcatgttcataatctcggcaacgtcgaagaacacgcgcacaacctcatccttgtcttcgcgcacaatctccgccaggttctggttcttcttggccacctccttgaagccgtgctttgtcaaaaactcctgcgcatcctctggtagctcgttcgagtgctcttctagctccagcatctgctcgctcttcaaaatctgagccacatttttcgagtgcatgttgaaggacactgcattgctcgagaaaagtctaggaacttgggtacggaaggtcgcacatgggattgccctgcgggcagtaagtctgagggcgttgcgagcagctatacggaacatgacagtaaatcgaataccttgttggattagccgaagcagaaggtaatggataacgtttctactatgccatgaaaattttacatattgtaaaatggtcagcctttaaaatggtcagcctttaaaatggtcagcctttaccatggtcagcttttattccaaagatcacgtggcaagctacacgactgggaagcagaactatcgctagttataccggtgccactagttcctttatctagtactggctgtttctgttattgtcctttgctttagaggcgcagccagcgaaactcatgtagatatctaagcatataagaaaggcaacagccgtatacttgcccctgaaaactcatagccactcacaaaaatttgaagatgtgctgcgggtgtacttgttctgactgtatactttacttcctagggttcctgatacccccagtggccgtgttgctgcgttctggatgcttttctttggacttgctcttgaataccattttgacctgcctgggggtgttgccaggcatagtgcacgcattctactatatccacatcacaagcccgctgcgtcaccagtatggcgaccctgtgccggtggggacgctggacaggtttctttacgatcggcagcgattggaccaagcggtggctgcccaaagactgggcggctccggtcctatgccagaagagcagaggcccttgacgtacagctctaacagcaaggcgcagatggcgccacccccatacaatgaacatgcataaatagctcatctcacaacacattgcttcctatgtaaatctacactaattatgcgtgtacgaatgaaaaaacccacctgagcttgcgtatacatactaatattgcacctttgatcgttttgtgcggtcctctgcgttatgctccctcgcgcgcttgcgggatggctcgtagtccaacaggactatttggtccaagaacttgtgcttcttgttaatcttcaacttgtctctgcagcgcatcttgccgagacgttcgtggcaataaaattcccccttcagcgcgctcagtgtcccagcgacagtggttacaatagctatgaactcgatgttgtaggagcccccacagtcatggcatttgtcgatatgtgtgatgacaacagcgatgtcgttaatgagaccgatctcgaagtcaataatcttgaaggcttcgggatcgttttccagaaggtcatggctgttgacgaccttgaagcggtcgatcagcaccacaccaaaggtgtcgaaaatcatacagatggagtttgtaatcataaataatttcttgaacgaggacaaattcatcaatgcccacctggcttccgcgttggtagcatccttggtgacgctatgaaaagaatctaacttcattagtggttcatcaatgtactttggtcgaaatgctgtcaaacaaagaaacttgtccaaagtgataatatccatatctttgtagtcatctgtcaggaatgacgtccgattgctatcatggtcatcttcattggttgatgacattggatcgtcacctagttttgtattaacaatccgtatatcgaccgggcaggtgttttgccgtatacatcggataaacctgtctgtcgcggagttgctgtaacaaggcacggcgtcgatggtccgctcgagtatacttctccgcaaggagctgctcctcgcagagctgtcaatagagccagtgagactgccgcgtgatgccggtctttcacgctcctcgtcgtatacgtcaacttgacgatgaaacagcttgtataggtcatccttgacatttccctgccgctggcgccacacacatgaacaattcaactctgccacgtagtcgttggccatcagagagttccaggtacgagggtccatatcggtctggatcccccgaaaatcgaatcgcaggaaatccagaaacttgcaacggtagacgctggtgctggcttcatcgatatcatgaatttcctgggacgagcgcttcagcactgcgcgcttcaacttcacaaacttgatgaagaagtccgtgaagagcttgggcaggtggattttgtatatcgtcagtggcacgcgcggcgccatggcgataaaactgaacctatcgagagggtttattcggaagttggacacttccttcttgaggttcacgtagatgcatggcttaaaatatgggatactggggtatagcactttaagctggggatatattgagatttgttggcccatcgggtgacagtagtagcatatgtgctgtaactttgtgcgtccagtgaatttcgagtacacgaagagaatgccctcctccagcctgctggtatctcggatgttgggcgccgcaatctcaaagaggtccggcattcccatcgggttgtagatattctcctcttgtatgtagtcgttcggcaggttcagaataaagatgtataagtccccgtccttcgtgcagcagtaaagtaacccgtctttaaactccaggcctgctatcgtcaagtcgagcgtgttacgttcgtgcgccaccggtaggcatgtcagaacaaagtttggcttcagctgtagtctctggctcaccctgtattggtagtccctgaatatctctataatcccgttggattttgccacaagcaagtagtccgaggagtccatgagcccaccattttggcactcgggtatcgtcagcctgtctcgcggccgcaggtaacaaaacttctggatcatctcattgtggtctgtagcattgtctgaggttatcggcattggtgttaacgcatcatcctggtacctgaacaaacgatagcccgagaccacgtctttcccattaccaggaactgaaacaccgaaggtgatcatctctggaacctggcagccgcctgcttgtatatgctgctacactccgctgttcgatagtacaagcccacgtactgagtttaaaattcatttatcatgaaagatccatgtctcattttactttttaaaggaagcacaagagttagtgataacgagcactttgggtccagggtgtcggccgctacaggctagaacgacgtcatgaggttggttgcaatgtttgcaacgaagaggacgtatagcagcactgtctggcacgagtcagaggtgctgatagatcgtcggtcaaaattccagggccgctgttgtatactacagagtgctagtgatgtgcccgagctactggaaggccttgtagatggcaacaagcgcatagcgaaggcatcacatcccctcatatacgcgtggcgtactggggaggtcatagaagagccattcgagaagaacggcaagaagaggagcgcggcgcagcagcacccgcgcgcgcgcgtacgcaatgtcagccagggcagtgcggacgggggcgaggcgggcgctggaaacgtgcttctgtcgctgctggagaggaaccagcttgttaacgtgctgatagtggtcacacgatggtacggagggacaccactaggcccggcgcggttcagacacatttcgacggttggcgtacagagcctgcggaatggaggcctgacgtgaggcggcaaatgctagatatacatatatacacaccggacggtcagacgtatttgtaagggttaaggatggcgttcggatcatagtggtgcttgatgtccttgatcatttttatctcctgcgggctcttggagtaagagatgtaattcttcttctggaaacctaggccgtgttctgcactaatggagccgtgcttcgaggccacgaactcatagacgaacggctcgagcgcggcttccacttgcttcgtatactcacggaccgcgacgttcaggtggagattgccgtcgccgaagtgtccgtagccaagtgcacacacaaccggcttcgacgcgtcttccgtgtcagacaggttctgcgcagtgagccgttcgttaacagcgtctacgagcgagtgcatgtctttcagaggcaaggagacgtcgtatttgtaaaccccaccttcggaggcactggcttcgggaatcatttcacgccactgccagagattgcggacctcggtttcgccctgggccaacgcgccatcggacaccagtccttcctccattgcgccctccaagaattgctccagcttcaagtcgtcatgctctttgttggaaccagcagtctcgattaggacgtagaacgggtatttctcactgaaaggatgagccacacctttcaggtgctgtccggcgatgtattgtgagttaaagtccataaactcgaatgccgataggatttcaccaagttccttcttcgccttgatgaagacctcctggaccctggcatagttttctagagcgagaaagcagacgttgaatgcggttggtctaggcgggcacaagatagagacaccggtgatcacgccaattgtcccctcagagccgatgaagagctgcttcaagtcgaatccggtgttgtctttccgcagggcatccatactgttcagcacctcaccgttcggtagaacgacttctaaacccagtacactgccatggagggacccatagcgcagcaggcgcagtccaccggcgttcgtcgcaaccagcccgccaacatgacaagagcccttcgcgccaaggtccaagggaaatagatagccccgttccatgaggtaggagtccgcgttctccaggataactccagcgtcgcacttcaggattccactcacagggtcaaagtcacggactttgttcaactgggccaggctcaggacgatttcatcaaacacgggaaccgaaccacccacaagcccggtatttccgccttggggaacaaccgctagacgctgctcattgcaatatctgatgattgcagccacctgctgcgtactcttgggccggagtaccaactttgactgaccgcggtactttctcatccaatcctcgttgtacagcgcgaggtcctcgccctccccggcctgcaatatctcctgttctgacagaataccccggaaaaacgcaatgtcctcctccccaagtttcttgtatctagcgtcccgcacaagtgtggggtatgtatccgcagtgagatgggcagcgtgggttgcgtacccacatgtgcggccaacgctagggcgcagaacacttctcgcccataccgcagatctacaccgtaaggcaatgccacgcaccgcagtagtttttaacaatgtcctcgccagcatgctaaccgcaatatctcacctgcaaagcttgacagcttttactgttcttcgatgacgaacatctagaagataatgggtaatagtcatatttcttcgacgcccgacacgacgagaaaacctgacaccacagagcccaccataacgagaagccactaccagagtcacataactggaatacacaaatgcgttttagatgaatctattaaccttcacttgtaattagttgttaccaattatcacgtgaccgacgtacatgatgagttaccgagaataggctcacgtgactccagatactctacgagcaagcctcatacgctggttaaagcgtaacatatcttgctaaaggctaagcacatcagagaacgaccctgtattccctgttttcgaagtgctgcctccgccctcatggtaagctcttttgtcgtttctttttttaaatcaaaattcgtcgcatcgcggtgcctcatctcagacaaccccaagaaaccatctctggagagcagtcgattagtgttgcagccattgtgggatgcacttaccatgttcgagtctccgatagtctcatatagtaagcgctctaaacagcagcgagcgctcaagtacaagtacgttagctgtgtgagaagaaagtacgagcagctgaatggcctctccgattcagataagcaagcgcatattgattccgcatgtttccccacgcccgataacagcgctgcagaggctagtgatggggatgcgctggaaggggacgtcgataccgcagctaggcgacttaagcggaaaagactgagattgcagagcatattggggcacgctactctggacgcagaggagggcgatctcggcagtgaggaagaagatgatttgaatggtggctccactgcaaaagactacgagaagcagttttttgcaagatactacaagccggaatatacctacgagctttgggcgacctcgcccaaaaacagggtacccataaggcggaaaatgctaagctaccaggcatttaagcagatagaaaattactcgaaccagcgcatgaaagctacgctctccttatccaccaagaaagcagcagcttaccatgaggtgatgcgcttaggctatgaaacgtgcccgaaagaggaggttactaattaccaaaagctgcacctgaaccaccttgtgggtctactatactcaaatatcattagtgaaaactgggggacggcttacaggtgttttgctcttctgatccgtatgaaatctgtggatttgcgctctatatggaacctcggatcacatattctgagccatctaaacttcgacatgcatgagaagtttttagaatggatgggaacagtctttacttcacattctgtctttagtcagaacaaggtaaacttaattgatcctgtttttaggtcagggtctcgtgcacatacacctaactttatgttggcatggctgtggctcgtcctgagaggagccaccgccgatgaggtgcttgattccaccagatcgatggcatggctactggaaaaagtatctgagcttgttctaaggccgccttacatggacgatgcagaaatttggtttttatatgcaatgtgttactttatccaagcagataaattgtctgcccaattggcatcccacgagggcatcaaattgcatggttcaaagcttgatatagcaaagacccaagtgacccaatatatttgcagtgtcaagaactgtttggaatcatgtagggagaagggtaattttacttatccggaacgtattattcaagagcaactgctggagtttgaaaggcggttatacgctggtacacataaagagcagacggatggtaattcatttgatacctatgaaagtgacactggagagcagaacgataatcctacgatggtctcagagactgatttccatgatccaaatttccggaacttcaaaccagatgtggccgaagatgacgatactgcctttggagaattgcctacgcgatttgaggtggattcggattatgatagcagtgaataataacatactacatattatagcacatataaagctctattagaacctggagcttctcatgcgactatactttaattttacattttcataagtcatgccacattataagttacttagtaaactaccttctatatatgtaattcatggcaaacttcaacattacacctggtcggttttgatccttttcgataattcttcaactctgctttctaattcctctacttttctcttcaaatgctcgacctcctttgtctgttctagttttgatgtcgcaatcacaaaacatgcgttagcaggcgcatccttggcagatacagtcacatcaacctgagaactcgtaccctccagagagccgggaagtgagggtgatggtattcttgaatggctctctgaagcgttatctggatcatctgaatttaccatattttgacgtggatacgaggtataggaagccatccattgcctatcgccttggctatcattgaggttaaagaaaaccttgttatcagccctgaattcaatgggaaacgctacccatcctgcttggtctcgctcctcgtggctcagcaatcctccatcatacgcttgattcatacagtttccggtggtacccctgcgaactgcagtaccttcgtgtagcgagattgactgcacactcatatcctgcataccgatgacatctatgtgttcgtcaataccacgttcttgaagtagatctgggggagtctgctcgcgcgcctgagtagtggcatgtgaattactatcattagcaaacacagaaagccggcaaatagggcatgtctgtgatctttccatccagcttttgagacatccaaaatgtagcatatggccacaaggcagcatcttcgcacgtctattcattttagtcgtctcggttgttggaagcatatcgtccatacaaatgatgcacatcgagtccgtgtcatccaactgctcctctgatacatcagatagcttttcatacagcttcttattgttcttccagtagttgtagacaagcagaaagctttctccagcttttatgctgcgcacaaatatactgtagaccacagtgatggaccacggcacaaagacctcctgtataatgtctagtatcaccttcaaaactgttatcgtcaaatcaaacactgtctcgtatatgtacttaccctcaaggataaatacctcgtcgtctgcatcatcgtctgtggtaccgccctcgtacactagattggcgctccgagttctcctggagcgcaccatctcaaacaagttcaaacttgttagcagtacaacatgtagcacatcgagaatcagctgagcgaacgaaagcgccagcatcaaatacaggtcatggcgcttcccatcaacatttgtattctgcacacagaacttcagcatcttatagtcaaccatgcccagcactagcaaactaaacataaatcgcgagcacagtatacccagcagactcgagtcggtcccgtgcacctggaagacgaagtccattcggtcgcgcagcacccagtgggcaactaggcaaagggtataaaacaaaatggtcatatggcccgccatgtacgttttgcgcatcgtaataacgatcgaggctagagttaccagcactacatgcagccgctcaaatatgtggtcgtactctattgctgtcagctgtccaaacagtactcgtattattgcccacacaaataggcagtagtgtactataagaaagttgccccatatcacaaagtggacgccactgctcgccataaacaaggcactcaaggggtcatcaaagctcgttgcacagctatacgccgaccatcccgccaaggcatacgtcgctgttataaacattgcccacatgggccaggaaacttcccgaggcatcctctctctatatgacagtggtcttataatactacctttcaattccttctcagcagcgcacgggtattttggttgccggagagctctggggggattaaggaggcttggaacttgagatcatctagctatgttcttctgcacatgatttccattttttagcaacacctctgcacctagtccacagcactggacaccggaattcacaagggtagcgagctatgagtgcgcttgcgtttaagctaggggctctactgatcaggcaggtcacaagacccgtggccaatgtgctgaagcagcaggcgaagcagcattcggccttcaagcaggtatgcatacggttagcgcagcagatgcatcgggcagacgtgaagctacggtcacggctcacgccggtggcgcagccgaagaagatacggccgctcaatgatgagcgggccgtcgagaacggggcaacactacttagtgagctctttgtattcggcgtgaccggcaccgttgtggtctgggaaacggtccgacagcgcaacaaagagctggatagacgcgagcaggtattgcaggacatcaaggagctacaggaggagatcgacgagttgaagcgtgctctggcggatcgcgcgtgagaactcgttctgcaccccgggtcgtgtacagtctgatatattcgttacatacatgtcaaaatagcatccaagactgtggtagcaagcgccgcgcgataacatgcaagcgagactgcgcagcccacgctgcgcagccggtatggtacaggcccctggccgctcatttgtgggtcttcttctccactttcaacaacaatgccttgtttatgtgcggaagcacaccgccggacgcaattgtcgccctgatcagcgagtccagttcgtcatcgccgcggatggccagctgcagatggcgcggcgtgatacgtttgaccttcagatcctttgcggcgtttcccgccagctccagcacctcggctgtcagatactccaacacggctgtgagatatatagcggccttggacccgacccgcgtcttacctgcggcgtttttcttcaagtaccgcttaattctaccaacgggaaactgcagacctgcgcgcgcagaatgcgattgcgacccaagggggcctccgtctttcgcgccggacttacccttgccaccgtgaaccttccctgacatatctgagctctaagcaaacgacaaaagaacccttcaaagatctttgcgatggaagatgttgtttgttgtttaccaccttttgacattcattgcaatgtgtcttttttcggttatgtttatttattatttataccaaacaaggcataacggtgatcgcttcgtacgaatcacgtggttgctggtggagatttgtttcgcggttgggagccggtggcgtaccggtccgcgcgctgcgtgcggttgtccgtcgttcgaggcacggcagaggcgcccattccggaccgagcacgatgccaggatgcaaattgatgcagatacagagatatctatgacgtaccgggctagtcccttattcttgcatagcccttagcaatggtattatttacgccgacgcgcctgttttcgagcgcgtggagaaggtcacgcatgactatgcccggttcctcgcgcgcctctcggaacttgatgcccaggtcgccgcgcgctgcaacagcagaagagaccttgccggggttcttcaggtccgtggcgttgaccttggagccggacgtgagccagctgtactttttcttcccgccggcgatcatcatgttggccgtggcattggatgcgcgatggagcgtctcgccgctatcgagcttagtgtctgtgatctctttttccaggcccagcgctatgcggcgcttcacccggcgctcttcctgttcgcgctgcttgagggccaggtcccgcaggacccgtgtggtttcgcttcgcctccccgaattgagcttgacggccttgcgccggtggcgggagatgatgatggagttcgtgatgatgtcgcggatgtagagttcgcatgctgtggacatcaggctcagtagttccgagctcttggagaagtcctggttgaagttctgttcggcagcgacctttttcatcatgctggctacgtgggagggatgcaggaacgggggatgcagcggtatctggctgttggagacctgcgagttggacttcattgtggtcacggtggagctcaggagcgcctcctcctcttttatatccacgcctgcagacagcagcgcgtcgctcagcttgtccggatcgctctgctgcttgggggcccccgcccccgcggcccgtcgcatgcctgcccgctgcatcttttggggcgacttgcggcccgcgccgctgcccgcgccgccagcaggtagcgctagtgtggttgccggctgcccgctctctggcagctctgcccgattactctgttcatcctgccccacaaagttgtcgaacggcgtgggcatgtcgttcgaaaagtctgagcccgtgggctctacctcctcggcgtcgattccgaagctgaatccgtcctcaccttttgtctttttacctccggcgcccgtgtcgccctgatccgctgccttcggtgacttacccatagcgaatatacacaagttgtctcgtacgacctttagatcagttcaaacacgctggctagtcaccgaaagacgcctatactgtcgccctttgcccctgtgtgaagcttgtttatcgccgtaacaagcgaagaagctttccaggtgaatttttacttcacgggagtgcgggtaacaggcgaccttagcatcaaaattttcaccagtagcaccgccatgagatgagatgagcagtaccatcccaacacaaaacaggtgcgcgggtcctagctggtgacagaggcttcgaattcggtagcaggatgtcttcaaaatatgtcacattccgtggtgccacgaatttccggcacagaatagtgatggccactctgtcgggaaaggctgtgaagattgaaaagatcaggtccgaggacatgaatcctgggctgcgagaccacgaagtatcgtttctgcggctcatagaggccgttaccaatggaagtgtaattgagatctcgtacaccggtacgaccgtgatatataggcctggaatcatcgtaggagggtcacacacgcacaactgcccgaatggcaaggcggtgggctactacgtggagccgctcctgtacctggcgccattttctaagaagaagttttcgatcatactgcggggtgtcacgtcgacgcaccaggacgctgggatagaggcgattaagtggggcctgatgcccgtgatggagaagttcggtgtgcgagagtgcgctctccacacgctgaagcgcggggcgccaccgcttggcggcggtgaggtgcacctggttgtggactcgttgattgcgcagccgataacaatgcatgctctagagcgcccgctaatttcggccatccgtggcgtcgcctactcgaccagagtcagtccgtctatggtaaacagaatgatcgatggcgctaaaagcgtgctgaaacaggttccatgcgaggccaacattactgcggacgtgtggagaggcgcgaactcaggaaagagtcccggatggggcatcacattggtggcagaaactaagaaaggctggaggtacttcacggaggcgatcggcgacgcaggtgaagtgccagaggatattgggaacaaggcagcatacaaccttttggaagagatcagtagaagcgcggttgtgtgccggtcgcagctgccactagcaattgtgtacatggtcattgggaaggaggatatcgggaggctcagaatagccagggcccaagttgacgaaagcctggtcctccttttgagagatatcaaagaactgttcggaacggaggccctgctgaaacctgctgacgatgacaccgacgacctgatcgtcacaatcaaggggatcgggttcacgaataccagcaagaagatcgcctgatatcgacaggcacttttgtatattagcagtattcttgacgagataatgcagtcaactcctatatagaaaccggatacagtggtaaaaacgcaaatgtaggcaattatatattactcttctcgacaccactaacttctcgatagcggcatatcttgtaaatttgcatacaccttttcccaactttcagtggtctcgttggcgtactttacatgcatcttggcccattcctggaagacatgtgtgatacaaaattgagtctcctggaaaattacaaattcctctaaaatgcactttctaattagccaggacctgtttagttgctcagcaattgtccgtttgtcccgttgaattgtctgtctgagtttatcatattctgcacctttaacgtccggattactctccatagattgaagtttgtccatatttatttccactctcctctgcaaatgtgctatgttattccccgccataattttatacctatcaaagacccccttcagtgctataataatatctatgaaggtcttaaacttcaccgataggtgttcctccacttcctgacgctccttcttagaggtatcggccaggctattgagatgttttgatatagtggatatatgagagttaatatcatgaatagtgccttcttctagtgggtatagtgttaccgaattatcagcaaattcctcaatcacgcggccaagcagccgccgctcttcagacacctgcctcatgcgccgttcgtatctctccacaaggacggaagtcttaatccatgactctagcagctcatcaatcttcgcatcggctttattccactggttgctgagctccttatgccagagactgataaacgccttatcgatcttctggtcagtaaattcctcagtagtgtcatagtttgcctgctttctccaacttcccaagtccgttggaacagttagaaacgtcagaactaggtcgtcctgtttgagaacgggatgcataataacaagattaataaaacggcatagacccttacgcctgcgagccaagaagatgggatccgcgttctgcgcccctatcttcttgggaggcaactcggggatcattctgaaaggatatttcttcaataaaacttcctgaagccagttgaagtcggagtagcgacgaatgactgtctggttggaggagggattcgtatttggtaacacaaccagatgtttgaccaagtagttcgtatgtttgaagaggatgccctcccgctcggggatctcttctaccacgacgatgttcttggctaagggattgtacgtctttcgccgactattcatccaattctcaagatcttcgctgtgtagttcgtcgcacatggagctctggctggctactggtgccatcgaagtatctagcccgcttatacttgcgtctagttgtgatggtggcgctccccacactgtctgttccaacgctggcgtgccgggctcgtacatctttcgctcattgtaattattacgcatagtctccttcacctctgctgacagcgatgaatctgtcaatgtgagcgaccccaaagattcagcctgtcgaacaacgggtgatactatctgctgcgtacgagcgctatcggcgggagttcgttgtacactggcccacgcgttgtttggtgattccatagaaggtccacgcccccacaactcttgagaatccaaatccatcatgtgttgcaaaatccagtctttagatctttactgtggttgtctgtcacttgaacgtgcagatgagaaggttgtctgtgacggaaactacccaaattactctcccttttaatgtcgttggcgtttacctctgaagcaacgtacaacgaaaaagaagtgactgagagctaaagaatatgtagccttatacatactacgggtaatgcatgcagatagcgtgatgactgagtgttttggcccccgggctatgctctcgcatcggcagagaagtcctgtgcatcgtctctgtgcgggagcgattcttccgcggaactgctactctctacgtcggcagagacatcctcgttaaagtccaagttgatccagctcggccaggcagcctccttccgaagtaagttcttgaacacatcggacagaaattgctccagcttgcccacgctccgcaaaatggtgccctcgctcagatcctggggcccaatttccgtctgtatcttgatgctccgtatgagagatatcctctccacggccttggaccccagaaacgctgggccattgctgtccagcggggactccacgttgtccagcgcaggatcgctgacatcgcacaaaaaactgatgaagagttggcgctgcaggtatgccaccagacacagggagtggatgccaatatcgctgatcgtgagcttgacgggcagctgcataaagttggggctggggtagttgagcacgagctccgcactcagctctatcagcatgtcgcccttgtaatccacctccatcagaaactgcacgtcggtgtcgcggccgccgatagacgcgccctcaagccgcaacgcctcatagaagtcgtccagggggttgtctatctgcttcagagtgatgcgtgggggtattgtcccgagtttgaaatcggtcattttgatgttgctcacataactgggcagctgcagcgattcgagatgctcattgagaaaagcgcgggctcgctggttaatggtgctatcctcgttgatcttattccagtttatatcaaatgacatgactcggtcgtgtgcccatgtgagtcagtacctctgcagtcgtaaggcagaggacgcgatgtcaaaatttttggtttccaatgcaatgcagaatgtaacatacacagaagacttcgtctcggaatagtgcgatcgcgccagcgctttgcgaggaataacgggatgctccggtgtttgataagccgccctcagctactgcctacaaggctccctctggctacgccgagttgtgtatccagaaggacatttcttgggttcaccggcggtgacactaaggagcagcgttatatcctcaagagggtcttcaacgcgccgctgcactacgtgtaccctgcagtgtcggaagtgtccctctataagcttttcattccttactgcacggactctttcgttaataagcggaggcctggcgataacatgcccaccgaggcaggccttcgtgtaggcttccagcagtatgacgagacgttcgtgtgccgggtagactgcacgacgctgccggggaaccagcgaagcgtggttgcagagtcgctggctcaccacctattcgaaacgctgcatacacaatggctactctcgcctcaccctaccagaccggacgcctctgttgtggagctgatcctgcggttcaagttcaagtcacagctttacaacagtgtctcctcgatctttggcacgcgcgtcacgcaggtggtcatgaaggcgttcgagaagagagtcttccagctgcggaaagaggccatggacaggccgccgaccggtgacgctggccactaaaacagtcatatctatatgtataaaactaagtctaacgagaaaagatgatagacgcagcgcggccggttgccggctgcccacctagtctgggtagcacatctgattatatttattcctggacagcaatatgccacgccatgcactgagttcgcttgccggcggaccggcctatttccgcatccgccgcttggcgcttttgttcccgaagtaccaccacagccccaccgccgcagtcagccctgcaaagaaccgccgatcccgaggcgagaagttctgctggccggtgccgtccgagtcctgctgcgagccgccctgcgagtccgagctctgtcgcgaatcgtcctgtaggtaatcgtcctcgttaatgatctcaattttgttgatcaccaccggcgactcaatgtggaggtccgagtccggcgtcaggacccggccctcctcggaggtcgggtcggcgtcctcgtcggctccctgcgcaagatccttctcggacttggtaacgggatgcgacgccgcctcgcgcgacaacgacggaatccggagtatgtagtttttctcaggctgttgcacggctcgctctgtcagcgcgatgtccggcatggtgaccttgtccacgggccggcatacgctggcgctgctcgtgcccgggctgtggaacgcccgccgtgtcccgcgcctgcccagcggtcccttcagctcgaagtcgacaatgcgctcgatcaaatccgacttccgcccggagacctggaggcctcgggagcggcactcgttccgcaaggccttcaggttcattgcggaaaacgcactctccttcttcgctgtcgagagcagcgtcgtctgcgccttactgggggtattgtgcactgtgcgcacggtggtgggataccagcgacatgtggacagcccagggccctcaaacgcaagcagggggagcgggggggccttggtgatgggcttggccacctcagcgatattcttaagcgatggcaacgatttggcccttcttagcgacataatatgttatagctagcctatatttaacttgaaggcttattggtctgcaaggagctgacggtgatgtaacggcagatgcgtgtataacgcttttgtttttgtctccgctatgtttgttatgtattcccgaaggggccattacatttctacttcaggagacaaagtccatccaggtacagcagatcgaccataaaccatcgctaggcgcagcggaccgttgctacaactgctgcacgccccccagggcgtaggccgcacgccggagcacgcgaagcaccgccgcgcgcacgtggccgcgctgaggtgcacaaaaggcctcaggacacgtatgcccgcggaaaatagatcatattatatctcgttatttacagttggttagtgggcgctcagtactggcgggaggcttcctggcacgccttcaactgctgcaagtagtagtcgcagatctggaagttgccgttgttgtcctctaggcagcgcgtgaagttgcgcgcgtcggtgtcgcagtgtctggcctgcgtctggaaggtgtcctgctgcactggggctgcggcaagctgctggggctgcgcctccgcaggagcggagccggagccggagaagagcccggtgaggcccgcgccgatggtgtggccgaccgccgagccgaccgccacgcctgcggcagtggaggccatctgtgcgaacaagccgggctgctgtggggccgcctgtgctggggcgtgtgcggctggggcgggcgcaggaggggcgtgcgcggctggggcggccatgctggacgccgagcgcgactgcacgggggctggtcttcttgctggtcctctggaacgtgccatgctgatgctatctgggttggagtgggatgtctaacgactaacaggtactgtcaagtggcaaaagagagatgcagcgatctaactaagccatgtttatagaaaaattttgggcgttgatgcggacccggggaactatcggtgcgtgacacagcccccacacaccacagatggccggaatggcgtggatggtgctagagcattcagccgctggcccagcagtagtgctgggcgtcgtagcgctacggtggtttgtcagtcgacattttattattacatttgcgtacattgcgtatattcttttgcgtctgttcgttattactgtagtccatggcaggacctcggcgcttatataaggccgtagccgtctagtccagcgaggtcgctggctataggcctccctcagaatctgtccaactatgcggttggaggcaggggagccgagctcttggggatgtacttcgtgctcgccatggagtgccgcaacggcaaccccgatgcggccctggtggaggcaggcgccggaaaaggtaggtctttcagcgccgcggtgggcgtgagggagagcgtgcttggcgtgcgggtggacagcatgaacagcttctggtgttgtatcaagtttgtcggcgatatgtacattgaagcgcggttctccaagctgcgtctgttggcatccttgctgtgctcgccgccgccgagtgaggacatcgatccgagcgagtagagacttagtctgttcagctggtccatcttgcggactttcagcacgagatccgagtcgtagggcgcggagtccgcgctgtctgaggagaggttgtatagcgccgcgttctggtatcgagaggccattgcctggaagcgatgttcctttctggcgaagtaccacgagcggaggaagacaatgccccaggataccaggaatgcggtgatgacgacgcagagtgcgatgccgaatgctaagaaaagcatgcccgaaggcaggactgatttttgaatattctgattattatgcggagacggaattcccggagtgtactccattatatgcgtagtctgacttgcgatttgctgatttgtatatgaagcagggatttttgttatattggcgtgtgctgccctattctgttgtggggctatggttgtcacgcgccttcttgtgtcagtaggcctttcagtgggtcttttaggtatgggaattgatgttattgatcgatggtatcgtattgggtgtctgggattggttattattcctggggtggttgaattgaaccgtcttccgcgtactgttgagatagctaatacttggcaaaatgtgcaaggtaacaatagtaggaggagcagccatgaattatttatagattgtcttgatatgtgaagtttcatcgcgtctgactcgattgtatgaaattgacagctctgacgctattgtgactgcagctctgatcagcatgaaaactgataaatgaaacctcgttccgttaatatatttctaatatacccagctaatttgatggctattaggagatgataacagtgcatcttgccttccgtaaggaagagctagtgagacgtggagagggtgtagcctcaacaatagatatactttgttgcgcgaaataactaggttaatattcaccaggactcaaaactctccgcctgggtgaaaccgacgctgcatgcgcaatcaaagcatgttgatatatatgtcgaggtctttctttgctatatatgtcgtggtctttctttgctatatctggtaaggcttcgttagcggcgcgcttggcgcctcgccattttcttgacccaagaaaaagagtatttggtaatgcaaaattaacaaattgccgcttacaacaatgactatttatctaaagcaagatatggctacaaatgaggatatcgtgttaccgttgtaagcggttagtacggcatcagcgtaaaatagctttaagtcggcgctatttggtaggcgccaacaatagcatgataagagagcctgtgacaggtaatgatgggaacactagaacctccagttttcgtctgcagactcgatggcccacttaaacttctccctcagggtcttggtgaaaactttttccagaggcacgtcgtatttcttacagaaagcaacactgagccgtggatcaatgtaactaatcttcgatgtactcaatgcaacagtcgaattgtcctccttatccttcatttgaatagatgttgtcctgatccgctgttcaagcttgtcaatctgtgcctttagcttttcaacagactgcaacgtgggtttcacagttacaaggcctgtctccaactcttctacatattcttttcccatctcttcaacatcagcaagccaactttcaagctgagattctggtaggagctcttccccctcgaacttccttttttcgttttcacgagcaaatttcttctggtacttctcgcgctctcgttcaagcaccctcttgtgtatcgacatctgctcctctttcgtcaagtcgttaatctctttgaagaactttgggtttgccttcaactcagattcgtccaactgcagaatggctttcttgtatcttattttctgccactgatactcttcaatcttctcagtggccttttgcatcgactgcgcatgactgcgtccgactgtccgctgatggttacacaagatcgcaactgctctgttagcggcattgtatctcaccattttttcagtcacgctgccttcgttaggtatcaaatcaagttgatcctgcattgtcttggaagcattgtaggtacggaatacctttgcggtaagacccggcatgtagttctgaagatgcttattcagaatcgaagggtccaatctgtcaaaaagttgatgaccgggttccttagggggtctcttaaagatggaaaggttcttgaatacctgcttatccacctcgacctcttgatagtatcttatagaatccttaccaaggaaatcgaagacaacggtgttgggtggtttcagagatatgtgttcgtatctcaaagagcagcagccaacggtgtcggcttcatcttccgatttctctcccccggctctaagggcaaatacatcgataagataggttgcaacggctatctgtctgtccaacatcaccttactcttgaggttttttctgtaatcagctctgattatgtcaatgtagtttttcagttctctagacttttcgaactttttaaagtcactcatacctttcagagaagagttagcggccagacggacgtacttgaaggaattggaaatattctctctccacatacagagccactgaacggtgttgtcgtgcctgatctcgccccacttgtggcccgcgggcggctcgggaatgggagcgtccttgtcgaggttcagcacaacatcctcgggctgcacacggcgcttgagcttgcccgtcttcgggtgggccccgcgcccccggaaaaggtccgggggttcaatcttgaagttgcccacctgctctttccgaccgtctaggtagcagaacttgtacggctcctcctgtttgtccttctcctgcttcaaaagcttcttctcgtgactgctcagttgcttcttctgatccttctgctgctgtatgtacgcgtgcatcttgctgaaatcgcacttgctgaactcctgtatgtcgatcccgttgcgcgccccgccatgcttattcaggaccgacaggaaatcctcgaagaagttcttctggaaaacagggttctgcgcatggtccgactgcagcagcgctgcaaagaagcccgccacctcctcggcctccgcgggtagctccaccgccttgccgccgtagtacagccgcacgtgcgagggcagcggcgtgtattccggcggaaacatcacgccgttgtgacgcaacgtcacccatttcacgctgtcgtccttctcctcctcgcgctcccaccacttaaactcctccgagtcctcctcgccgtccacgctgctctccttcttcgcgtccctgtcgccctcctcctccttcaccttgcgcgccggcgcccgccgcttggacaccgttttacgtttcttcacctcctgtgacagcacctcctcctgctcgccgctgctgctctcctcctccttcaccgcccgccgcttgctgccgcgcgccggccgcgccgccttgcggcccccgttccccagcggctcatcttccgatgacgaatcattcttcaacttcactgtcattgtctatctgtcggttatcgatcgtctgctacgcaaaacaacgaagatgccccgctcgctgccgaattgagaagacttgtccgtgcccccaatcgccacttatgtatcagagatacgccccaaccgcctcgataccaatgctagtggtacatctccatagtatcaaaatatatattgattcgagtgggcaacgcagagcgtgccgtgagagaaaaagaaactacgattatgtcaacgttttcaagacgggtaaccagattccattggggcaaaaattagtttgttgacatttttccattttgagcggattcaccaagtgtatgtcttctccagagggaagcaatagtaagaattcgaaagccgatccatataacggaagcctgttcgtcttccattctgtgatttagcagcagttgcagcagctagttgggcagcactgcgcgcgaattggatcaaaacacaatcaagtatgtactgcagactttgcctttgccagtcgtcgcctccagcagagctcgtcgggcctgccctgaacaagtagcgacgcggcgcggcggttacgagcgatgactgggggagggtggggccagggcaccgatcgccgctgcatcgtttcctccgtgcgagcctgtgttcgcgttgggcgggcagcgggcgatgtggggacgggcgcacactcggtagcgtaggacaattgctaacagccagacgacaggagcaccagagacgcaggcagacgccggtggaggacgatacctttttttctgcacgcaaaaaaagacaagcgagcagccgattgcaggcagagggtacggcgtcagaataacgtctagcactccagattgtaacaattgacacaaaagcccaggtccgaactctcagcgggattggcctggtttgcgcagccatatatagccaggaaaaagtccggcttattgagaggttctgttgtttttgccgctagggctagagcagcaaagcaacatacagtaatccgccaattaatacccctcttcccatccacacaactgaaagcactatgtcagcgccgcttcagatagtcaatgaaaagcagttgaatacacgttcgaatgccaacgttcatacccccgtgaaacagcatcatgcaaagcgtgccgatctggagagaggtcatcatgacaataaccgccagccgccgcagaagaagaagaaggaaaagctttctgcgctctgcaaaacgccaccgtctttgatcaagacgaaagggcgcgactatcacagagggatgtttctaggggaaggcgggtttgcgcgctgcttccagatgaaggacgacagcggaaaggtctttgcggcgaagacggtggccaagatctcgatcaaatcggagaagaccaggaagaaattgctttcagagatccagatccacaagtcgatgaagcatccaaacattgtgcagtttacagactgctttgaagacgatactaatgtatacatacttttggagatctgcccgaatgggtccttgatggacctcctaaaacagcgtaagcaacttacagaaccggaagtcaggttcttcaccacccagatagtgggcgccatcaaatacatgcacagcaggcgcattattcacagggacctaaagttgggcaacatattcttcgacaagcattttaatttgaaaataggcgatttcggcttggcagcagtacttgccaacgaccgggagcgcaagtacactatttgcggtacgcccaactacattgccccggaagtcctcacgggcaagcacacggggcactctttcgaggtggacatatggtctattggtgttatgatctacgcgttattgataggcaagccaccctttcaggccaaagaagtcaacacaatatatgaacggataaaagtttgtgacttcagtttccccaaggacaagccgatctcttctgaagctaaagttttgattaaggacatcttatcgttagatcccttggaaaggccgtcgttggcagagataatggaatatgtgtggttcaggaatgtgttcccagcaaggataaatggtgatatattgaactttgtacctgaatttcatgatttggacctacaggaatcactaatcaacttcaaaaactgtatggcgaagtgcggtctaatgaacccgtcagcggcagcggcagcggttgctgccaaagaatacgaccagcgcctgccttcatacagcaaaaatagtaataataataacaaccagattaatcaaaataatgaacagttgagcgaggcaaagaagtctgtcttgccgcaatccctatcgccaggtggtactagatacaagtacaaggaaattgttgatgtggaaacacaacgaaaactgaatgatctggcgcgtgaagcacgtattagaagagcacagcagtcgatgctcaaacagtcgctagtggctagctccacaaatttcatcaaatctgagatttcgctgcgaatattagccagcgagtgtcatatgactctaaacggcttactggaggctgaagcacagaagcggatgggtggcttgcccaggtcaaggctccctgagattcagcaccctatagtcgtgacaaaatgggtcgattactctaacaagcatggattcgcttaccaattatctacagatgatattggtgtccttttcaacaatggcaccactgttctaaacttggctgacgccgaagagttttggtacattagctacgacgacagggagggatgggtggcgaatcactacagtctcgcagaaaagcccaaagagttgaacagacatttggaggttgtagatttcttctccaattatatgaactctaacttgagcagaatctccacttttgtgcgtgaatcgtaccacaaggacgatgtatttctacgaagattcacgcgctacaaacagttcgtcatgttcgagttgagcgacggaacgttccaattcaacttcaaagaccatcataagttcgccatctcgcagagcggcaaacttaccacttacatctcccccgatcgccagagcttcacgttccctaccgtcgagattctcaaggctgagaagatccctgggcacccggaactcgggttcatggagaagttcgccatgataaaggaaggcctcaagcaaaagtcggccattgtctcagtagcacagcagtagcaatatatacacttttacatactcctaacggtttaatctcaaaccagttacagccggaactggtcctcagacgccaacgtctgcagattccattccgtctcaaaattggacttcagcgtcgccagcttgttgatgatgctgttgcaagcatttttcagcgcctccttgggatcgtagccctctgctgtctgtatgcgcatgcggaaacgggcaaacagcgggtgctccactttgtatgcggcgaagagcacgcgctcatcctccagcagctctgcccggatgatgttgcctagcgtgtggtcctccttctcaaatgtgatgatcacagcatttgcggccttcgtatctggctcgatcttaagcttggactcgccctcgggcagtaggaagagctcaaaacggtctggggcgttcatgtctcttggtcgttactgctggtaccagtgcgcagcaacggtcgtgcgtcttgtaccgatgccgcacgtgatgccgttcactgtgatgacctcggcgtcacgtgcccggagagtgccacggctcatcgcaggcaccgactgcggctttcggcaggagatgctgctagggtatgcgctgcttcaacctgcccttgcatccaggccgggccgagcacgcccccgcgcagatcgggggcataacctgcccactccgctgttggggcccctggaaaccaggacaaacagcatcacatagccaagatatgccacggatattgccctgtgctctcccgcagctgatgcggactccagcgctccattactagcactggcacgtgcggcgccttcgatcacgtggtatctctgatatcatctgcacgtgatgtcaattgttatggctatatgtgtggtgtatggatgttttaggttttgtatgtttttttttcgctcaggtttttctcaccctgattgatggaagcgcacctgtcggtccccaatattcgagaatcttggttccatctgtttatttcttattgcgctaatatcccagcgtactaagtgcatcaggtctttggctagggcaaccaaagtacgtgaagcaacaatagcgcaccgaattacaggtgatcgaaaaacgatccgagcactaagtcttttgccgttgttacattttagggcaagcgtcgtcccgtatagacaaaaataaaaggtcggtagtcactagtaaggcgaaaggtaaccatctgtatatgtcgcagagttggagccagcatcaccaggtggaccatgccggcagtggcaggcctgtggggcaggcgggaccagggccggcgggcggcacgccgcagatgggcggcggcgcggggctgctccctgggcggcgtgggtctgagggtctgaagactcactacacgctaccgtcaatctcggcggcggggctgccgggggcgggagaaccgcatggtggcagtcggctgcccccgatgcaaaatgcgttgggggtgggcggcggcggccctggcagcatagcgaacgggtttgcagtggggcggttagaaggcgcggtgccggtttctggcacgggcggcccgggcagtccgggaccgcaggtgcccgctcaagatggctccgcctatcggccgttgaatgtcaaggacgcactctcgtatctggagcaagtcaagttccaattcagcagccgcccggacgtgtacaaccactttctggacatcatgaaagatttcaagtcccaggccattgatactccaggggtgattgagcgcgtttcaacgctgtttcacggctacccagccctgattcagggctttaacacgtttctgccccacggttacaacattgaatgtccgtcggatcccaatgacccaataaaggttaccactccgtttggaacaattggtgagatccccatcactggtgcgggcggcaaccacgcgcatggagccaacaccgaaccgcgtttacagtcgacgcagaatgtcccaacggtctaccgctcagcagaaggctcaccagcagccattgctacgcctgccacgacgcaggagcagtatgggacaggccccaagaaagcgggtgacgtggaattttcacacgccataagctacgtgaataagattaagacgaggtttgctgagcaacccgatatctacaagcatttcctggagatactacagacttaccaaagggagcaaaagcctattaatgaggtttatgcgcaggttacggtgttgttccaaaacgccccagatttgttagatgacttcaagaaatttttaccggattcatcggctcctcaacttcaatctcaccagcaaattaatggtgcgatggtggcgcctggctttggccatgctcagtccggccttcagcaggcgctgcctgggacgcagccgttgatgcaccagcaaaatctccccccactgggtaatttttccacccctggagatcatcatcctatgagtctaccatctgtgcagggtccaaatgttggattatctcaaggtcaatcaggccatattgttacgcaaggtgtatctaaccagcatatccccgtttcggatctccgtggcgccccggacgcatctttccgggcttcggaatataaccaggtgcaagatgtacaatatatggagcctacggtaagaccggagatagatttagatcctagtctggtgcctgttattccagagcccattaaacctttagaagacgaattgaacctagtcgaagaagcaactttctttgataaggctaagaaatttattggaaacaagcagatttacaccgagttcttaaagatcctcaatttgtattcccaagatcttttagaaaaggagaagttggttgaagatgttagtcactacctatcgggatcccctgaattatttgattggttcaaatccttcgtaggataccaggagagaccaaaacacatagaaaatgttattcatgagaaacatagactcgatttggacctctgtgaagcatgtgggccaagctataaacggttgcccaaggcagatacctttatgccctgttcgggtagagacgagatgtgctgggaagtacttaatgatgagtgggtgggacatccggtctgggcctcggaagactcaggttttatcgcccacaggaagaaccagtatgaagacactttatttaagattgaggaagaacggcatgagtacgacttctacattgaagcgaacttgcggactattcagacgctcgagactattgcgaacaagatagctaatatgacaccagaagagaaggctgcattcaaactaccaccaggtttgggccacacatcggtgacgatctacaaaaaggtgatacgcaaggtctatgacaaagataggggttttgaaataatcgacgctttgcatgagcatccggccatcactgttccgttggttctaaaaagattaaagcagaaagatgaggaatggagaagagcgcaacgcgaatggaataaggtttggagggaattggaacagaaagtcttctataaatctttggatcatctaggattgacttttaaacaagctgataaaaaattattgaccgcaaagcagttaatttctgaaataagcagcattaaagtagaccaaagcaataagcggatccatccactcactcccaaagcgaaaagccaactgagctatgattttaaagagccggaagtgtttcaagatattttatctctggtaatggttttcctagccaacaacaacacgtattctccatctgacaatgagcggctaaaagattttttcaagggatttatttctcttttcttttcttatcctcttcatgaaatagaagagggcctcctaaaaagatcttcgcaaaatggaacaattagccatggagatgatacgaggaaatctaaagaagacccgaaaaccgaaaagcattccgccaggaagcgtgttcgtgatgacacagagcatttgctaagagatatcctgtacagaaacaaacaacagaaggtgaataagggtccgcaaaatgaccaatcttctgaagaatttgagaaggaatctgatatagaagaaaaggagattgtgcgtcaagaagccaagaagccatggcttttaggcagtatcgttgatgaagctgacaatcatggtcatgttagtgaccgtgtgaccttcaatatgtttgctaacacaaatatttacgtcttcttccgtcacttgaccacgatgtatgaaaggttagtcgaagtcaagaaaataaatggggaagtaaccaaggaaatatcaaacagaaaggtagtgcaatttgcaaaggatctcaacttgatttctacgcagctaacagacatggggttggatttcaagggggccgacgcatacgaagaacttctacgtttgtctagaagcctaattagtggtgaattggaacatcaatggtttgaggaaagccttcgtcaagcttacaaaaacaaggcctttaaattgtacactattgacaaagttatacaagccttggttaagcatgcccatacaatacttatggatcacaagaccgtagagataatgttattgtttgacaacgacaggactagcacttcaaccagcaccaaagaccaaattctctatcgcttacaagttcgctccaacatgtcaaatattgagaatatgtttcgcatagagtataatacaacaacttcgcatgctagcatacagtttgttgccgttgaagatctaaccctggatgaaccaaaatccttgagggacaagtggcaatactacctcacctcctactccttgtcgcatcctactgaaggtatctcccacgataatttaagaacaccattcctcgaaaaaattattgagagggatgaagggtatattgacgatggtgatgagcgctattcgccagaaggcgttgcgtcttctaacatgaaggttaagattgatccgctaacatattcaatggaagttgaaccaggttgccatgatattttttcaagaaaatcagtcaataagtttccgacaagggtggatgtcaagaagaagaagtctgcagaactaaagttagtattagaaggatttttgaatggtgagcgcggctggaagagaggtctaactacaaagcggacagcagaggcagaaagacggctagaatacgttaaaaataatggtactttagatgactatgctgaagagattagtacggacacaaaagctgcattgtcgacaactacggatacagctgggaatgtatcgacagcctctttttcttcacaaactgctgccaatgcagctatctcagcttcttccccagaatctgctttgcagtctaataatggcaattctgaagtcacttctcccatcgcaaatgatatctgattgcatcatgtaacatgaacaattcttgtaacactaatgaatagtcggggaagcaactattataaataaagcccagatttacactcaagtcattatatatgcactgtgtaaggaaagatcgctgatcccaattcttagttttatcctaccttaaataaagtgtttactcgacttcaacatcaacaccaaagtgctccaagctttctccccaatcgttataccattcatttctaggagggacagcgataggtacatgtcttcttcggacaacctgttctccaccttgtgtgtctttttcaacatgtgagactgaaggaaacgctatcccatgtctagtgtcgtctggaggccaaggcagcgccaacaacttgtcctgtatagaggtagcttcatcataatctgagatctcatttttctggaaaaccatgccatctgctttggggccaccaaatggattgagccaattaagtggtgagcccatacaattgagcaagtttacccaaggatttatatcatacggaaaattgataacttcatcaaaagagcatgttgaacttgaaagaaattcttctacctccttttcctgtccctctaatgatccaggataaatctcttttaaattagtcaagagttggggaagcaggcgctgatgatagaataaattttcgattctatccatttcccacgcttcaatttgggtccttccgtttactatttggtttttgacacatctcacaaacaataaagaaattgtcaatagaataaacgcatcaaggggagttaaaatagtcagaaatatcaattcctgctttgaaaccaggtttgccgttgcatatctgtttacccaggtaaatttgatgcgcttcacgaaataatgtaataagattccagttgttgctatgatccagaacaaaaatcgaatgaaatggggaaagtttttgtaacccacacaattcatcgtccaagggcaatggtgatccatgactaatacacactggttgcatcttttgcaatggtgtgtacgttctggcttataggtttcgcatttggtacagtaattttgccattcatatctcaaaggtcggaatcctttagtaggtctccctggatttttatatatagctttccagtacgatatccatatcatagagaggctaacttggaaccatagtagttctttgaagctcagaaagttggttagaacaaagaaatgagcgaaatatcccgtgaaactaatgagaaaacagggaatggcgacacctaaccagggccattttacaagcacagccattaattgatcttgaggtatagatctagagtcttcaacaccttactatgatagccaaccccttgcctggctgttcatatgtgggtaagatgtaatgctttggttttcatcgccaaatattttcatactgttccgcgtgtcctcgtagccggagtttgcagagaacactagcgggataaatagagtttagcaaagcgtcagaacaagtatcaaacttgcaatattttatctggatgtaataagtattgaagtattgtttcctagttaaccatatataatattatttaaaattaccagatgctacaacgagacaaataaagcgttggtgtgaacattcttgtagcaagaaagcaaagcccttaggtggcatagcgcagcaattaccaccaacacatgaaagagctggtgcgaatgaccccaaatatcgaatgatcctggtgcaagtctttctggaaaccgaacaccataaagcactgctcccgatatatataagacgccttctaagctgagccactttaactgaatgcgactatacgcctcaataggcccataatagaagcatgaagtgataacaggaaggagtccagataatccaaaagcagtgaagatcgctgccctatattttctccactctctagatctgaaatgagggcttaatgatactaccgcacacgcaagcgccaatgacagagtaacagtagaaaataaagagaacattgcagtactgtcatagaaaccataatacatttgggaaatcatcgaacaagatattagcgcaacaattccaatgtagtcaagcttgtttccgaacactgagacttccaatgaatgagacttcatacaatgatacaccccgctgagcgttaaacaaacaaccgcccccagtagaaatatatctatcataaggtagtccttccaagtagtggtgctatagtctgctaccacatatttgttgaaaagtgcaatgaataggaagcagatcccaggaatcagatgcgagtatatgttcacagattcattgtgtagataaaacaaactgcgaaaagtcttccggtagctattggtttctctgacgtagccgctgaggatatgttcgttatctttttgccagtctggaagatcgtcccaagagcaaaggctgctgacctcacgtattgctctagtcgctgttattgcagcagctacggttccatcctgtaaaaatgtggtctctttggtgctgtaagaggaagcagtatcgttttctggtgcgacgaacttcacccgctgttttaagtcgctgtcattcatggtttggaatgctgtcctacgtagtggactttatgcaaagagtggctgggttacctctttttatgtatttcatagcatcggcgttgatctttcgaccctccggtttaccggtataggacgttcctagacttgaagcaggtacacgtaccccaagattatactatcgatacaatctccgtgcaatcaacatttgctattaataatgaattagctgtcaaagcaccggccactatgccatcggcagccaagactacgtaatttatcgtatatacgcgcttcggttcccgggaataccgaaaaatgctgatctatcgaaagtgagaatatatatataacgccaagatacaagctgaggaagtcctatcctatttaaatgatatgcttttgccttttgaaggcttgtttttcttctttacaccacttggtgcattattatcttggccatacggatcgaattttcttttccttggcctatctttatctcctctttttgcagttgaagaggtacctttgcccaaaacttcctttgcattggagtaatcgaccgtttcagtggggcttgacgaagttcccttgggtttctgcgcgtgagccttcttcttcttcctcaagaccacgatctcacttttttcaaaatctggttcatccttttgaacttcattttgactttcttgcggttcggatggcgatatatcctctgagacctgtgggttttcagaagaagactggtgactaggtgcttcaatatcggtgactggttcaacaggttgtgacgtaaatttctgtagcaacgcatgctttctagtttgtagtacattgtcgccaatcacatgtttctggccattagtgtactctacagcacttggacctgttgcgagatcgctattgaataggagagaagaagaatgttgcgaacaaattgaaccagattgcttctgggcttccattagcagcgaacggaaatgatcgtccaggttttgtatcatgtgcaaagagagtgtcgcagctgggtttgaaagcgcacgctcagaagaggagaattcagccacggaggcagtacccgcctttattgtttccaatgttctttttatcaggttcgccagagtcctagcattagacctgacataatctgtcacatatgtgcttactgataggacacctgcggtttcagagggtgataatgatacaagagatactaggagttgattaggcatgacatatctaactgattcgtcatctcttctcgcaactgtgtctctccactcatatagtttcttgagtaagggctccttcgatggcggcagattgtactgatacatcaacttcctccatggctctgtactttctataggcgaataaacatttgaatccggtatcctaggtctaaaagaggtatattcaaatctcctcttggcaacatttctcgaggcattcaaaacctctgcaagctttccagccttgactaaggcgttccttaaatcatcatatattgataacaagaagtgagtatcagacctcgcataatctctaagtggttttggcaggggcctaactctccaatcggctaattggtactttttagatgtcttaaacttggcgaaagtttccaacaaataagccaagctatgcttcggaaatccgagcgcacgggaagcatggtaggtatcaaaaaggctaacaacgtaaaggccaagatctctttgaagccatatcatatccataaatgctccgtgaaatacttttaccacggtgggatctgtaaagatcacattcaaaacatgcaaatcgtcgcggagagcaatcgtatcgacaagccaatccttgctcctgctactgatctgcattaggcatacaataccataataagatctatagtcgtgatgctctaaatcaacagccaattcttttacttcctttagctcatccagcatctgagacaatgattccacgttgtccacccaaataggttctgtagcttcccatggttgagggtcaatacgctcccgcacctctaacactgaatcattatatggttgtttatcgatttcgtattcatatggatgagggtagtgagcgggaacgttctcttcctcaggtgcaagcattaatgattcttctaaaggcttcagtgcatgaggcttctcttttagtagaggtttgaagggatgcagctctgtattgtcaaccggggttttgaacagcaattgcggcttctcgatacgtttagaaggggtcgagtcatcatgagaactgtcagccaagtactgcatgttaacaccttcattccttgaggatgatccatgttttatgctgtcgaatgcatggtctgatttctcaaagatgttgtccataacattgctcagctccttccatgaatcttcaaagttgtcccgtcctggctttagctcattattattttcatcaacagataacaagagttcgttaattaacgagacaacggtagccgaagtatcatctaattcttgacctaccgaaggatgcaagcttctatagaagtcaatatcctgcgctgaaagcgcagcagcggctctaatggtactgactattctcttgaacagaggatcttcgtcagtggatgccatatcttgtggcttttcgttgatggtatagaaacactttgtttgaagagatgatcatcaagggccataattctctaggtagcgagtttaaccaaaaattttcacaacattacccggaattgagcaatgggattgcaacaaagaactcaagtaatgcactgagctagaagtattaagataagcgaaaaatcccaataaagccatagaaaaatccaataaaaatcaatcgaaataagaatatatggtatacatgctcaaatagccgtgttatgcattttaaacaaattacatataaataaataataattatttaataaacgttcacgtgataatataagattttacaaaacctgtttaatatatatattttattattataaaactcaaatttaaattttagcatataatttattttaatttatacttttaattctaccatttatattatattatttatgtagattttactattttagcttttttcattatcattattgtttgtgttttccgaaaatataaatgttatttttgttgttatatatttaaccgattattttaacaaaatatattatagttttataaacttttaaaaaaacggaaatttaagggtaaactgactgagatacatgctgaatatataaaataaaataaaatgaagaaaggcctaaataccaatatatatatatatatatatatatataacgaagagtgaggtcccagtaaatatcactgagtttaactgttcatttgcattgggtttacatgcttatcatgtttcaatcctcgacagtgtcgaccatctatatagacaatattcgtagtcttatacaaacaaccaactaatgttctgttcattataaactattgaatatagaataaataaatctatcaaataacactttctcatatgatgatgaaaattattatacaatttcccttggggaatgactgttttgagaatttgagtgttttttggacaggattagttgtgtgcacattcctaaatggttaatactcgagtccgagtaattcctcttccttgaaaatgattgcggtgaactattattcacactgctattgttgtccatatgggcagaacgcagactccgtgattcttccttagatgccaactggcattcagacccattattacttgtgatatttggacaagatttactgccatcgtcaatgttaccggggtatgcagtttgaaagtcattacctcctggtagagtcttttggatgctatttgttggactttcggccagagtaaacgataaattacaacttttatctggggacatattgaaatctccgatgagatgaatcatcctatgatagtacttctcaagtactccaaatccattgttcctgtcctgcagtgcacaatctttatccataggtatgttggagtaggaaaatattcgctcctgtctttccagagaacaccttcttatgttatcatctcgtggaagtattctgtagttgaccctctccaaaaactcattctccagcacattaagctcactacattgaacacctcccaccttcgcataatgtgtgttggtacagaacgagtcgcacagacctttgctggcaacggttgtcgctgtgagaagaaacctgtgcaccgtcagactgtcgagtcggaattctggataaacgttcgttagaagatcaatgtaatagacagaagccaacagcacacagtgttccagcgatgaatatttcgtcaacctgatgaggtagttgtacaccgatatcgctggtggcacccgtgaatgaaaccttgtcagttttatcggcttggatttgtcaccttgagcgtcgttcatgccgatcaacgatgtcaacattcgtgaaattagcaccaccaaatatgtccgcgagcaactaaggaactgccgtggtaactccatctctgttacactttccgaagtctcatgagatgtttggaccgacatctttacttcgatagtgcttgtcttctcagtctcagcaaacttccgaccgcttttttttctagagtgagaagtctagctgttcggtgaatttgtttttaccgcggcaatgtatcttgcgttgcgaccgagaatcaaggtacagtaaaacacgcaaaccgaagccggccgacaaagaatccctcttctgcttttacgaatcgcactgttacacagaccaagagcctgataataatgataatataaccccaattcacaaaaaatagtattttttgtcctcctttcttgacggcttcttcggtatgtcgtcgccaatcgttgtatttatatacgtaccttaaaggcgggtttacagcaggccgaaagttgatgccggcataaagtctagtggcggccacgtgctcagtggcactagatgtaaaagtagaatggcaccaatatgctaagccatagggctccggctgccggtaccgggttccaacgctctttcgcgataaatttcgaagctctgcaaaatggtagcttgtctgagcacgcccagttctaaataggtatgtatataaagggagacggaagtcctctatatgagggggtcggcagctttcagggtgaggcgcgagaatggtaatgagcattaatatattactattacaatatgtatattttatctcggcagattcagttcctcctgggcctgtgcgtcttggcttctgcagggaatcaccatatgtaacggacactgtaaggggcgaatgctggcattcaacaattacatgagctgggctccccgtccaactggatattgatggcgtcgttgaaatcatcttcgtacgcgcctgcgtccgcctggctttgctgtagagcactgcgggcgatctcctcgaaagcgtcgtcgacgttgatggcgttcttcgcgctggtaaggaagaatggaatgttgcccaaagacttcgccaactcctgggaggtgcgagtggtgaccacctttttggactcctccacgtcgatcttgttgcccaagatcacgaaggggaaagactcaggcgatggcacgttggcgtgcaccaagaactcatcacgccaggatttgacgttttcaaaagacttcgcattggttacgtcataaactagcacacagcagtcggcccctcgatagaaggctacgcctaaagactggaacctctcctgaccagcagtatcccaaacttgcatcgtggccaccttgtcgccgtccaccgtcacctccttggtcaagaagtcggcgccaattgttgccttatactgctggctgtacttatcattcacataacggtgcatcaaggatgtcttgcccaccccggaatcacccaaaatgataacttttagaatgttcttctttctagatgacatttcaatgcaagacggttatactgttgttatctctatgcttgtagagccgcgcccctgccttggtctcttatatatggagatcttcgattatttgtgaggccaattagtatattaattgcaggtagttgcaagcccggaagacggtgggtcctttgcggttcctctttttaggtgacccacgcggtagggtaacacgcgccaggtcgctgtcgcaagacggccgcaggaagacgcagtgcgaactaaagcccatggtcatttgttgggctaatttgtttgctcgccatctcttcgaaattactggttcggctggttcgcctaatgtagaaagcgcgtgctgagctacagcacgttgcactgtggattgatactaaataaccgtcagaaatgagctctaaaggctacctactggctaatggtgcgacctgtccatttaccgtatgtatgcactggctacaaatttgggaactagcatacggtgggctatctgctggtaccaagcagcgcgcgaatagatgaaccaagggagactaagagacaagccgcgcatggagggtgctcctccgtcgaaagagccaggacagaagggcatagctacggacgctaagaagcctggtttaaaagaagcgttcttcgcatcgccactgtacgactttctataccctctaagaccggtaacgaaccaatgggcggcgaagtacatcattgttatctttgcgcttattataaggctagcggtgggccttggaggatactcgggaatggggaagccacccatgttcggggatttcgaagcacaacgtcactggatggaagtgacgcagcatatccctgttagcaaatggtatttccaccagctacagtactggggtctggactaccctcccttaaccgcgtaccactcatacttgctcgggaagcttggttcatacatatccccggagtggttttcgttacatgcctcgcgcggctacgaaagcgaggacctcaagtcatacatgcggctgacagtgatattaagtgagttgtgtttctatattccagccgttttgtacttcacgcgctggataggaagacgcaggcagcaatcgccaattgggcagtatattgctggtgcggccatattattccagccggcactgatcctgattgaccacggacatttccagtacaactgtgtcatgctaggtctaacagtatgtgctattaataaccttttggaccagtattatgctttggccgcggtaaattttgttttttcgctgggatttaagcagatggctctgtattacgcacctgttatgttcgtgtacttgctgagccgtagcatttattatccgcgactgaatatccctcgcttcgtcgcagtagcagtggctactctgattgcattcggtgtattgtacgctccattgtatctattgggcaacataagtgctattttccaatcaattcaccgcgtctttccttttgagagagggctctttgaggataaggtcgcaaatttttggtgtgtcactaatgtactggtcaagtataagaccaagtacaccacctcacagctcaagtttttctccttggtcctcacttccgctgcaatgttaccatcgctgattattaccttcctctacccgaagaaatttatgcttccgtatgccttggctgcgtgttccatgtcgttcttcctttttggctttcaagtccatgaaaaaactatccttgtccccttgttgccgataactcttctttatacttcgaccgactggaacgtcctttccatggttgcatggattaacaatattgcgcttttcaccttatggccgctgcttaaaaaagatggcctttctcttcaatacgccatcatgtttcttctgtcgaattggctgatcggtaacttcagctttatcacacccacctttctgccaaaggtcttgacaccagggccatccgtcagcgatgttgcagatggatatagacgtaggagcctgcttccaagcaacataatatggcgcattataattgtggtatcttatatctgcgtaggggcaattcacatcgcagaactgtggtatccaccttctcaacgtctcccagatatatgggttctcgcaaactgcctcgtggggtgctcatccttcgcactgttctggatgtggaacaattataaaatgttcgcgatgcggaatagtacaatcagtgatctatagagtcagtaaattttgaagttcagccactcggcttcgatgttgcttgcaaaaggcgactttgactatccaaacggaaatagttgcacacacccgactccagcatttacacttccggcagtttataagatatgtgcatgtgctaatactggaaccaatttggtcctctgattgtataaatcgctaccaaagcgatatgcgtgttacttgatgtaaggttttgcagtcgctaataacttccgacagtcaagatatagctaggcgctcatcacgtgtgatgatttattaccagctacgaatgattattgtgctgacacttgcagcagcagatagcgtattcgcttgattgatcatctttataccattggctcctgttccgtgtgcaccaacgtaatcaaaagcgtgtgccccctcgctacgcaggaagcactagaactagctgagtaaagcaacggtgaaagtcgatccctgatatatatacgaaaccagagataccttcatcacaaggatcttgttcctcgtggcccaatggtcacggcgtctggctacgatagtagttacttctgaaaccagaagattccaggttcgagtcctggcggggaagtccttattttttttgttccctcttgtttcagctttttgtcttaaaaggagcagaaagattattttgcagctctcttttggcgccagctggcaaaagcgaactgttgattgacaagcttttaacctgttattaaccaccagcaacctctcgaatttatcatgtctccatcaaataaggatattgctgccctaattgttgacttcctaactacgtccgccaaaactgtaggagaggattacgaagattccctcaaagtggcaattgattgtatcactgaagctttcgaacttggaccaggcgaggctgacacattagtttccgaaaagtgtggcggaagaagcctctctcagttgctcaccactggcatggctcacacctcagatgcaggcgaaccgaaggtagccgccgaagagttgaagaaggaagctgaggccttgaaactggaaggtaacagagctatggcggccaaagattatgagacagctatacaaaagtatacggcagcaattgaagtgcttcctacggatgctgtttattacgcaaacagagctgcggcatactcttctctacagcagtacgaaaaggcggttgaagatgccgagaaagcaactaaagtagactcatcgtattcgaagggcttttctcgtctagggtatgctaagtatgccctgggaaggcatgaggaggcactagaggcgtacaagagggtgttggatattgaaggcgacaacgccacagaagccatgcgcagggactacgagagcgcgaaacggaaggtagaggaatctatcaacatggaccgcaacgcagaagttactgagtcgggagactccgctgcgggcagcgctggtggttctggcttgcctgatctagccagtatgtttggaggcggtggtctcggcggtggcctcggtggtggacttggtggtggcctcggtgggttgctcaacaacccccaggtaatgcaagctgctcagaaaatgatgcaaaacccttctgctattcaagaaatgatgagcaaccccgccattaagaagatggctgaaaactttgcgtctgggaatggatcatcagggttgggtgatctcatggctgacccagctgttcgcaatatggctagtaagttcttcggtccaaaataagtctaatagtaagagcaagatgaagataatctctggccttaaaaccaaattgtatactagtggttactctatatggctggattcttcattgcttggcctaagtacttatgaattcttctattgctagtagcatatttttatgttgtttaatgcgtctgttcacgtaagctttcaccataaagttcatataggcaaagtttttagagctgataaagaagctaatttcctctgctagaagttcatgacaatgcttcaattcagcatcaagatgctgtaaattttcggagcaaacactgagtcttgactgtaacttgctttctaacttctggcgtttatcttccatatatgacacaaagaaacctttactatcttcggaagatgctgagttgggtttacccttttccggaaagttcctttgatattctttctgtaaattagttatttctccatataatgtccaccaagtactaactttggaatctagtacttcgactatttttgaagttagcgaatcaagacacatgcacatgaaatctaccgcttgctcaaatggatcaataccgtcgttgaactcattgtcaaagggggatgtgcgcaatcgtttacttgggactacgcttgctataatttccccctgagaatacaaaatcctttgtgagcactcgatatcgtggctcttataatgttcgaaaattattaacttcttcagtacagtaaatttctcccttaggtagttaaattcggttagactgaactttaggaagttttgtatgctatgtatttcctctggttcaattttatcacgtttgtttggtttttgcttcaccatacttgcgcgtagccatgtcgagagctccgattccgtatagctaaatacattcttgtaatcttccctttgttgaattatcgataatgaaaaggtcaaagcttccaaaagcatgctgttctccaggtttataacagagataataccagatttgcccaatgtctttaaggtttccaggtgatgatctattggtaaaaagctcataggatgcttcttgttatatatttgaagcaaagactggatatcctttaatgcataactagatgttttatagctctcaggtgataatgaagaggttatccagagataccatgcattttcttcgtatttgatattatgaacggaaagacatccataaagagaatttttagccatagcagttcctattaggttcaatataattggatttttcacgtaatcaatggcttttaaactctgtggatcctgcagcttcgataaaatcaatcgtttatcatttagtatttcacgaatattttcaattctattgtatttggcataaaccatcaagggtgtcattcccctcgtgttgcacttattaacattagcacctggggttgatagagctagctggataccgtctttaataatgtgtagaagagtattacctaatggatcttcatggtctgcaaaagaaaacctcttccccctggtagagtagaaatcaaagcagtgttggaagcacttcgagagaagttcaagataacttggatggtcatatgccctgcaaacagtgaataatggcgtgtgcatgtttaaatcctttcttttccagtctacgaatttccccaaacgatcaactatttcataattctgtggcaggtaatgcccaactgttcgtccggctatatcgcatttgtttatataggcatacatctcagtgttggtgcaattggcaataagtagatcaatcactgcctctgtgatatctttgttacccgcttgcagtgcctgtataagtaatgaacagttggattgattcacatcctgcagaatgtcttctaaggtaaagtgggattggtaatttgcgattatgtcgtaaaacacatcctgtctgccatactggatacataaagacaaaactgattcacaggacggagtgcgcgatatgaggacttcttcatgctcctttaaatttattggaattccttgctctatcaagttccagaagatcttattcctttgacattgtgtgatcaatctttcaagtttaattgagctgccgccaatatcgaaatatccgaccaccgcttcgagcgtcgatagcgaatacccaaggagcccaaactttacgtcatccgaattctgcgcaaattctctaagataatctagatgactcttcaagtttttaacttgtgcgcgacaaactacaacaaccatcaaacccagtaaggtatctgcgtcaatcattggatccaaagtagcttgagaagttttcgttgtcaatttttgaaaggttgatatcagtatgcgcgccttttcatgatggctatttgttaatgttagtttcgagaaacactcagtggcttgcacgaccctcttttctatctcggtgacaggagatagattaaacttatccaactcctcaggatatatactggtggaaagctggttcagtgagatagacctcgtaatataatatcctggaactctatcaggctcatttttcccatttaattgaacgagctttcgccagacatcttcatacatgttaagctccacgtacccctgaaccatttccagtaggttcagatagttacggaagtttttgtccagcttgatcaggcagtagactttttcgactagctcgtgaaatagacggacaagttcttttagggacagagcaatatatcgcatacgctccttggcatccttaaaaacttcatccagctggtttccgagttgagggtgcagacggaggaattgctcaagaggcaaaggtgcatcggcagtctgtgtaattcgctgatactgtagcggctgttcctgcgggccgaatacacgtagcggagttatcagctctatctctccaactagaggcctatcgatatagagaagtgcaaatgctgttcttccgagcagatagtcattgaagctgcgaagcagctcacatctttgtatgcggcacttcttagcgctgggttgtgcagtgattatcccggactgcggtcgtattacaacgcttttgccattgatggtctggaactctagctcggtgacccgtgcttcctgcagctgcaccagcgtatgcgaagccacaaattcgtaattgtagcatagttccgtcaaaggtacatatgtagtggcatcctgatactgcaatagcacttctgtccttggaacgacaagaatgaacttcttgtctttagcgttattgaaaagcttcttcagtggtgacgcaccaggcgcaggacagttaaaaacagcgttgactaatggattgagtagaaccggtaggtggtacggcatagtgttactgtgcgcaagcaaccttatccaacttctacggcttaggaggtgaaagcatttaactaggctgtggcatgttaaaaggcctggtgggccgatgcatgggttttaaaataaaaattgatgcttcatctcatcgcgagatatccaacattagaaatgagacaatacttatacacgtactatacctttaaggtacatatatgttactgacgagttgacaatggccaaaggtaagaacaagaaaactgaagagcggcaaaagcctgcgaaaggctcgagtaagcacaacggaaagtccaaccagcggagaacggagctaaagcatggccacaccaaggaaactgaattccctgcaaagctcgcaatgtgggactttgaccactgcgatccgaagcggtgcagtggtaagaagcttgaacgactagggctgataaaatcgctgcgcataggccagaaattccagggtatcgtagtatcgccaaatggaaaaacagtggtctgcccgaacgacaaggaaattgtggagcagcatggtgtttctgttgttgagtgctcctgggcacgtcttgatgagattccattttccaagattggcgggcgtcatgagcggttactgccatacttggtcgcggccaaccaagtgaactatggccgaccatggaggctgaactgtgtggaggctatagcggcttgttttgcaattgttggcaggacggacctggcggaagagctcctatcgcatttttcgtgggggcctggcttcttagaactaaaccaagagctactagaaacctaccagcaatgcacggaccacgcttccataaaagctgcggaggaggcatggcttcagaagctcgaggaggaagccgagcagcgcagaaagcagacgcatgaagaggatatctggatgatgggcaatgttaaccgaaaggcaccgaatatgaggtccagcatgctagatagcgacgacaactcggactcggagtatgcatctgatgtagatcatgatctagttagcgatacagaggaaggcgaagatatagctatcggttccaaacgtgacgttacctacgactctcttggcaatgtgatagagaacggccgccgtgagttcgtaccagaaacgaagatactagagtctgatgaggaggatcaacaataagtgtgtgctaaccaactagcgagagaagattggactgctgccggtttattaggcttgcgtgcttcctcttctgttccatgaagtggtccaccgtgaatggtgatttatccttggcttaagaacactacagagttgacgattgctcttcccaagaagcccatcattcatgcaaatatggatgtgttaggttctcctcggggcggaacaccgacaggcgaacatgaaataaatgcacaagatggaagcccgataaacttttcaccctctcctgacttttgttggctctgcgatgagctattcatcaaactagaggaagtcgcactaaaaaagaaggacctagggaagccgcggaaggtgcgtaacctagaaatcacttcgaactttgtaagtttgtggaggaagactgtcggtaatgatatatatccagctttagttttaagcctaccatacaacgatcgtcgctcgtatcgcgtgaaggatgtgaccttagttaaggccctttgcaaacatatgaagctaccaagaaactctgaaacagaacgccgtttgctacattggaaacagaacgccccaagaggagtcaaactgtccactttttgcgttgaagagctacaaaagcggcgacgagaaccggttgtgccgaaaagaatgtcgattgatgaggttaatggaatgttggataagcttgagcatgaaagtaacgttggaaaatggagttatataagcttggcagaatctccagcctttaactactgcttggagcacatgagttacgttgagctgcgttttttttttgatatagtattgaaggtgcccatagtcagcggtcttgaaagtctgcttctcagttgctggcacccggatgctgaaagctactttaaagttgtttcagaccttcgaattgttgcacatacgctatatgaccccaacgagcggcttgaaaagaatgacctctcagtccggataggctacgcctttgctccacacatggcgcagcgcgtaaagattccttatgagaaagtttccacaaaacttggcaatgacttctacgtggaagagaaaatggatggcgatcgaatacaggtgcattacatggactatggaaactcaattgcgtattttagccgaaatggaataaactatacgtatttgtatggcgaaaactcttccaaaggatcaatttcgaaccatttaaagtttgttgaaggtgtaaaagagtgcattctcgatggcgaaatggtcagttatgataaggaaatgcaatgcatacttccttttggtttaaccaaatcaggcgcaagtcaccaagtaaattttgaaactacaggccacacggagccgacatatcggcctctgtacgcagtgttcgatttgctttatctcaacggacagttattaactaaccaagacgtagtaaagagaaaagagtatcttgaaaaaattctcattccatctaaaaatgtggttcacctactaagtggccctagatgctcggatgcagaggcgataactgcagctttaggtgctgcggtagcccatggatcagagggaattgtattgaaaaaggcccgttccaaatacagtgttggaaagcgagatgattcctggatcaagataaaaccggaatacttggagaatttcggagaaaacatggatctagttgttattgggcgtgataaagggagaaaggattcatttatatgtgcactggcggttactgatgacagtgaaaaaaacaatccatcttcgtatgagtccggaagcgatagtgattccgattctgaaccaataattgttcaaccgaagatcgagaaatttatctcattctgtagcattgcgaatggtatttcaaatgaagagtttaaggaaatagatagattgacgcgagggaactggtttccatatgatgaaagaaaaccgcctacggattgggtagaatttggtacaaagacacctagagaatggattgacccgaagaattcagttgtgctagaggtaaaagctaggtctatcgataacgaagagtcaaagtcagatctgtacaaaacaggaagcacactttataatgcatactgtaagcgtatccgacacgataaaaattggtccactgccagtacagttgcagagtatgacaccgcaagggaagccaggagttactttaatgtttcccaaaatgcgaagttcggtaaagacagaagttctcctcgaaaaaggaggacgttccatctggtaggtgatattgacgttactaagccttcaaaggcggactttttgaaaggttactacttttacgttacgagtgggtattttgacctacagtcaaaaaagaacatcgatgcgtcagaaattggcgaggcagtagtcagctgtgggggaacttatatacacaacctaaggatccgggcaagcttagacaagctttatatccttggctgtaaagatacaagagagttgaaaatgctcatcgaacgaggttatgatattatacacccggagtggctcatggactgtgtcaaatatggtaccatgctacagatagaacctaaatacgtctacagcgcctctgaagaactaatgaaacaagctcgtaaccaagaggacaaatatggagaaagctatcagttacccgtaacggaggatacgcttaaggctttggccaataagcaggtggaagaaggatatgcatcagaaatgggtacagacgcagtgtcagagtatgaaagactactgatcttcaagggttggttattttatatactggacgactatgcgtaccatagttcgtggtcagatatcgtaaagtggaatattgagtcgtgtggtggtgaagttaccaatgatcttgaactggctacgatagttgtagctgtgaaagattgcttttcgcaactgtcacttcaggcagtccggaataatataggagccaggataacaggtagtaatgatgttcagcccattcctaaaattgtgacaagcgagtgggttgaggcttgcatggaagcgcaatacttagtagatgaggatgaatatgctgccatatagtttgcctgtacttagtttgatatcaacccgccgggtaacttagcttatcaggcgaatggaaaacttaaatgtatactctcctaagatatcgaaggtagttagcaaatgccaccagcactagaaaagatgcccaataagtttgatggctttgtgcctatccattgcatattctatgcgctgtttcatcctacggaagggactaaggtaaggttccagttcccatcagatagtttagaaaagagcggaatccgtttcgacacaattaagaattatgttatcccaaagtcacaactatgcaataaactcgtcacttttaagtttggttcctatagactggtttgctatccagtcaacatcaaagctccgtactatgccagaaactcattcagctttaatttagtatttgttttcccctatgattcagctacctccccttatgagccagcaattgccagattagccaagatgcttagggttttagaggaacaatctcagatgctgtcaaaagtggagcgagatcctgtatactatcagttgaaaaccggcgagacgaaggcagcggagcagaagacagaagagtctgattccaaagctaagacacacaacctcgacaaaaagagtagagcacagcataatgctactacaaagtatcatgaaattatgaagcacattaacagtgatgagaagaatctttatatcgaagatttaataacgaaattatatgaggacctaaacaactactccgaatgtttgatcccaatggattcagggaatgctattgatattaaacttttccctttgcttacaccgccaaattcttgcctctcttttgaagatgtacctattgctaaagtcaatctgatgaatctcgtagatgtaaactgggaccctaccatgttaaagatagttccttttatcaacgggatcaacagcattgcgaaaatttcgaaatgcagcgatagcgctgtcgaattagtgatggaatgtattaaacacttggtatactatgattgtgttgccctagttgatatgttccagttcagcaatatttacgcgcctaccaatttgctccgagactttttattcgattttattcttcctagagaatgccaggtatatgtagtatccagtgaagattgcgaaattcatcgacttccattcgaaagcagacctaacggagggcattcacgcaaccagacagcgtctaccaacacggtctatacactccgaagaacaacttcgaccaatagagccgactctttcagctctaatgctgaattttctcagaagtccagtgggatatcttctttagcacagtcattcacgcaatctaacaaagactattattacaaccgttcgcgcaacttagaatcgaattgcaaaagaactcttcctacaaggcgtgttctctttgatttgtatcgttcgttgacgcagggccaaaccttaaaagagtggtataaagcaaactattccgctatccgcgaaaaccaaatcgatgtccgcagactaataatatttggggtctttcacaggctaatttatagatgttattcttatccggtggctaagagcattggcacattggaattattgaaaaggtttgattatgtttcgacgacagacaattttatacctactggaacaagcgcaggaaataatgtcttctcaacttccgatattcgcgtagattttgatggttcctcacgtagcagaaatatcccaccgtttctaaacagttctgatgttgcagaggaggtgttaagagaaacgtaccaaaaactctcaatcaaggatatcctaaacgattcgattgatcctattgcaaaaggatatcaagcaccttcagataacgaagctgcaatgaaaggtacatctaggaaacaaagtatgagtaccttgaataccactagaataacattcgatattcgaaatcgccatgtttcgaaggataatgaacaccgtgaacagcagaatgaggacataccattgttattgaagaaaaaacggttacaggaatttctcctacttcaatctgttaaaagcgtcgacagctttgacaagattgcagtgagattagaaatgaataaacacgaagtagaacgtcttctaaagggaacaggtgaatataacatagttaacagttagtatgcattattatatattagttagtgttacattaagcgtcattccaaacttgaattagcctcacaattcccctggacgtcacctaacctttttagtcggtggaccttctgctccaaattcaatcgttccgcgtttcactggagatattatgcgcacatttgtatcaagggtcttgattggagacatagatctagaactggctttcgatgtaatagcatttttgagaacttgtctcgatggcgtcttcccggtgggcctaactggactaaatgttctcgcgttgatccgttccatcaacgtttccacagacttgatgtctccgacttccggactcatctcatgtatgatcttctttatggaacagtccatgtcttcgaagcccttacttgattctttgaagtatttgacgttgtcgtcgaaatggtcctccagcattctatgcttgtcactgatatcatgcatttgttttttcagagactgatcacaacatagtttttgaacaaagtcgtgaaagctatccgttctatgtttagccttgtttactgcatcttctgaactttttaacgaagcatcagatagttctttgagtttatccaaaccactagtggatttcgcttcaaaattctggtgggatgcgtcgcattggttgatattatcacatgaagcaatccaccgatctctgattggttggaataagctacgctcgttatctataatttcattcaccgtgtccttcatggagtttaccatcagtgttctgctctcttcaacatgcgctccaaccatggagacaagcttggataataattgatcagaatcattcttgaccttctggtaaacactctccattctcaaatcgaggacttcctgggtactattcttgaaaagatgctgatccaaatattcacgtaggtgattattttcttcactaatctctgtcaacttattagttaaagcgtttgaataagaggataattccgactttagagacgatactgtctcgttaaattccttcaggtacatcgacggggtttctttaatcaacttcactagggtatcacacatatctgaaccatttgcctccacagacttgagtgtatcgtcaaaaatggtggttatgttatttatgttttctttgatggacagattcttatccagcatgctaaccttaactttctcaagatgttggttcatagattctctataagaggtaatgccctgatacaaaacttctttaatatcattttgtagtcgcaattcatgtgtttcatagcttttcaaagacccctgcatagtatgaagagcttctttcaacttgtgaatagttgtcgcaagttccgtttcgttgtgatgttgtctttcaattttatcataaagatactctatagtactctgaagcttcttaatcttgctattctgcaactcagttacctcttgcgacgcctttttatcttttaagagaagattgttctgggatgttagagactctatctgccgcttagattcctgaatttctgtctgacagttctccaaatcattgacgatttcttggtaatgctcatggctcatatatataccatctttagatttagtcgatagaaaatctgactttattttggcaagttcactcgatatatttttcaccagtatatccttcatcatgagagcaccaagctgcggcctatttttgatgttctttgctttggccgcatattccagagtactcgaagtttcatctgcattgattttcgctggcgagatggttgctataagcgcagtctttgtatttcctccgagggaatcttgaagaagtctcgttagcttggattcgcgaaaaggaatatgaatgcttttatctgcaagggagtttatcacacgacccaaggtcagtagactttggttgattgagcctgcttcctttgctctttgattttgagctccagatcggctgatgttttcagaccctgcaagatcaactaggttcatcttcgatactcgaaataactccccgtcacagttcttgtatagcattatggtaaatatagtgtgcgacctgctagaaaagtcgttcattttggttgaagctacttgcctgtgttttaaacccttttgcagaacgttaatgccctctcgcgcgttgataatatggaactcttgcacgttctgaacatatatgcccgagccgctttcagaaagttgttgctttgttgctgacatccggttggctttcacagggggcggccgttgtcgtcttctactaaacccgttatgtgcaacttctggttctctcggagagttgctctgagagcttgctctgctgctgtggttcatagagctagaatcgaagatcctcaatcttttagaggaatcgtgtgactcatctagtaagtccttcaactcttcgttataaagctcgatgtaggaacatttgaccagaaaatcgctgtcagtggcttctagggcatcgaacagcttaaacatgattcttgggattatccccgcagagtcgctcaattgtccgtcatatagtttttcatcgccagtcatcgtgtaagtcttacccgtagatgtcattccgtaaaccagcacggtgcagttgtaccctttcatgaagtcatcaaacaacggctctgcaatttctttaaagattaagctctgatctgcactaggcccgaagactttatcgaccgtatatgtgcgcgagttcatctttgccgcaatccctacttcgtctgttgtattgatggaaacctcgttggagcctgttacgtccggcaccgtcacgacgacagaacttttcgccttgatctctctctcatttcgcccacgacaacgcacggccacggtgatattcagctcttcctgtgcgtcatcaagcatcctggatttcctcgtctgtacttcgtgatcaggcatcgcataaactggaccggataaacagcaggcctgttttaagaggcgagagctgcgtttttctttgtttacctggtgtttttctgaaacacgccaaacctgaacgattaagagctacccgggatacaatctggtcgagcagcttatcacctatagtaagccagaccgctatcaggaggaactatagtgcagtatcgtgccggcgtttgtatattctcatatagcctctccgcctttgaactaacgaagtttgtggttatcataaacccaatagtgatcccgccgtgtaaaggccgggtaacaaccaaatcgagctgtactgctttgcacgtgcttaggtatgtcccggactctgcagtttgcgtggtatgtatatatatacagggctacatgaacacggtgagtgtttcccattcagtctgaggttgactcagctggtgtttcggcggacgtggccttcttatgctttcttctcctctttttcgaggcgtctgccttttgttcggatgcatcactagtgggctgttcctccttcaccttgcgctttttcatgctcaacgggttcggggctttggggcccttacgcttgagcgtaggcgcaccttccgccggctgggctcccgcgggcgcactgttttctgctatccctgtgtatttggggtcgttcaggcccttgaagagcttctgcttttcggcctcacggctaacctgttcgctagtggagctgaggggttccatgaccatgaccgctctgttgatgtataccagcggcacacctggaactttcctcagcgcgcggcgtatggcaatgtcttgcgacgcgacgatgtatctgtggcggttctggccattcacagcaacaacgctctgcagacactcaatcggctccttcggctccttcacgtggttacagcgccgccgttcgtacagctttccctgggcgatcgcatcttggttttttgtatcgtaaagcttctgcatacagcattgcgtgatcataggctttacttctgcctgcagggtacgcttaagaccctttagcaggtcaaatgagctcttattcgtctctaacactatttgatcatccacaaggacctggtatggttctctgaacttgaatgtgtggttgtagaccagcatctgtttcttgtaggccttcgcccttttttgacgcatcttcttcctgatttatcctgaatgaaagccgtcggaaggttataaatgagtggcctctggtaattagaaggacaaagtgagctctgatgcgagatgagctctgtatgtagacccaaaagttagacctactgaacgggaaaattttcggttccgtccagaagcatacggctggagaaaataccggaatttatgtgaccgaaatgcaatattgaacatgttattgctaggaaaccataatagagaaacgtttagttatatagttatgactcttctaagaacagacgacatgaaacggagcttggttgagccccgttttaattgcggacgcccattgagctgctgggcgatagcgtgccaaaatcgctacgaatgatcgcgacagcgacagagctcccagcgacgcaggtgcagccattaaccttcaacggtcagccgacagtgcaggcagcataggtgtgaccaggtggcacaaaatgacctgcatcaagatgagcaccttctgatcgttaggaatggacaaaatatacaacaggaaagggaaggctttagatcactttcctacgaggtagttcccaaaaagccataagagcaaataaaagctcaaatcaaactcaacatagaagcatagaaggcaaaaactgatacatcagcgacttaaatgatgttcatccggtccaagatggtccggaaaccggaaaacatagcatcagtgctagactcaagctcgtggattagacggtccaagtcggagcccatggcttcctcgtcatctgcgtaggtgaatttaggaccgctgactttcttgggcttgttgccccagaagtcggacaagtccgcgccaccaccgttgtatatcaacacgttggcggttcttgctggtaggctgctcaaagcgtcctttgtaccgaagtcgatgaccttcttcttcaagacctctggggatatcgtctgcttgttgcggaactccgagtctccgtcgggttgcaaagacaaaaagtaggtcaatagaccagcaacatgtggagaagccatcgatgtaccagaaagagtagcgacggcggtatctgagccaatgtaggtggacaagatgttcatgcctggagcgaataggtcaacgcagcggccccagttagaaaagtatgctctgtcgtcggccaatgtggaggcacccacagtaatggccttctgcgacgcagctggcgaggtgttgcaggcgtcctggttttcgtttccggcggccaccgcaaagtggataccagcgtcgacggcggcgtcgacagccaggtccaacgcctgggagcgaccgccacctagggacatgttggccgtggagcccttgaaccccttgtcggccttttcggccgccttacggtgggccttcaccgcgtactcaacgccgcgcaacacgtcggacatcgagccggtaccgttcgaccgtagcaccttgaccgcaacgacgttggccttcttagccacaccgtaggtcttggacgcaatcgtgcccgcacagtgcgtaccatgcccgttgccgtcgtagtccgcgtcgttgttggggatcgtcttcccccacaaggcgcggtcctcgaagtccacgtggtcgatgttgatcccggtgtcgatgacgtaggacgtcacgccctcgcccgagttgtcgtcgtagaggtacttgttgaacgagccggagttcaacttctcgcggtgcgacacacgcgccaacccccacggcgcgccgttctgcgtggtgaagtcggatgcaaacaccatggagtcctcctcgacgaagtgcacgtgcgggttcgaccgcaacaaccccaccatgtcctccgtgaagtaccccacgtagccgcgcaactgctcgccgagcgcaaactcgccctcaatgccgccctccgcccgcgtggccgcaatcccgaactcgttgttctcgccgcgcgtcgaccggaagaacgcgtgctgctcgtccaagcgcgccaccgactccgcgtgcgccgcctccacgagctccatgtggaacgccgcctcctcgtcgctcacgccctcgcggaacaccacaatgtacttgtgtgggatggcgcgcgtcacgtcgtccacgcggaacaacggagactgctgctccgcgccctgcgccttgcgctcctggttctcccgcgccatccactgcaccaactgcccgcggtgcgcctccgccaccaccaactcgtcctccgcctgtggcaaaatgaggagtgcctgcgccgtggtcaacgccactgccggccaaactgcacgctgcaacttcatcttgtctggtttctgcagccgctacctttctgtatgcaccgatgtcgtcctgctggtacttgcaagaactacgacgatctacgtccttgcgcgttccgccggggcccccccgccctctatatatactgttacaaatctacgcccgtaaaattaattacgcttaccaaacaggaggccaagacgtaactctgtcgactatcattggagtctggctcattttgtcgcggtgaaagactgatagagcaaggggcgcttgtgctggtgtgtaccgcggtcatcagccggtggcaaaagtcttccacgccgccgccttcctcgcggcttttgtgccctgcgccacatacgtaaacgacgtagcaacaacggccggaatgccggggagatctgcggttgtcacgtgacgggcgcggcggcgagtcacgtcacgtgggcgcacagacgggcgcgctcgcggcgcggaaaggtgcgctgggtagcacggaagccaggacagtgcggcttggtggcggggtgcctgcgccattctccggggatgggcgtataggtggaacgctctgcgcgccgccggataccgcggataaaactctgatggcgcgcggagcgcgacaagcggcaggcgtatcggccggcagcgacgggcagcagcgcggcacggcggtggggtatctcgggacgggcagtgatgtgcgcggcacgcgggccgttgttacttagtcacgtgtagataggcatatacagcgcggttagtcgcggggaccaatcatcttctcggggacgacccactcgtcgaactccgcgtcggtcaggacgccaagctcgagcgcggacgcgcggagggtgatgcccttcttgtgggcgttcttggcgaccgcggaggcggcgtcgtagccgatcttggggttcagagctgtgaccagcatcagcgactcgtgcagcagcttggcgatgcggtcctcgttggcctggatgccgtcgacgcagtggacgcggaaggagcgcgcggcgtcggcgagcaggcggacggagctgagcaggttggcgatcatgacgggcttgaagacgttgagctcgaactggccggacgcgcccgcgaaggtgatggcggcgttgttgcccatgacctggacgcaggcctgcgtgagggcctcgttctgggtcgggttgaccttgccgggcatgatggaggagccgggctcgttctcgggcagcgagagctcgccgtagccgcagcgggggccggagccgaggtagcggatgtcgttggcgatcttgaacagcgagcaggcaagcgtgttgagcgcgccggaggcctcgacgacggcgtcgtgcgcggccagcgcctcgaacttgttgggcgcggtgcggaactcgaggccggtctcgcgggacacctgggccgcgatctgctccgcgaagccgcggcgcgtgttgaggcccgtgcccacggcggtgccgccctgcgcgaggaagcgcaggctctcctgcgcgtgctcgacgcgcgcgatgccgttggcgatctgctgtgtgtagccgctgaactcctggcccagcgtcagcggcgtcgcgtcctgcaggtgcgtgcgcccgatcttgacgatgtgcgcaaactcgtccgtcttgcgctggaacgacacgcgcagcgcctccagctccggcagcagcgagcgcgtgatctccgtcaccgccgcgatgtgcatcaccgacgggaacgtgtcgttcgacgactgcgcctggttgcagtggttgttggggtgcacctgcttgctgcccagctctccgcccagcagctcaatcgcgcggttcgagatcacctcgttggcgttcatgttgctctgcgtgcccgacccggtctggaacaccaccagcgggaagtgctccatcagctggccctgggccacctcgtccgccgcctgctggatcgccttcgcaatgcccggctccagcgtgcccagctgctcgttgaccaccgccgcagacttcttgagcacgccgaacgcgcgcaccaccggctccggcatgcgctcgcgcgctccgccgatccggaagttctccagcgaccgctgtgtctgcgcgccccagtacttgtctgctggcacccggatctccccgaaggcgtccgtctcgaccctgaactgctgtggcgctcctgctgtcgacatcaacctacgcgctgcgctgcttcctacacaacctctgcttagtctgagcatcctttggcctgcccgccgccgtacgtccccgccccacgtccgcttttatatccctgctggggtgcatgcgctactacctctgagccgacctcgggcccccgccacggcgcagggtaacgcgcgcacgctgcgcagccagtcccgcaacttcatcagttacaccatatatactacagaaggcattgctatgctacatgttggtgtttcgttctgttatctcgatccgcaccctcctcttgttgagcgtgcactcgcggaacaagcgttggaacggcacgcaaacgtagcccctgccgtcaaagtggcattcattctgtgtcagtgacgctaacacgcagtcgcgcgaagtagccaacgctggggccacttcttcgcgtgtgagaacgggcgtgggaggagccatccggcgtttggggcacgaccagtaagttatataacgaagcgcgtgctgcacgccgaaaaagagctggcagagagacgacagcgcttgctgaagtgaagaacacggaaagcttgacagttaaaacaggcagcgaaagataggatgcggacggtgcaggagatggtgaagctgtacgacaggcatcgaggatgcgggcgcgtgtatgcgtacgggacggcgggattccggtcccgggcggaagtgctggcaccagtggtgttcgctacggggcttctagcctgcctgcggtcgctgtacttaggcggggcgtatgtgggggtgatgctgacggcgtcgcacaacccgccggaggataacggggtgaagctggtggacccgcacggcgagatgctggcggcggagtgggagaagcatgcgacggcgctagcgaattgtgcgtcgcaggggcagcaagagctgctggacgcgctgcacatgctggtggaccggctggggctggatctggcgctgcgggcgcgcgtggtggtggcgcgcgactcgcgcgcgtcggggccgcagctgctcgatgcgctgctagacgggacgcgcatgctggaggacgtggaggtagtggactgcgggatgctgacgacgccgcagctgcacttcctcacgtgcgcgtgcaacgagcgcggcagcgcggcaggcgtgcgcgaggacctgtactacgcgcactttgttgccgcgctggaggagcttgccgcgctgcatgggctcgagacgttgccgtttccgctggtcgtggacacggcgaacggggtgggcgcgctgaaggcgcgggagctgttccgccggagcccgctgttcaagaaccgtgtatcaattatcaatgacaactggtcgcagcacgagctactgaacagcggctgcggcgcggactacgtgaagacgaagcagtgcttgccgcagggtatttctgcggaccttctgcgcgagagcctgttctgctcgtacgacggggacgcggacagggttatattttactatatcgatgggcaggagcggttccacctgttggacggagacaaaatctcgactttgatcgcgaagtttctgcagtcggcgctgctcacagcaggcataaacgacgacgtctgcctcggcgtcgtccagaccgcctacgcaaacggatcctccaccagatatctgtcggaggttctcgaggtgcctgtatcttgtacaccgacgggcgtgaagcatctgcatcgcgaggcggtacagaagtacgacgtgggcatctactttgaggcgaatggccacggtacggttatcttttccgagcatttcaccttgacggtagaacgcgcactcgagaaccctgcattgtcagcaaaggccaggctctcgctacagactttgaaaacatttgccaatttaatcaaccagaccataggtgatgccattgccgatatgcttgcggtcatcgcgatattgtccatattgcattggtctccggaagactgggacaaacaatacacagacttaccaaacaacctggttaaggtggtcgtccccgacagatccatgttcaaaaccacgaatgccgagcagcaacttacctccccagcaggacttcaggagctgatagatgatattgtaatggtctatgacagcggtaggtcttttgtgagagccagcggaacagaagatgctgtcagaatctacgcagaagcagcatcccagcagcaagcggacgagctagctaccaaggttagcactttagtcgtcgaatctacgaacgaccctggaatttgcaattgacctggaaacgtagtacttcgtcaagagacttaaagtgagaactgataaaatttttttaatatttttgttttatttttttatatatcatcgatcctacaaacatcttgatccgatttcttggtagcgttgagtgtccaattctgattgagcgcaacacaagggcaagtaaactagtagcatggcgaagaaggggaaaaaggacaaagacgccaagaaggcgcgcgctgaggccaagagcaagaaatccttgcttaaggcagagcagaaagacaagaagaaagccaagaagttgggagcagacgatgatgatgacatggacatcgaagaagtgctagctaactttaagcgccagcaagcggagtttgaggctgtcaatgttgagacagtggagcggccgcatcagagaagcagttcgtcacttgttgccaatcctctgcataataaaagggagctaattctctttggcggtgaatatacgaatcaatccacaggtatgacccacttttacaacgacctattcatatattcgcttgatacggaccagtggaagaaatacacctcgcaaaattcgccaatgccaaggtcctctgcagctatcgctgcacacccgagcggcgtggtgctcatccatggcggtgagttttcgtcaccgaagcagaacacgttctatcactactcggatacctggctctttgactgtgcgacccatgagtggactaagattgaacagaagaacggaccgtcttctaggtctggtcacaggatgactgtctggaaaaactatattatacttcatggtggattcagagatttgggaacctcgacaacgtatctgaatgactgttggctgtttgacatcaccacatacaagtggcaacagctccagttccctgctaaccatcctatacctgatgcccgttcggggcattcgctgctacctactccagagggcgcgattctgtggggcggatactgtaaggtcaaagctggaaaaggcctacagaagggtaaaatccttactgactgctggtatttgaagatgaagtccgatgtaacagctatcagatgggagagaagaaagaagcagggtttccaaccctcgtctcgtgcaggttgctctatggttcaccacaaaggccgtggtatattgttcggcggagtgtacgactatgaagaaactgaggaaggtctagattccctcttctacaacgacttgttcacgtaccatatagagaccaatagatggtactccgtgtcactcagggcccaacggcattcaaaggtcaaaagtgccccaaaaagtaaccgtgacaaggataaggaactcgaggacatgttgaatgctattttaaagaaagctaatctagacgatgacgacggagatgaggatggcaagactatcgaagaagagttgaataaactggagaacgacgggataacagagacggaggagacaaagaagagctaccctattgttatgaagttgccacatcccagattcaatgcgtccacggcaattgtggatgacacgcttttcatattcggtggtgtctgggaacagggagagaaggactacatgatagactctttctacagtatcgacatgaataaggttgatggtgtaaaagtatactgggaagacatggccgccgtggaaagggcaaaggaactcggtgaagaggacgaagacgatgcagaagacgacgaagacgacgacagcgaggatgacgacgaagaagaacatagtgatcggaagcttgtggcagaggaggaggaagaagaagaggaagaagacaatgagatcttacctgaaatccctgaccctagaccttggctaccacaccctaaggcgtttgaatctttgagagcgttctatgttcgcacaggtgcatccttcctagagtgggctattacaaacaagcacaataccagaagtgatgcgaagggcaaacatttgaaaaagcattccttcgatttatgccaagagcgctggtgggagagaagagagcaagtgcgtattgaggaagacaaacttgaggagcttggaggggtcggggaagtcatagagaaagacttcacaaagcctacaaaaagaagatagattaaccagccctaataactgttcttcgaataggcgccgcagatctcagtcggcttacatatcgattgagaactaatggctgaaccatcgggtagtttagttcctactttagtgtccaattatatatatatatatatatattcatttaaatattcaagccgtaacagctattgcagcccgagggatcactgcgcgatgtgtgggtgtgaaccatggtctctgaagcattcatatgacgacgaagcttaaaggtttaaaggaacttgggaatacttcggatccattgcggacagtcagctatcaagtacgaaccaagatgtctgattatgaggatgacaacacggatgtgcagagtctaacagtggaggaagaatacgagctctggaattccaatgtgccagttatgtatgagttcgtcagcgaaacaaaattaacctggccctccctgactatccagtggctgccttccgatggtcagagcccggaacagagtcttatttttggtacacatactgcaggcgaagaggtgaattatttaaaggttgctacaataaatcttcctgcaggaattgctggcctggaccaaggagatgaagaggacgaagccaatgaccactcctcatttgcaattgccaacaaatttccccacatcgaggaagtgatcagggcgcggtacatgcccgcgaatagcaacatcattgctacgataaatggtaagggaaccatatctatattcgaccgtactctagaggagtcgaaggcccaggtttccacattggcgttccacaaggaaaatggatacgggttggcgtttaacccgcacatctctggagaacttttatctgggtctgacgacactacggtcgcattgtgggatattgaggcagcgaagaaacccaaaagcatattgacgtcccatgacgacatagtgaacgatgttaagtggcacgagttcgagagcaatgtctttgggacagtgtccgaggacaagaccttacaggtgcatgacaaacgggtcaggctggagcccgtgaagaagttgcctactgcgtcaccgttcaacacgttgtccttcagcaagcactcaaggaacctcttggcagctgctggtgtggattcccaaatatacttgtatgacatgagggatatgtcctcccctctacacgtcatgagcggccaccaggattcggtgaccacggttgaattctccccacacactgatggtatcatatgcagcagcggctccgatcggagggccatcatttgggatttgacccagattggcgccgaacaatcccaagatgatgctgacgacggcgccccggagttaatgatgatgcacgctggccataggagccctgtgaacgaattcagtttcaacccccagattccatggctgttggctagtacagaagaagacaacgtgatacaagcttggaaagtgtccatgaaattggtcaatgcctcacctccagcaatatctgaccccagcctcctcgtatagtagttttgtgactttgcactgtggacttctgtattgtaacaaggttaattatacatgtaaactgctcggaaatatatacaacttattttcagctcaattcatccagaaacgtctgaaaacaatctacgaacatatccatcgaatctctttctaagtaatgcatgcacatattcattcctacgcctctcataagcgcgcatgacagcgacatgaaagtttcagaacccaatgaatctgtaaaattcatattcttgatttgaaaccgtgcggacggacttgtgcccatatccacaacattgatttcgataattttcttctttcggagttggcacttcgagtatttccttttccccgtccagtctccagatgtttgtgctgtcagggacttcataacgtgcgttgtaactctcttgaactggtattccagtaatccctccgagaatttcggactgttcttgtccagtttggtcttacgctgtttacttggccgattaaacaggctttcgaatacgcggtcgtctattagcgccagcggacaatcaacaagtatgcgcttcgactgaaacccgaaaggcgttgttttgtgcgattccgtacgcagatccagaggtatggagaaggcgatgctgccgtcaaaattccgaatcaagggtttcagagagagcaacgtgatagcgcagaggaagcttcgcacgcacacctcctctttcgatataagtttgagcaaggagtccagtttcttggaattcaagtaaccagaaaccgttgtaccgtagagactttccttgtccaacgtaagcaggaacggtttccgtccaagggacgatcggttaaggcggagactcggtgtcacggcggatgccaacgcgccaaatggcttcaaagcatacctgcagacgttcttaacgaacgagacaaacggtgagctcgcaggataaggcacgtccactccaggcagactgcacgcgtccgggtctattggtagctgcagcggcccgccctcgtacacgaagagcgtctcgttgtgcggctcgttcttctcacagcgctgcagcgcctgctggaagcgcacgtggaagttccctgcagcaaacaggtcgaacaacacgttgtggcaatggaagatgaccatgctgccgtcggcaatgtacacttcccagagcggtttgcccgcctcaaacttgctcttgttcaaaatgtggcgtgccacgtagggtggaattccatcgtgacacgcaattgcctcatccttgtacgtctgaaactcaatcacccgcaccacatcgtcgtattcaatccgcgacacaggcgcgaacttcggcccgtctgtcaccgtgacacacatctccacgttttcccggatcatgctgcgcagcgcgctcgaaatctggtgctctcgcagacacccgcagcgcgacgacatcagcgtcgagctgtcggaccatgtttcctgctcgcggcggtcaaacccgtaggtgaccgcaaaaagcgacccattgcgcagccctgcacgcacctccgcataccgcgctttctccgcgctggtcaaactcctgatggcgctcgtcgcaggcatctcctaggtgcatcccacgccgcggcagccgccatgggggcacgcactcgcacccggccatccattatatacccatctcgtaaaagttgcaaatctttgccgtttagaaacggggcttggctacctaagtcagacgacgcctgccagcaaccaccgagtgcaaagccattttaatattgtcatcagcccctcctcacaagccttcgcattgcggagaaggctacaccaactgcatcgtcacctgaaacatatattgtacagcaatctgacgcccaagaccacgttcggcgggggcagaatgtacctaaaattccctgattcgtacattcccatacctgctcgacgcctgggccgcggcgacaacccatcggcgctctgtgtaaccattgttgtagtctggggcgggtagatgcccagcggtaatcatagactacattgcaacgtttaaaatgacgatagtcggtatcacgcttcttcaagagaccatgccgactaccagcaagtactgctgtagaagacaccgggtagacagctagcgtatttttgatatttagggctgggaagagaccgtagtgcagcagatgcaggagcatatgcggtcttctgggaccgaaaggatgacagaggtagaaagggctggacaggccatccagttgagtgggtccagagcgcatgagagtccggaggtgggggacaagacgctagatgtggccgcggtggccgcagtcgttgcgggggaaaaggtacgggggctcccgcttatggccggggacctgctgggggaggatggctcgctgggccacgacatgcacgcgctggggaagcggcagcgtattctgaaggaccagctgcaatcgatgtcgccgcaggagcggctggaacggcagcgcgcgatgcggcggaagcgcgacaacgcgtaccgcgcgcgcaagcgcgccacggagctcacggtggacccggagttgcggcagttgttcatggcgctcgataagaacaagaagttccacagcatttcggcgaagtacgacgcggcggcgctgacgccggaattcttcccgcgcgtgctgctcacgaaggcggagacggacgacgcggcgctatacaaggcgccgttcgacagctttatagagtgtctccgcaacaagatccgcagcttctccgggaccaagctgagcaaagagcggacttcggtgcacgtcacctccgtgtcctgcgtgctctactgctcccaggataagagccaccagcgtctgctacagaccaaggaaaccaagaagaacagcaatttagataacctgaagcagtaccattgtcagtcatatatgcgagtcaattattcatttaaaacgcaggttctatctataaaattcagacatatacaacacggcgattctcccttgttaatcggaagcgacagcaaccatccttcgtgctttgatgaaaagtgattgcgatacatgattacatcgattttgctcgtcatctcttagttttgagcatacaccagccgccgcggccgccgcggccactgcatacctattgattagttgaatgggtaaattattgtacaatagtcatttacttcagcgtaaaatacatatgctagtttttggacttcttagacgctagccagttaataaaatcgataaagaagttgggcccaaacttgccgctgacgttccaatgcttcatggtggtagagtatatgccgatcacctgttcgctggtggatgggtcgtccttcatagcgatcaggactttcgagaggaacagagaggtggaagaacacgcagagaagaagagttgcggaaattgcccgggcttaggactcaaaatcgtagcgtggacattttccagagacgttaaaatgctttcctcgttgatttcgctggtaaattccttatatgccgcaggcttcatcttacagacgctattctttagaagttttgagatcttctcagccagaggacggtcaagagtttgctgtatggctttgaccatgggctccgccatcgaaagcatgtttgcagacattgtagcagaaagcttcttgtttttagttacggaacgttcaacatttttgcagtaaatttccagcatatccacaactctgtgtttgaaggctatgacactgtctctcgattccttggcttctatcttcctttggttcccagtcggtattttgttaagtgcatccttccggcgcttgaaaatttccgatagttggccgtccagctccatcatcgcttcgtcatccatggactcctcttcttcctcttcgtcatccatctcttcgaaccctacgttgccatcttcatccaggatgttatcaggaagtcttaaagcatgggcaagagcgctcgttgcttctttgtcaattttggcaacgtcttcgtcgctatagtcctcttggtcagaaacctcatcactgctgtcttcgttggattcggagctttggtcttcattgtctgttccagcctcatcggagcctaattcctcatactcgtcagcgccctcgaacagctgggcaaatcccgccttattttcacgcgcagaaagggtattcagtaagagttccaattcttctttccctactttatcgataaacgattcccacactactagtgtgagctttctcaacatagatttcttttgtgcaaccagagagagcagtatctccgtaataccgactagtccgttatctgcaccttgtgtagcagattcataaaaggaggcaagctcctccaatgtggaagcggaatcaacatcccccgcatgtacttgcaggatcgaaacagatagtagaagctccaaaccaaaaagctgggggttttcatttggagattttgtagacttgtttataattttccgaaggatttttagtgcattagacgtaactgtttccaactctgcgtccagctggagcgcaagcgggtgtttctccttttcttgcaatagaagttccaatgttgcatatgcccatgaaggtgcgcccatatcatgcttagagagaggaatcaattcaccaaggacagaaaataagcgttccctcgataaagtgatgatttcttcagactgttcagagagatgactaggagcagaaaagaaagcataccgcaccaacgcgagcagcagtgggttagtccatgacaaatgagccttccacttgtgcgctctgataacgtgcaataaggtatcaaggatgaatttaattttcgagatatctgtattttcatgctccagttgttgtaacaacaacgtcactaattgtgccaactctgtcgctgtcagcgacttggcggtcaccaagctatcagtcgtcttggactttgttaatttatcaaagttgatggtgccattcgggccgaaccagatagctgtgagcacgggcaccactttcgaagcatccgtttcgcacgccgacacaatggtcttgaggaaattaacacttagcttgtgtaagtgtctggtggtttcgctagactgattgatcaacgtacgcaaggcgttcttagagaagatatcttgtaccaacgacgaagggacggatcttactgccttttccatgatcaggactcccaaatattttctttcactggatgccttctcgctgaagaaggactcatctaccaccacctgccagaattcaccaaaggacagcattccggactccgcactcttgggcttcttccccgtcttgtgttttttagcaatgtgcacatgggtatctggcgaaaccttctcctcagccagtaaagggaggagcaagtcccacacaaaatgcaaccgtggagtccagacacccttctgcttgggaccgtcgccctcgattagcgcatcgtctttcaatacagaggcaagcgccttcgcattgccctttgccagcggattgtcggccttccagcgtttcacgagaggcagcgcatcgaagattttcgtctcgtccagaatccgcttgatttcaggacacttgttttgcaaaaacagataaatggctaagccctcgctcgtgtgggtaaggttgtgctcatcaagtaacgtcagtacggcgcgtaagaactccgtatccgtagcccgcggcgcaagtcgctcaatgacctggtacagagtgaacagacacggctgccgcagccaggccttcgtcagagccagctgcacaagccgctgcatgaactgatgcgcaaaggcctgctggatttggccgtccccagccacaaacacccgcgagaagagtggctcgttcaacatcgcctgcagcccgaacatgcgcccaaacagctgcccgcgctcctccttcccgttcttcaccttgtccacgggcagcgcagcctccagccgctcgaggtactcctccgcgctgccaatgtgcccgttctctagcgccgccgcggccacctccgtcagacacagtgagaagcccagccgcgcactcttgttactcgacgcaagaccgcgcacgagccgccccaatacatactcccattccttgccgttttcttccacggccagttcgttgagttcggtgatcagcgctatggcagactgcacacgctcatctgaaagatccgacgtcagcttgtagaacaagtctctgttgacttgccgcgccattatgctcaatcaccaccgcctgtagtccctgtcacagcaagacctggcttcccgtcacgctatggctcgcctgatcatctcatctcgcctgcgcatcgagcgcagctcaaaatttttaccattacccggccagtacacatattacataatcaccagtgtccagggattacccggacatcaaacatcacagagaacgaaccaatgaaatgcaggaaaagctgctcagcgccggtgcccggcggccattaagcgtgcacctacagccacttcactccaggccacacactccacgcctccccgcaagtaaacacgatgtctgcctggagaaaagccggtttgacctacaatagctacctggccgttgcggccaggaccgtgcgcgcggctctgaagaaggagctccagagccctgccgtcctcaaccgatctgtgacggaggcaaaggtcatcgactacgcctccaagggctccgccgcggaggccgtgccgctacggaagtgagcagcacgcgtgctcttctcgttgaactgctggcacgcagcctgggccctgttggcggcaagcgggcggatggagacgcccagcacaggccctttgacgggctgtgctggtggcatgtgtgtagttcgactatataaactctcgttctctaatgataatgacagaaggtcgattgggcgatttcggtgctgcgaacggggacgttgtgcaggggcaaaggcggttttcgcgggcaagcgaagaggtgcgttttccgcaagcttgcttgtgtccccgcccaaggcaagacacagtctactcgcatcagttttggcagagcgtgttgctacaggattccaggcgctatgtggagagcgataaggccctttggggggcttggccctgtagcggtgttacagaggctaccgggcccgcggcacaatgtcgccgtgaggcttcaggtgatgtccagggccagatgcggctggcagtgtgtgcgtgcgacatctcgactgacagtgccggtgtgcaggcaaagccgggcgtacagcgctgcccgtgtgggcggcgagggaacgccttcgccgcgggacaaggagcatgagcaggagcgcaaagttgaaaagcgaccggcggagccgtcgcgcgcgcaacccgcaaagccagccggctggcacgaggtgttccggctcttgcgattggtgaagcccgactggaagttgttgcttgcggcgttggggctcctcacgatatcttgctcgattgggatggcggttccgaaggttattgggcttgtgctagatgccacgaaagacgcagtcgcacaggcagaaaagaacgaaacgggcgcgccgatgtctttgctagacatgccgcctatcatcgggaacttcacgctagtcgacgtgcttgctgcgtttgcgggcgcgttgctcgtgggctccgccgcgaacttcgggcggatgttcctcttgaaaatgcttggtgagcgtttggttgcgcggctacgtgcgcaggtcatcaagaagacgttgcatcacgacgcggagtttttcgacaggaacaaggtcggcgacttgatatcgcggcttggttccgacgcctacattgtatcgcgctcgatgacgcagaacatttcggacggggttaaagccgcgctctgcggaggcgtcggtgtgggcatgatgttccacatttcgagcacattgacttctgcaatgataatgtttgcccctcccctcctcatcgccgccaccatctacggcaagcgcattcgcgccatctcgcgcgagctccagcaatctacaggtaacttgacgcgggtgtcagaggagcagttcaatggcatcaagaccatcaagtcattcgtcgcggagggaaaggagatgcggagatacaacacggccgtgcggaggctcttcaacgttgcaaagagggaaggtataacgagcgcgacgtttttcagcggtacgaatgtgttgggcgacgtgagttttttgcttgttttggcgtatgggtcgcacctcgttttgcagggcgaactatcccttgggagcttgacggcgttcatgctctacactgagtacactggaagctcggttttcggtttatcgaacttttactcagagttgatgaagggcgctggtgctgcttcgcgcttgttcgaattgacagactacaagaactccgtgccgtctaccgttggccagacgtttgtgccgcgcgatggtcgcatcgagttcaaggacgtgtccttcagctaccccacgcggccgacgagccagatcttcaagaaactccgcctcacgataaccccgggctccaacgtctgcatcgtcgggccctccgggcggggcaagtccaccattgcgtccctcctcctacggttttacgatgccaacagcggcaccatcctcatagacggtcaggacatatccaaggtaagcgccaagtcgctcagaaaacatcttggcgttgtccagcaggagccggtcttgatgtccgggaccatcagagacaacatcacctacggcctttcctacacgccctccatggatgagatacgcgcagttgccaagaagtgcttctgccataacttcatcaccaagttcccggacggctatgacaccgtgattgggcctagaggcgccctactcagcgggggccagcgccagcgcattgccatcgcccgcgcgctcatcaagaaaccgaaaatcctaatcctcgacgaggccacctcggcgttggacgttgaaagcgagggcgccatcaactacaccctcggcaggctaatgcgcagcaaggagatcaccatcgtgagcatcgcccaccgcctcagcaccatacgccgctccgagaacatcgtggttctcggcaatgacggctccgtcatcgaggccggcaagtttgccgacctataccgtgacgaggacagcgagttgttcaagctattgaacgaacacgcgtcggagcctgcgaagcccgaggcgtctccagctcctgcccaggaagaggcttccgctccacaggccgcagacattccccgcgatatcgagggcggaaatcttcgcctaaatgaagaggtcataaagcatgtgctggaggacacggcccgtgccccaatgccttaagacatgccccagattcacccgtattatctcccaataactacatatatatagaactgatatttgataaaatgttttagtttcatcgattccatcgattccatcttttcttaagtaagcacacggagccttgctacgagatgctgacgtctcaatagggaaaaagcagattacacgcatcaactacataaaatcagcgcaattgtatggagacagcgctgcttataaagggcagctgatagcacagttgtaatatttcaaagtgaggtggtgtccgcagcatgatacaggtacctaacgcgtttatctcgccccccttagcgaccacactagggcccggagctgactcactggaggatgtgatgctgcgaatcggaaacaagaacctgagcacggaggagatcaagcaggacctgttgcgattggtcaacctgctgcaggatctgaaggtgtcgctgaaggggacgttttctagggacgtggtggtgtcgcacatgccacagtacttcgactggatccaggacgggcgtggcctcttctacccgctgtacaagtgcttttcgcagatcgagcccgcgatgctgaagttcctggacccgctggaggcgcagcagacgtccggcgcgctgaacagggaccaggtggcgatcttcaacctgatcgaccaggtgtccgagctcgtgctgagcctgaagccgctgttccagtcggtgaagaacctattcgacacggcgctggagttcaatgagatcttcaaggaccacatgaactcgctactggaggagatcgaaggaaacatgaagaagtgcctcgcgctgcaccaggactgcttcgcgtcgcccgtgagacaccctccgtccttcacgttggaccagctcgtggagcttatatcctcatcgtcaaacaaccagcggctgcagatgccgaccttcaatcccctggaaaagcgcatctaccaggattactgcgagctagagaatgctattgtgccgatccagacatcgctgagagacgtcctgaaaacccgcatccagatgttcagggaccgagatattatcaacctaaactacttgatgcgcttgctgaaccacaagtacgcaaacatagtggagaagtatgaccactttcacagcgagctgatggctttgaaggccgggatcatagataagcgctggaacgtcctcttcacaaaccttaacatggaattggcatctatactgacgagtgtgactcgcatgtacgagagtctgcaagacaacccgaccatatccggcgatacgagggacacgcttatacagcagatacagcagaaaagcgataccatattcaagaccttcgaggtcatatacaaggcccttgacgcctccatcctcaatcccaacgtggccgaagtcactaataccctggcggataagtggctagttcttcgcgagaaagtagaccccatcctccccaaagagacagagtctgatcccatcgacgttttgacaaagcgaatgagcgacatgacaatttcagagcccgtggactccaaaccgttccatttcgatcggagcaaacgatgtagcgtaggcgcactcttattacgcaaaatgaacatcaagcccatactcacatcagatcccgatgaggcggagaagccgaagttcaacaggagctatagaagccctagcagcgcggatgccaacgggtccccgatctcctcggattaccccccagtgccgttctctctagagcccgttcattctaaaaacccgcccgtttttaagctccagattggctcccctgaccagccacccgtcgtaaagctccagaacgaaaatgtgtgcacagaagacaaaaagacattggcgccctcaaacacagcaacggcagagcccataggtgctacccaaatgcaactgaatccggaatatccttgctcacccccgccgccgggggacccacagcccacgtctccggcgcaaaacgccaccagaaggccttccgacgcaagtcttggatatcctggatcacacaaagacccacagtccccatcagcccccttcctctctgcaggctcatctgcgccggtctcgccgcgggaggcaccggccacgaagtctccgtcgctatcaccaaaggactgtcggccagagttcgaccacatggaacccccagatttctttcgcagcggagaagatagctacacctggcgccgcgaccggagcaggaactcttctgtttcctctgcctccgccggcgaactatccggcaagctgctcctgagcgcgtctccccagagctcgcagccgggtgacttcaccgcatgcacaactgcgccgaacgaggacgacgtctctccaacttcgctggtttccgatgactacatcaagcaggcggatcatattaagtatatcgaacgtatcgaggaagagcgttttaggtactatgctaatatgcattcgaggattcccgtcatgttcagcgatttgataccgcagccaatacacctctcacacttcccccgaagcccaggaacccggcacaactactggtcatcgagattgaaggagcccacgccgttggcggatcttcttaacttatcatgatatgacgtacttaatgatatatttggtttgcttggtaatgtagtatccaatacatgcgcaatatagatttactgtagccacttgcataggcttggggatttatggaccttaatcatgcatataaggcaagtaatggggagtctaacaacagccttgattcttctctggatgtaaaaccgatggagaagccggcaacagatgatgcggtccgcacggagaaacgtaagtaccatggtgcggctgtcatgtcccaccaccaaataagtgtgatgtcgcagcctctgaccaagggcgtcagagaacttataaagaaaaccacggcgttcatgtcttgctcgaagagcaagccgcagaaactgatggagctgggcccgatgacgtacgcgcactccgtactgactgcgagcgagaagcctctctgccacatggagttggagagcagcagcgttaatgggtttgcagacaccctgcaagacaacggggtgtcggacgcgacgctggtggagatgtggctgatacgggtcactcggcgcaaacgcgtgcgctattgcttccggataagtaatggtgtgttgacatggaaggacaacaggatgctggagttagatacaatcaaggacattagaatggccgaaatggcaaaaaactacagggaacagtacgatataatggatgcgtttgcgtctcggtggataacgatcatatatcaggtgtcgcctacgaagctgaaggctctgcatctgatagctccgacgcagctcgaatgcgcgaagttttataatgccgtgctgactgttgcacggcagcgtcgggagctgatggagagtatttctgtccccagcagcgaggcgtttgccaacatccactggaaggtgaatgtgtcatccaagaaggcagacgaaagcagggatacgctctctttcgaagatgtgcagcgactctgcaccaagttccacatatattgctcctccaactatttgaagcgagtttttaaaatagcagacgtgaatcgcaatgggctgctgaactttagcgagttttgcacctttgtgcggatgctaaagaagcgccatgaggttacagaaatatggcaaaagattgccgccgaaactcgagcgatagattttgaaaagttttacagtttcctgacagatgtgcagtgcgaggacatggatgcccagctggcacgggacctatttaatgagtattcgcacgaaggttacatggacgaagacctcctgttaaaatttctgactgcccaaccgtacgcaagggagatagaagaagactactcaaggccgctatcggaatatttcatttcgtcttcacacaatacatacttgcttggtaatcaggtaggtagtatggctagtgtagagggctatattcaggcgctgcaacagggctgccgctctgtggagattgatatatgggacagcgatgatggcccggtggtctgccatggaaagttgacctcatcgctaccgctccgcaacgtggttgacgtgatcaacaagtacgcgtttatcacatccccatacccgctaatattatcattagagattcactgccgatcggagggacagataatagtgaaacaacttttcgacgacattctggggccactcatctacgtggctgaccactctgtcggatggcccagcctgcgagatctcaagcacaaaataataatcaaaagcaagaagctcagggtaaatgtggacatggctgcggatatataccactccacttcttccaagggctcatcttatgactcagagtatgacgtgcagtcacagccctcatcaccaatgcccaggaggggcatgcgcgggatccacatctcaaagcgcaaacaccgggtcattgagcagctgctgcagatttctgcaatccacggcattaccttccgcaatttttcgttgccagagtccaagacgccaacacactgcttttccttgagcgagcgcagcttcgataacctggccaacgatgacctgcagcgcctagcgatcgacaagcacaaccggcgccacctgatgcgtgtatacccccatgcattccgctacaaatcgtcgaactacgacccgatcaaatgctggcgcctaggtgtccaaatggtagccaccaattggcagacctacgacctggggcagcagctaaaccaggccatgttccgcgttaccgcgcgcgacgactggccatggccgtcgggctatgttcgcaagcccgagtatctcctccacaccgtcccaaaaaccagctttatccgcgacatctacgaggccgtacacagctcggtcgtggcactatcgcttgagctgctttccgcccagctactgccgaagcccaagctttcctcgcgcgatggcgaggcccatttcgccccctacgtcgtcatagaggttctcggcgacggtctctgtgggccaatccacgtgcagaacgggcttgtcaccgccccaaaccaagtaacttcctgccgctgtcccgaaaacggttttaatcctgtatggaagacgtccttgactgccactctcaacaatactggcttcaatttcatcagatacattgtcaagaacgctgacattacgctagcgacctgctgcattcgcctcgactacatgaagagaggctacagacacataccgttatatagcctggagagctcgcgattcatcttctccacactctttgtaaaaaccgattacagaatcgtgagatctcttttctaggtaataggcccttgctagatcgcccttcgtggcggactttgcttctctgatttttcgcgtatcgacgacctcaaacgctttcaagacattgcggtcgcgccatctcatacatatataaaacaggaatagacctgttacaaggccagcccgctcgcgtagtgcatatcccgttagatcgaagataaagacgcgtgcaatatgtcggatgtgtcgcctgtgaagagaaacgtgctggctcgcaagagcgttaacgtcaaggctggcgcgcgcaaggataagaacaacagcaaccagagctcccccaagcgcgcaaaaatagagtcgagcgagtcgagcgtgaccacaggacgcgttgcgtctcccctccggccgtcggggcagtttacattttacaaagagacccccgaggagcgggcgcaggtcattcagcaacagaccacggtagcgcagcagcgggtgcgcgacgagaacgacttcgagagctgcaaggagaacctggactgcgaggagacggccaaaacgggcgcggcggcgggcaagccctcccgcaccgctttacgcgacttgagcatcgaggagtattgtggctacatcgagtacaaggggggctccagccggaaccaactgacactgcacctggcacatcctacagtgctaccgagcttcgtgactcctccacgcagcgcaaagctcagagcgtttttcaccgccaagcaagttgtgaaaagcaagcggcgctgcaaacgtgcaaagaccacagatgacatctgcaaagacaggacggtgcgcaagctggatttcacgatccaccaggatgcttaggtctggggtttcgatggaggggaactttcatcaaggtgcgtctcccccatggaaaaaagaaacgccgtgcatacaaaaattttcatagctcatctcttctcatcgcaaaggtcacaagcagctattagaccactcgtagcctaagaggagccatcggaccagcatcatctagaaatgggcaaggcagcgaagaaaaaatactctggcatttctactgggaaggaagttccctccgagcagcacatgaatacagtgttcaagtttaataccgatctaggtcagcatattctgaaaaaccccttggttgctcagggaattgtcgataaggcacagataaaaccgtcagatattgtcctggaggtgggtcctggtaccggtaacctgacggtccgcattttggagcaagccagaaaggtggtggcggtcgaatttgatccgcgaatggcggctgagttgaccaagcgtgtgcacggtacgccggcggagaagaaacttgagatcatgttgggcgacttcatgaagaccgagctgccctactttgatatttgcatcagtaataccccttatcagatctcatcgccactggtgttcaagcttatcaaccagccccgcccaccacgtgtgtccattctgatgttccagcgagagtttgcgatgcgtctgcttgctcgcccgggtgactccttgtactgtagactttctgcgaacgtgcagatgtgggccaatgtaacccatgtcatgaaggttggtcgtaataatttccgccccccaccacaggtggagtccagtgtggtacggatcgagatcaaaaccccccgccctcctgtggacttcaatgagtgggatggcttactgagaatcgtgttcgtcaggaagaatagaacgatctctgcaggattcaagtccactgctgtattagaaataatggagaagaattacaaggcttacttggccacgactaatgatgctatggtcgatgacgcgaagggatctttggcggaacaagtaaaacagaagatcgagactgtccttgcagaaactgggttatctgacaagagagcaggaaagtgcgaccagactgatttcttgaaattgctctacgcttttcaccaggttgggcttcatttttcataacatatattatggcaaactttatgtacaatatttccaagcccttgtggctcctatatggtattgcattatacccatttggattgcatttatgccagtcttgacagcgaaattgggaaggccacctcgaattcagaaaccagttactggctgtattcgtcaggaacaggaactggttcaacataacgcccgattggcttgtattcgatgtgctcgaaggcctttccgaacccttttggcccgccgatctcgataccacggggggcggatgtccacttatctgatggagcgaaagccatcacaaggacgataagtccgtatctgtaatcctgcgtacctacggctccgccatcttcatctaatagagtgattaaatcaggtacagaacaaattggcacctctgtgccgtcagcctggaccttgtaggcgacaatgttttcatttttaaatggcaccttcaagatggcacttttgtcatccagtccctctataacaactacaccatatccataaccgcgttccaatctcttctccacgctaataattttccccttgaataggtacttggcggcgtcgggcccgcccacagcattaataatataatcgggcaatctaccagtatcgccctttgcccgtgcgagacgcactgcacggccgattctccacgacaaggacagagtgctgaggactgtctctctcttcatccgggagatattcatagttgggtccacaacagcacattgtactccgtggttgttcatagcgtcccgcaccaggtcttccatttgaacatcattagctacactagtgaatagtatagacatgccattcccgtccgaaagtgctgcgtatggataaccctttaggtcgttgtaaactgacggtaaggactgccattgtgttggatatgcccgtcccatgaggtctatgtcaatgcacggcaagttctttttataagcggtccataaaccggcaagaccattgctaccaccgatttcaaacataaaaataccatctgctttctgaccttcccagcgctcgattaggtctattgcctctagtagctcattggcatgaagacgttcgctagaaagggtaggagatccgcagtaagccacatttatcgcgcggccctttccgtttgtcttcctttcaaactcatctagagtgagcaccttgataaccccgccattctttatgatccgctttaattctatagtttcggaagttgggtcaccgcctcctccgcaacctagaatatatgcaccaatactaataaagtcgatatcagtcacggaaagaatccactcaccatccttaatcgagggcctataggtagtgtaatcaaccgtttttgcctctgtcgccaaaacagtagcattcttggtagttacatagttggtctcttcatcgctctcgtcgccattctcctctgctactttatgggttacgtcgagcgcctttccatagtcaatatcaccgatgactttcacctcaacattatagactttatcaacatatggaacggcatcgcagacaatgttgacaacagatagggaactccgaagagcacccttggagcacgcctcgtcttgagccttttgcaccagctctttaattacctcttctttctcttcatctgtgcctttaagcatcgtccggaattcctgctttgatgaagaaattttccctagggctgccccaatggcattggcgacttggtaatatggcggtctaatgactttagatgcaccatctaggctgtccggagcgataaacgagccacccccaaccattatgacggggataggatcgggagaggttttcatgcgatcaatagtcctttctaacttctctttgagagtagcagtgaatgcgtccttgtaggcttcgtcaaatctgcccttgacgcgcgaaacattacccatcttgaattcactgagggcttccagactcccactgtcggccagttttgccacggcaacatcggaagccgtggtaaccggaccgccgcataaaagcgattgcttgactatatccgcgcctgtcgaatctggaccaaccgttagaccttcctctgttcttacaatagatcctccaccaagtccaatacttagcacatggggcatggaaaaattcattttaaccccaccaacatatgaatatgttgaagattgccttgggaagccagaggccaacagaagtccgatgtcagtagtagtcccacctacatcgcacacaatgacgttcttcccagttacctcaggatccgctgaacacaaaattgcagcaccgcgcatggagttcgtggcgcctgacgagaaagtcctgataggcgctgcaagcgcatccttagtagagagcactgtgccgtcattctgcgaaattaggatggtacagtctagacctatacgtttcgtagcacgcacaaaagacgtgattagacggcggccaaagcgcttgattgcggcgtttagtatcgtagcattctcgcgctctacaaacccaattgtcgaaacagtgtgcgaaagcaccacctcggcacttggaatttcctccttgataatttctgctgcacggagctcgtgggcattgttgatgttggcaaatgtggcaatgaccgcgacgcaagtgatgcctctctttttgatttccttgcaatgtctgcgcagagctgactcatccaacggtttgatgtccgatccgttgacctgggaacctccatccatcgacgcagtgtagcattgcaatatgctgcccaagtcttccggaaagtcgccgaatggaggaaggctttctccgaatccggcgcacaaccgtagcacggctacgcgctccagcctgttggcatcgcgctcaattaccgcattgatgaagtgcgtggttccaatactgacggacacgatctcttcctttttgatgtcattcgatgggtcatccagcactgtgcggattgcttgttcaatcccctccgaaacatctggcgtcgtcactgccttgtaccaagccaacacccccctatttggctcggagattctcgcggggtccaaaacaacgaggtctgagttggtccctccaacgtcaacacctatcagcagtcttcttccatccgccatcttaaacaaaagctttgcgctctggattgaaattactaaactgacctcacaccccagccattggcctggcaaaccagttgctttatagcaacaagatcagcgctttaggacctactgctcggcgttcgtcaccatagcgcaagtttttccggattggggcagcaatcacgattgcggaatttgcatcaccaagcggttgggttgaacaaaaggcttatccttaaccagatctgcaagtgcccttttatgcatcgatgagtgcggcaagtcatgttccacatttacgtattgttgtgtagggcaatcgttaagaaagtggtagactttccgaaaaagagttccacgaccgaatggccggaatgcttcacacacgtcagttaaggcggagatcagccgatagcccaaaccagtgatgctcctgaaaatatgggtatgcaatatactactttatctgcctgataaaagtagacgtgcaatacgacattattttagggaataattccgaagagtcttaatgtccgaaccagatgttgagatatttctctatataatataacagtgtgcatatctttgaccgacgaccagacagtcatttcgtgcacctctatgaagtatagtcaatatacaatatagtcgtgggatggatttacgagggcttcataattcttgttttcaagagtcctcgaaatataggcaagcctggtgatggaatttgccgcgacgatcataccattgcttgccagcttcgacagaatatctacaaaatggaggtgtatgtttttttgcccaattagggcagagactaacgcactgagatatatcccccagtgacatgcgacactgctcgtggtatagtatggcatggcgtacagagtctcaaggatctgctctagggtgctcaccagctctgcggagtccaacggtacgcagacaaaaaataccttgacgtatagttccaaagtcatatggtacactttagcgctatttttcattgtgtattgaagccgcaggtcagagacgtctctgacaatttcacacagctccaaatccgtgaccttgcatacctgcaattcgcgcagtagggtgagcccaaagccgcgtagttccaaggttacggcttcctcgtgttccacaagcaaaaacctcagtatattagtgccatgcagtgacactccacgtgatttcaaatccaggagcttcagcgtaatcttggtgaatatgggaaagagatcagtaacatatccacggattaagtcgtaccgaccgcccaatatattatgatgggagtagggggcatttgatagcaagccattgagctctgtcagggtacgtatcgagccaccgttgtcagatgttatgcaggccagaatctcggcatggcagaaccagtcctttaaaagctggtacagctccatgcagcggccgctgatgaacgtgaggggttcgcgaggcagaaagtctatggcggactgcatcatatgccagcttcctttcagatgcgtgcgccattcggcgttgcggtacgtgctgttcgccgcaaacaggagaaacaccgccaatgccagggagacaacctctgaaaaatcagtcgtcttgttgatgcgatgctgcagcgtgtctaaacacggtttcaagctcggcatgcgcacgtaccggtcccatatatgcgagtagtctttgaaggcatttttgaagtaaatatccttcatgagcaacgccacatcgtacatcaccgcctgctccacaatttggtatttctccgcaacgtccagcaacagccccacaaacacgtcaaagcgctcctgcgggtacatgatgaagttcccgcacccgagggtcgaccgcatcattgtccagacgaagttcagcagctccgggctgtctagcgaaattatgcctgtgtccacggccgcgccggagttgcatatcgcctggatcgggtcgtacgccttgagcgtgtcgtacagctccacccagctcgcgttccgccacgacagctggaacacgtttgtgagcggcgcgctgggcacgaacggcgcggccacctttgccgcctgagtgtcgaacgtcagcaggttcagaaacgtgaggtccgtcggcgacacatagatatagtcgcgcagatccaggttcggctccgcgccgctgtctcccttgggtaccacgttctcgtaccctccatcgctcgaagttccggcccccgccccgtccgctgcgcctgcgctctcgcgatccttccccgtttccaccttctggaacacaaagctcaccttgtatgtgcattctacgttgcgcttcacgcatttgagacacgcgggtttggtctcatcgcacttagtgtgcgattttttgcattgcagacatccttttcgagagtacggagacttccgctttttcatgaccacacctgtgttctgcagcatcgccccgatgaccttgtgcgcgcctcttcaccaacgcccttctaccggcaacgctcttctatcagctacgtatgcccggttaaccgaatgtacacaggttaaccacttcttgcggattccaagagtggcttggagcggtacaggctttacttcggtagcctagctttttttcggcatctctctgtgactagtgctgggggtctgaacaaagctcagcagcgcgtatgttgcagattaggtgagctagtggtcagttaggctcaaagcgcgccggacgatctgaagggttattagccttgggaggagtcgcctgagagggaaaatttcagcaggtagcaagtatatagtacatagctacttgcaactgccgtggccggcacggcaggcctggcggagtcgcatggtgggagcagtagctacgccggaggcgactcttgaagtaggggcgcgctttctggagagcgacggaaccagacggtacgcttgcaaaagagcacgtagcccatgtagaggccggcgcagacgcccgccaggaagccggcggcggccagccgcaggcgggcgcgggcctgcggcgcgtcgagggcgcggtcgagcaggaagacgcaggcgccgtcggtacaaccgaccttgagcacgcggacttcctgcgagtggccggcgacgctcagcaggcggacgccgggcgcgggcgcgcgacagtgcaacggggggccgtgggcggttggcaccaggccgttgcagaggcgcagcgcgtcggtggccgcacgtggcacgagatgcgcggcgagaaacttggcggggtcagcgacgtggcgctgtagcaggccggcgggcgcgagaatggagtagggcgcgtcgggccccagcgcgtcggcgaaggcgggggcccggcgcagcaggtctgcgaagggcgcggcgcctgcggcgtcgacgagcgcgcgcaggggcacgtggaaggcccgcgggccaggcacctcgcgcagcgggtgcacgacgccgcggtcgaagggaatgtccgcacccagctctagcgcgacgcctgccgcaagattggagaaggcaaaggacgcggagccgttggcgtgggcggccaggggccgcacagagacgggctctccgtgcagcgtggacacattgcgctcctgcgagtcatccgtgtacacgagacccttgaatatcaggttcccgaggagcatgtcgagcgcggacgtgttctgccgcaggtagtccagattgagctccaggtcgcgccacgcgtcgaagcagggcagcagcaccgtgtagccgtggtggtccgacggcaggtccagcagcccgagctcgcggagcagcgacagcgacagcgtgcagtggaggaacgggttgaccgacgacaacagcgcgctgggcggctccagactacgctcgaggaggtatatgagcgtgttccgcacccggtaagggtgcgggttgagcacgcgcagcccgccgttgacgtagatgtcggctcccgcgcggctcagcttgagccgctggcagcgaccaccaaggccgtcgccggggcagaacatgctgtcgtgcaggcggtgcgcgccctcgtccgagagcagctcctcgagccacagatggtcggccgtgaagtggtacaggagactgctcctactgaagtcccggtactggtcccaactgtccgccgaaacgaagatcgtgtaggtcgacgtgtgtgcgcgcagcatgtgcgccagcttctggtagtacatcccctcgacgaacgctgaggcattgaggccgacgaggtacttgtctgccgtgaactcgatgccgctgcgcaggccttgcaggtccaagaggtgcgcaatcccgccgcgatataccaggttactagaggatgtacgcgtgccgttcacgtacagtgtggcgccgtggtcggcgggctgcagctccaccagctcgccggagacggccgtagcgttgcgcgcgacggcggcgccgccgtggacgccgcgcagccgcagacgtgccgccagccgccgctggtcgtcataccacccgtctacttcaagccggtgcgcctgcagcaggtagttcagctccgcagcgtcgaactgcgactcgaacgccccgtcttccggcagcagcagcgtctcgttggcgccccgcccctccgtgagccgcagcagctgcgcggcgcaccgaacggggcgccccgcctcgcgcagcgcctgcagcagcccgtcgcgctccgccagcgccggcatcgggcctgcgatcggcaccaccaccgcgttctgcacgctcgcgaagaggctgtccgcgaccacgcgcacgccgttgacgctcgccccgccgtccccgcgcacctccaccacccgcggtcccgctctactgtccaccacgtacacgcccgcctcgtactgcgccaggtcgatcacgcccccctggatcacgtaccgctgcatgtccaggcggccgccccccaccccgccgaacggcgccagcagcgagaagtcgtccagctcgttcaaatacggcacccagccgccgcgctgcgccgcccgcagaaaacccgcgaactcggcattctgcgacaggatgtccaccaccgtcgtgaatggaaacccgccatcgtcgtcgagcgccgccgcaccgccggcctgctctcttgccacggcgcccggtacgccccgcgcccacagcaacgccatgcacgcccaggtgagtccaccccaacgcatggccgatatcatacagctagatctgctctccctctgccagagtaagagtctatggcttaagtcctcctggctccgctgtccgccttacgaaaactactatgttcctttaaagatgacgcccggtccccgcctacgaaatagcccgtgcccttgggttccccgcgaatgtgcatcgtacgcccgactggaaactggtgcccttgcaatttcgagcggaccctctgcctgctggacgcatgtggttccggcgcaatgccgtgcccgcagaacgcggggagtcgaaaggtcctcttgggcaccggaataattagcgggaagccagccaggggctattcgggctcacaatttcctatattggagcaacaaaaacgtttgcgagagacgagtagatggatgcgcgaccgtggccgcgattgcttcgcaatattgtagaatattttaacgtctcggatctgcagaatgaaaccgcggcggttgcggcgggggttacataaagctacggctgcatcagttctggcagcagctgagacagccagcgcaagtatatagagagttgctgcaagcacagttctcgggaccgttcagcaggcgtatagtgggacgaaagcacggaggcaaggcaaagtcaagagaaaatgccgagcgcgggggaactagagcagcagccgctgcgggggtcgccgtcctcgaacgtgcagtacatctcgatccccatagagcggcagagctctgtgacggcggaggcgggggggcacgcggcggcgggcacgcccggcgcgcaccgcgggtcgtttctggaccagccgctggggtcgttccggggcgtgaactcgctggggcggtttgcgtcgtcgttccaccggtcgaactccttcaaggcgatcgagctgaacgcgggtaaggagcgggcgttcctcaaggacggctacgacgagctatacgacccggacacgctgggcccgtcgctggacgggcggcggctctcgatcgcgatcaacgcgccgggcacggtgtcggtgcggccgccggcgagcgacttctacgggagcgtgggcgggggcgggtggcgcgacagcacggcggtggtggacgaggacgagcagtcgacgcggctgatgcgcgtgctgtcgaaccagtccctgacgttcgtggacgtgaacaacgcggcggggccggacgcggactcgatcatgctgaagcgcgtggagaccaagacgggcaaggtggtgaccgtcctggccggccagtccacggcgccacagaccatcttcaactcggtgaacgtgctgatcggcatcggtctgctggcgctgccgctggggctgcgctacgccgggtgggcgctgggcatcccgatgttgctggtgttcgccgcgggcacgttctgctctgcggagttgctgtcgcggtgcatcgacgcggaccccagcatgatttcctatggcgacctggggtatgccgcgttcggctcgaagggtcgcgcgctgatctcggtgctgttcactctggacctgctcgggtgcggggtgtcgctgatcattctgttcggcgactcgctcaacgcgcttttcccgcagtactcggtcacgcagttcaagatcctgagcttctttgctgtgacgccccaggtgtttctgcccctgagcgtactgtcgaacttctcgcttctcgggatcaccgcaaccctgggcacggtgctgaccatcctctactgcgggctgaccaagacccaaagcccgggctcgctactggaccccgcccccacgcgcgtgtggcccgcgtcctttctggagttctgtctttccatcggcatcctcagcgcctgctggggcggccacgcggtgtttccgaacctcaagagcgacatgcgccatccgtccaagttcaaggactgcctgaggaccacctacgctatcacgtcgctaacagacattggcacggccaccgtgggcttcctcatgttcggcgtcgcggtcaaggacgaggtcacgaggtccgtcatgttgtctgatggctacccgccgtttgtctacgtgctcatctcggccctgatggccatcatcccgctggcgaagacgccgctgaacgcaaggcccatcatctccattctggacgtgatgatgggcatccgcaacgcagagaccgagcttgagggccacaagctctttgtcgcacgtgccctcaagttgaccaaccgcctgctgatcaacgtcatgttcgttatcatagccattcttttccccgagttcgacaagcttatcgcgtttttgggggccggcctttgcttcatgatatgcctgatcctgccatgtctcttttatctgaggatatgcaaagatagggtcactcctagggagcgcatggcctgctacgctacaattgccgttagtgccgtgctctccgtactcggcgtgggtgcagcaatcctctcctgaacacattggccaccagccctgtgctgccagtcctggtgctatgggtaaccgcagctcgacctaggcagctctactagtagcatctctcctgtgcgctcatcgtgtggtggatagaactcacattccgcctgcacgcgctcggaatttctcgtccgtctaacggacgtaaccatccttacgtaattaatccgtccaggattacgtttccagtgatatgtaattgctttttttggagggaaaaatgcaatcagtatgctgaaaaattttagtagatatcgcttgtgatgagcagttcgagcgagctataggcgcattcatcgtccattctgcatagtgatggcgcactttctcgaggtaatcaaacagagtcccgcgagtctgctctcaaatgaagtgctggaatcgaaggaagctctggaagtggtgaagacgtacttcgacgatgtgatccagctgcatcgagacgccgaggggaaggcggctggcagcatgctagacgagattgtagtcgacgggctagatgccaaccaggtgtggtggcaagctaaaatggtgctggacaaggtgggggtggatttgatgacacaaattgcggagctgcgcggggccgtaggcgcggctgacgatgaagacatgggggaggatgcatctggggaggagctgagcggctcggagctagatgatgtagaggacgacgcggccgagagcgacgaggaggtggagggcagcgatgcggatggtgcctctgaggaggctgactctgaagaggccgactctgaggaggagcagagtttgcatgccggcttggaggaggacggaagcgacggggcgcaggacgaggcaggagacgacagcgaggagcgtggggcagcggccgcggaggccacccaggggcggagtagcgccaaggaagacaaatacgggctgaacgatgagtttttcgacatagaggagttcaacaagcagacattggcggctgagaacccagaaacggaggaagcgcaggaagaagagcaagatattgactattttgatgacatcccatctgaagaagacgaagaagcattatattacaacgatttttttgatcaaccgaacgcagggaagggaagtgcggccgccgccgacagggaaggggaggaatccggagccgatagcgcatacgaagatgccatggatagcgccaagcttgatctgtttgagtccgagggggaggatgatgaggacgatgtgcgcgacgcacagacgacaaagaaactttctacatttgagcgccaacagcttgaaatacggaaacagatagaagagctggaaaaagaggctgtcgcagagaagaagtgggctctcaagggtgaggtgaaagcgaaggacagaccagatgatgcactgctaacagaggacttagagttcgatagaaccgccaaaccagttcccgtcataacaaatgaagccaccgaaacgttggaggcgatgattagaagaagaataaaaaatgctgagttcgacgaccttccacgtagagtcataaatgacatcagtctgcattccaagaaaccagaaattgaactttctgacgtgaagtcttccaaatctttggctgaaatatacgaaaatgaatataaaggcatctcagaagatacggctgtttctgaggagttacaaaaggcgcatgatgagataagtgagctttacaaggacttggtatataaactggatgcgctatcctctgcaagcttcattccaaagccgcctcagaagtctttggaagtgagagtacaaggtgctactatatcgatggaagatgcacagccattgaccatgtcatccgcatctaccttagcgccacaggaaatctatgctgctggtaaggctgagaacagcgatgagatagcattgaagaatggtgttgtcatggctagagctgagttgactagggaggataagcagagattgcgcagagcgaacaagaggaaaagagcacaccagcttgcgaataaatcacaacagttgcaaaagaagtccaagaaagcagatgttattgacacactatctagggctaagaatgtcactatcattgacaagaagggtgagcaacgtgatgtcaagggtaacgtcaaaagtactcatcccaagaatattaatttgaagttgtaaatctagagatgcatatatgcagtcgtgcggctgctgaatgaatacgcggacccttctgggactggtggtttttacatgcattttgaatggcgtattatctcgttcgagatctaatatcaatgtttatatatataagtgcttactacgtcgattctttggacctattgaatagagccttggtgccctttaccacaagaggacaatagtgtttagtcaacaatgcattctcccatatagtagctgcatcaggattgcttctcgccggagtggaggcttccatgtagaacgtaccattccctatcctgtcattagtggaatatagccctgctatctgcggatacttggtcatcagcttatccaaaaatttgagtagagccacagttgtcttctcaggcgtatgttccatgcaaatatatagccgcttcgtaaatgcagcagctctttgttgtgtcccagacttggatctaaagaacacatggtctagtgctttgagaaggagctcggccttagtggaaacattgacagatggcttgaccagttcgttgttcaagggatccgccaaacgcagcgttttatgtgagaactcgacatcggcatccagagacaggtacgggagcacggagtataaagcatccacaaatgaagagagatcgacggaaagcttcatgtgtctatggttagaaaccaaagaaaatgcagtaacaatacacagtaaaaccttacgcacttctgccgaagagagtgcattcaagtccgcgtccgaaataagctctttcatgacagttagaaagtctcccaacagttccaggtttgccatatggccgaacttcgccaaaccttcaagtacagaacctatcaatttttgttggttagctttcaaaacatttagatataatgcgagaattaactttaataactctgcctggttcttctcacgttcttccgcagacactgcttgttctgccttccgcatctcctcttcgatctccttcatctccttcctcaccttacgctgcttctttgataaatgcaccctgtccttcttcttcagctttaccttagttggctcatctgttttggtattcgggtcatagtcgtgcaatacatcgacagaaagtagcgagttcagtacagattcgtcaacgttgtagttccgtactttcaaagtgcgcgataacagacgaacaatctcggcagaaactcggccttcatcatcctcgttcataagagtctccagaaccttaatggccttggagaaaacaggatcagcagaggggtttggcttgcacactcggcgcacaacgatagtcaggacctccgacataaaattgaaatgcgaaaagcttccggccagctcaacagccgcggttgccgcgatattgcccagtctgacctttagagcaggttcgttatttgcagtccgcgccagtgaagccaaatggtctatgtagagcttgtagttgtgtacaagcttctcctcaaagttacgcaggcgcgcgacatctttcgaaaccttctccttcttctccatctccgtcaatggacgaatccggtaccccggtatgatgctcttccagacaggtattagcgctagcatcgaaaacttgctagtattggggttcttggattctgccattttccgcaagcgtgtcagcgcggaagtgttctcttcgggttcctctataatcttttccaccagctccgcaatcagttccttcatctccaaaatacgctcctctgtatctggttcctcgtcctcctcgtccgcactctcctcttgtttgctctcgtcctccgacttctctgaatcatcctctgacacctcattgttctctggtgcccgttgcactaccctcatcttgcgctccagcttaccattgatcttaatcggcaacccttctaccaattcatgttcactgtcctgcatcctgcgcggcttcaattcataatcctgctcattatcctcccatttgccgctggctatcttcgctggcatctcctccccgatgtcaatagagttgacatctgcaccaaacagcccattttcaagctgcgcatcctgtagcttgcgcttcttatcggtacgctcctggatagccttctgggaacgcttcttattggccatctttgaatcgtatctcgatgagtccaatctaagtatgcactcactatgattgtagctcatcgcgttgcaaaattttccacattaaggtacattgctttttattggactatggacaggttcatgaagttgagcctctgtcgtagccgagaaggcatagtaatgcttccttagtctgtgggttggtatcgccagcaatacctctatattaggaccgtacgcgtagtctacatggttgcgagatcagcgcgcagcccatgttgaagtcaccccatggcttcgaagtagtatcgttgaacccccaacctagatcggaagccatcgacacctgtcagatggtaaggtaccactaggcagcggacgctgcggcgtaggtttttgtgtgtagccactatgggcctgtggggcgggcggccagccggactgttagtacatacgtatgtagcatagagtaacgtcttagttggaatagtaaaactcacgatctgcaggcagaggttctctcgcaggtcgagtggtgaaggggactggctgctctgtaattggcgctcggacgtctgtgctctcccatggctttttgcgtggacacaactttgattcagagcactgcgactcatcatggacctggtcagccacctctacgaggttcggcactggtttcccattcactataatatcaaccagctgatcatagctcagttcttggggttcgtctggctgttcattggaaccatcagatgcactcatcttcccgatcaacgtcccgcgtctaggcaggtggtggtaactattgtcccgtggcaaatttcaatgcatctaatgaacatggccttatccacccccaaccacggcgcaagacatgaaaagggaagagtgcttgcttgtgcttgctgggctattagcaagggtggggttcttcagctatggcatatatcaagatgcacacttcgctgtgaaatacacagatatcgattaccatgtgtttcacgacgctgcgcgctacgttgcgcaggggaactccccctaccttcgcgatacatatcgctacacgccgctcctgagctggatgctcgtaccaaaccactggcttcaatgggttcattttggtaagttcatcttcgtcttgttcgatcttctcgctggagtcatggtaatgaacctgctcgggaagtgcgggaggcgccgcaagctgatactagcctcgttgtggctattaaacccggttgtaattacagtcagtacgcggggaaatgccgagtcagttatggccttcctcatcatgtggttcctggtacacttgagaaatcggcagttcgcgctgtcaggttttgtatacggcgtcgcaatacactttaaaatatacccaatcatctatgcgctgcctatttctatctatatacgctcgagtgagggctcgagatggttcttaaggcttctgaccatgggaattgcgacactggcgactttggtcgggtgcggtattggcatgtattacatttatggatgggagtttctggaacacgcatacatctaccactttactcgtaccgatcatagacataatttttctctttggaacatgctgctatacctcgattcaagcggagtcgttcctaccaccattaattgggcggagtttgcctttttgccgcagctcttcatctgtgcagctgtcacctatgttttgtgggaggctcctacgttccagaatatgcagtgtgtgctgtttctacagacttttgccttcgtgacctacaacaaggtgtgtacctcccaatatttcatttggtatctcctcttccttccatcattccttcttgatactacgttatctggagccaagggcatatttctgatatttttatgggtcggtacacaggcgtggtggctttataacggctatctactggagtttgaaggtaagaacatgttttacccaagactcttttccgcctgtgtcacctttttcctagccaatgtgtatttgctagcccaattcatcctggattgcaggcgccgcaactaccagacgaatattaagaagactaactaactgatgatacctaaatcttgttaaaatatgtctatatagatatgtatcaacttacgcaccagccatgtgtgtctgtgcatctccgtgtacctgtggactatcggacaaaatttctgtgcccatagtgccggacaaaattttttcaatgttgacgagctccaggatcaagcgtagaactgcatcgtcccactctcttcaaataaaattcccaaggcaacttaagagaaagtatttgactctattgtgcgatgtttaaaactgagatctactcgcctgagggcttacgtttggatgggcgtcgctggaacgaattgcggcggttcgaatgctctatcaatacacatcccactgcggcggatggctcatcgtacctggagcaggggaataacaagctcataacgctggttactggaccccatgagccagcattacgctcgcaggtgaaccctagtaaggccacgctaactgtcaccgtgaatatgaccaaattcgccgcggcggagagaagcaaaactggacacaagaatgaaagacgcatcctagaaatgcaaacagccttggtacgtacttttgagaagaacgtaatgctgcaactgtatccacggacagccatcgatgtgcaggttcatgtactgcagaatgacggaggagtgttaggctcgatgatcaatggtatcacacttgctctaatagacgcaggaattgccatgtatgagtatatcagtggtatttctgtcggactctatgataccacgccactcctggacttaaatagactagaagaacaggccatgagctgttttaccctgggtgtggtgggcaagtccgagaagctttctctactgctggttgaggataaggtaccgctggataggctagagagtgtaatgtcacttggaattgcaggcacacacagggtacgggatatgatggacaaggtcctgaggcagcatggtaagataagattagaaaacagtgtagcaaattaacatatattacttggcatctatgaagtcagatagaacatagtacatacaaacccaggttaataagatcacagtttctttttgcctatggatgaaagtagaccttttgcaccttctttcatgctatgagagaacaccttctttcttaattgtgagacattctggtttacagcgtttgtcacgctatgtttcttactcacctcctcagcttgtgcataagcatcttgtacatgcttactgatgacatactcatcaaaagttatattggaagaggattgagtagattttaacgcatactttatccaggtctgtgccccactgctgtaagcgttgagatcctcaatatggctgttaagcttgtctcgcttaaaagaatgcgactgtgggccttcaatcaacgcacaaatatccaatgaaggcaccgggctattaactagatgttcaacttggacttctggtgtctgaccaaagttttccttgaacatcgatggttttggagcatggcgttgtccttcaacaactctcatcaaggaatcggaatccaatccacttccggaggtactttctgacaagatactcgtatcctgtctactagtcaactcggacatactactaggaagaggtggaacactagtacttgaagttataattccaggtacattgtacaatgtctggttgtcataaatggttttaatgtcggcgaccgattgtaaatcttcgtattcacctacgcttggaaagccctcccaaacactatcagaatcatcgttgcagggttctgcaagctgttggtcatcgcctgtcgtttcttcgtcctgagaaccgcacatgcctttgttggtagacatcggagatgcttgtgttagaaaagctccccgtttgccttcggtatcagggttccaagcacccagatgtactgattgctgccttaactggttttgccaatcttcattatcgtctttaataactggtatcgaatgtgttaccgatccagaagtgcttttatcaaaacttctttcacggatagtgtcgtgaatagtgtcgtgcgaggaattatcctgcgtaactagtgcctgggatgtagtgttgtcactttcctcgctgtaataattatcccgaacggacgatttcgacgtgctgtcgtcgtcagagataactggtagctcaatatgttcctcttgctcgacaaggggatggggcgccctagccgggctgcctgttctgcttctatgtccatggaatgttgccgcatctgaaatatttggagatggctgatatgaaaggtagtcatcctcgataccgctgtatgcctcactgtcatcttcagaagaagtatcatatctataagataagtctgtcttggaagttatacgcaaccttggcgcaacctcgggagcgatcgccctgtgtataaccgtctctactcccgagctgactacacgggcagggccggaagccccatcggctctgaacttggcatcgctcgttataagttcagggaggctgtcggtatcatcgtcacttgaattggtggtctttagccttgtattctcaccggctgtgcgatccacggccagtaggtcctcggaacggctacttaatgaaccttcgctcgcgcggtcgggactcgcgcctttcttgagcgcaagggagtcgcggccggcggggagagcactgctcccgcgcggcgaagatagaggcattgcttggccagatgcagtgtctgtcttcaacgacatgttcaaatgctcgaagctctgtgacagtgaactcccgccggcggcgtcctccccgtcgctgtccgagctgtcgtccgcgagatggccctccggcttcagagcgggaactcctacgcgattaaagtctaccggcgactggcgtgtttccacaagcggaggctcggacccgcccgcagtcatctctttcgatatttcgtccatgagggtatccaattccttgttcatcgacgacacagagcggctcgacgacgtgagcgagaacttctgtgcggcggcgccgctccgcggcgtctgcacctcatgagccggcgtcgccgccccacgtccgctgctggccgcttcctcttccgctgcgccccgcggcgccagaccgtcgccgctgcccggccgccctctctcttccgtgctgcctcccaggttcagcttcggcagctccggcagcttgcagattgtctcgtgctgccgcgtcggcgatgactcgagctcctctccagagtagtcgctatcccagtccgcaccgtcgtagttgcccttcgaaactgaaacccacctctgcgacttcctcctattgaccttgtcgggcatcgtcctctgttaccagttcgtttctaaaagtacctcgtgctatgctgcctaagctgtgtgccactgcagatcactaaaacatttgcagtcgtcgctgtcttctggcagcctgctaacaaggcctcttccatgcgctgcaaaaaagaaagagatcacgaggtactaatatatgttacatagttgaggatgagttgcaccgcaaacgaaacgatgggagatatgaaatgtatgtatttatctgttcatgttggtctcagaacgtaacttttgtgtctggcggataaaatggtatttcgatgcccttctattcaaccggactaaatgtggatgtccttgccgcttgtgaaggagatcagtagatagaaatttaatgcagaaacgaagacccacagcaaccaagcgagaacgttcgtcagggtgctgttactcatatcgcggaagcctggcgcaggcgatgcagaagatgcaaggggggggagcgcagagcggtcggattcggcagagtttggcctcagggttgtgagcggtatctcgtcgtcgggaagcacgtggtagcaggtgttatcgaggggaactcgcataatttgtttgttgccggtaaagtatagcagcggggcagacacgaatgggagaagcagtgacagtacgacctgcgaggcgttaagggctgcggaaaggccggtgcgacccgcgacaagcacgaggatcagacacggcgtaattgcgacggcgcgcgtgagggtgcggcgcacggacggcgcgatggtccagctgagaaaaccctcggagaccatctggccgctgagagtgcacacaattccggcggactgcccggaaaagagaagcgccagcacgaatatggtgccggcggccttggagagcgtgctgcagagcaggttgtagatggagaacaggtcgccggtgtcctcgtccgaaagtctgccgtgcaacgtggcgcccgcgaccacaagaatggaacagtttacgaacagcgcgaccgtgaacagcgagaccagcagctcggccaccgtgtagtgcattgcatcgtctatagcttcgagagatggcttgtaattggggtggttgttctcgcggtcatggtcgctgggcacatagtagcccttgcggatgtcgaagtcgcgcagccggggctgcaccacgcccgagccgaggtacagtgagtgcggcatgaccgtggcgcccagtatcgccaggctcaggtacagtccgtcgccctcgaacactgtgcggctgggcaggaagccccggagcacctcctgcggagagcccacgtccaccgagaagacctccaccgtgaagcagaccacggttaggatgaccagtagcgacacgaacatctcgaaccagcgcaccacgcgcagcgatccgttgggtttgtacgccatgagcaccacgaggacgtccaccactgtgagcaccacgcccagcggcagcgggatgccgaagagaatgttcagcgagatcgcagtgcccaccacctcggccaggtctgtggcgatgatcgccatctccgccagcgcgtacagcacaacattcacgttgtgcgggaagtgcgcgcggcagttctgcgccaggtccagccccgtcacggcgcccagcttcgcgcacagacactgccagaatgccgccagcaccgtcgacaccagcaccgagaacagcagctggtagcggtgtgcagaccccgctgcaaccgcggtcgagaagttcccggggtccatgtacgccaccgacaccagcagccccggccctacaaaacgcacgtatttgcccaacacgcgtgccacgccacgcgcccgctgccacatcctgtcgctactaccgccgtgtgccagcgcagctgtgccgcgctcttccgccgcagacaccaatcgctccgcttccacctggtacattgtctgctcctctctgtgagtccgctgcgtcttactcggcggaactctgctggaactactgcggctaatgcgcatgcagctgcactgcgtctgtagtatgcggcgaagtgcaatcgcccttgtggaactgtcaaggccggtccgcgccctgggccgggtaacccctgcccggacgcccgccaccggccgcgccgccgcaccgtcgcccggctgcggccgcactccacgcccgtcacgaacgtccgctgccgctgcgaacgccccacctgcgcttccgcccgcagcgccacgtagtagccgcgcctctcccggcgctgcgtgaggcgctgcgcgtgcacaaagtgccgtgtcgggtaacgccgcggtgtgcgaaaccgaacatcgtctaagccgggtgacatggtgcgaaaccgattatctaagccgggtaacacgccgcgtttgtgtcacgtgctgtggtgaaccagtactctctagaatcttcgccagtaagtgctacgtggccgctacgtgtcaggcacagagaatcagcgcaggtgcaagtgtggtaccgcggagggaaggggacttacaccgcggtgttcggatgcatggaggcgaatggaacgccacccatcgtacctcgcccacatatatatatatgtttagcggtagatttgtttatggtagtcagtatttgcacagggacagtcattctagtcgtaacgcaaagcttagagtgatccagaccggtggtggcgacttgttggaaataaggaacagtctagacagctacgggatacactgaagcatcaaaacatggcgtttggcaaagtatcaaactgggcggtgccgctgacggcgctgatgtatgcaatggcgctagtgtgcttgccgatgtttgcaggcgggtcgcggggattggtgtacgcggcagacacggacgcggagaactatggaacggtgatcggtattgacttgggtacgacctactcgtgtgtggcgctaatgcggaacgggaagacagagattcttgcgaacgagcaggggaaccggatcacgccgtcgtacgtggccttcacggacgacgagcggctaatcggtgacgcggcgaagaaccaggtggcaaacaaccccaagaacacgattttcgacatcaagcggttgatcgggttgaagtacaacgacaagactgtgcagcgtgagatcaagcacctgccatttgaggtggtggacaagaacggcatgcctgctgtggcagtgactgtcaagggcgagcgcaagttgttcaccccagaggagatctccggtatggtgttgggcaagatgaagcagattgcagaggaatacctcggcaagaaggtgacccacgccgtcgttaccgtgcctgcgtacttcaacgatgcgcagaggcaggcgacgaaggacgcgggtgccatcgcgggcttgaacatcttgcgtattgttaacgagccaaccgcagctgcgattgcatacgggttggacaagaccgaggacgagcaccggattgtcgtctacgacttgggtggtggtaccttcgatgtctccttgttgagcattgaaaacggtgtcttcgaggtccaggcaactgccggtgacacccacttgggtggtgaggactttgactacaagttggtgcgccacttcctcaaggttttcaagaagaagcacggcgtcgatgtttccagcaacgcgaaggccatggccaagttgaagcgtgaggctgagaaggctaagcgtgcgctttcgagccagatgtccacccgtgtggagatcgactcttttgtggacggtattgatttctctgagaccttgaccagagccaagtttgaggaaatgaaccttgacctattcaagaggactttgaagcctgttgagaaggtcttgcaggatgctggtttgaagaaggaggacattgatgacattgttcttgtcggtggttccaccagaatccctaaggtgcaagagttgttggagaactttttcaacaagaaggcgtccaagggcattaacccagatgaggctgttgcatacggtgcagctgtccaagctggtgttttgtctggcgaggaaggtgttgaggacattgttttgctagatgttaaccctctaaccttgggtattgaagttaccggtggtatcatgactcctttgatcaagagaaacacccctatcccaaccaagaagtcccagattttctccaccgcagtcgacaaccagaagactgtgatgatccaagtctacgagggtgagagagctatggccaaggacaacaaccacttgggtaagtttgaactaagtggtatcccaccagccccaagaggtattccacagatcgaggtcacttttgctcttgacgccaacggaattttgaaggtttctgccactgacaagggcactggtaagtctgagtctgtcactataacgaacgaaaaaggtagattgtccaaggatgacatcgagagaatggtcgccgaggctgagaactaccagaaggaggacgaagagatcagggcgaaggtcgaggctcgtcataaattggagaactacgcccactcgttgaagaaccaggtcaacggcgacctaggtgacaagctagaggaggatgacaaggagaccttattggaggctgcgaatgacgttcttgaatggctagaggataattcagactcagctaccaaggaagaatttaacgagaagttcgagtctttgtctcaaactgcttatccaattacttctaagctttacggtgcaggcgctagcgatgctactgatgacgaggatgacgagtctgatgactactttgaccacgacgaattgtgatttaatctttatgtggcaatctgcgatttaagatctgccaatggtgtacgctaaagaggaactaaaacgtaagatgggtaataaatggtaaaagagaataaaaatttttaaaaaaagacaaaaaaaagttattgtcaagtacacaataactgctacttatttgtttactggcattctgcattactgtgcggtattactgtgttttgtctttttcccttttattataaatccaaaggttatctattggctaaatctctcgcgtgttcatgtcccgcagaaagcgtttagtttcctgttgtagttttcgcctagagcacctgtgctcgggtggtcccttttaaacttctgacggcttcgaggataaaatagaaataattgcgagcaggttcacaagttctgtatatagatattaaccgacctatgctatatacaataatatgttacggtttggtatacttactccgccacgaatacaagttcgtactccgtggcgtcactcttgttggccaactccagcacatctccgctgtgcagctgtacgtatctggcagaaggaaggatggccccgtttaagagcgtaccgtttgcagagctgagatctagtatatagggcaccagatacccttgttttaggcggaactggaagacacagtgttgtttcgaggtcgattcttccgggattccgatatccgccaccaccacctctttctcctcgtctgggtcttccgctacacggcccatatctcttccgattatgtatgcgcttttcgattccaacacccatgatttgaaagcctgatctccagcaccttttctgtagagaaacagctcgaagagtgtgcgctgaggccgcgccactttccattgattaaagtaagcttctggcgaaaccgcatccggcggctccacatgtttcagcgcgaggccttgttcattgttagattctagggctagtaagccagatggctcaaatataggcaatatcggtcggctatagacatttcttggacgttttatcgcgcggtcatggtattctctaggatactgatcttgagtgtgatactgttgccgcccgaacctacgttttgacattgtctgagggccgcgtatacccccgtcaactgacatgagaaggaaggctgattccatcgttttcgacgtccacataaattcatgttggcgataaaaagaaacgaccatactgaaaaatttgaattatcgtaactgcatgggctcatcgcatgaatagagaacagacatttcatagcttctcgcagtaataggttgactttctaagctcatatactcgaagatggcaaaaaagcatagattgacaactgtaaagcggaaagagcttcgtcagaaagagtctgaagctctgaagcagttgcaggagagaattaaggattacgacgccaaaacatgcagagcggtaactttccaggatctccccataagcagcgggacagtaaagggtctaaaggaggcagcgtatatcaagatgacggatatccagcgagcagcgatcccagtagctctcaagggccatgacgtcttaggagcggctaagacagggtccggcaagacgcttgcgtttcttgtgccagtcctcgagaagttataccacgagagatggaccgagctagatggcttgggagctctggttatctcgccgactagagagctagccatgcagatctacgaagtactcgttaaaatagggaagtatatgagcttttcggcagggctggttatcggcgggaaggacgtaaagtttgagatggaacgtgtctcaaaaataaacatccttatcggtacccctggcagacttttgcagcacatggaccagtcggtaggtttgaacacttccaacctgcaaattctggtgttggatgaggcggataggtgtctcgacatggggtttaaaaaagcactagacgccatcgtatcaaatctgcctccgtcgagacaaacactactattctctgccacccagtcacagtcgcttgctgacctggcgcggttatctcttgctgactataagactgtcggcacgatggatggcccatcttctaagaacaagcctgcgacaccagagaatttggagcaattctacattcaggtcgctcttccagataaactcgatatacttttcagtttcatcaagtcgcatttgaaatccaaaatgattgtctttctgtcgtcttcaaaacaggtacactttgtctacgagacgtttcggaaaatgcaacctggtatttccctaatgcatctccacggtaggcaaaaacaaactgcaaggaccgaaacactcgacaagtttagcagggcgcagcacgtctgcttattctctacagatgttgtcgcgaggggcattgacttcccttccgtcgattgggtcattcaaactgattgcccagaagatgttgacacatatatccatagggctggtagatctgcgcggtatggaaagactggaaaatcgcttctaatgctaacaccgcaggaggaggacgcatttctggcgagactgaaaggcaagttgatagagccaagtaagttaaacatcaagcagtccaagcgcaaatcaataaaacctcagcttcagtcactcctattcaaagacccagaactaaaatacctcgcccaaaaagctttcatctcctatgtgagatccatctacatacagaaggatactgaagtattcaagtttaacgaactcccattggaggagtttgcggcttccttgggtttaccgggtgctccacaagttaaaattaaggggaagaagagcattgagaaggccaaagagctcaaaaacacctccaggcagcttctcctgttggcgaaggctaacgacgacggcgaagtcgatagtaaagaaaagacagtacgtacgaagtacgacaaaatgttcggcaggaagaaccagactgtgctcagcgagcactatatgaacattaccaaaacaggtgctgcagacgacgatgcaggtgatttcatgacaatcaaacgtacagaccacgagctcaacgaaaatgatctccctcagctcacgcttcctacctcgaagcgtggacagaagaaagctctctctaagaaagcatccttgtccagcaaaggcaaccctacgaagttcaaatttgacgcagacggcgtaccacaccctatttatgaactcgaaggagaagaggagttccacaagaagggtgatgtcgacactcaggtgaaagagttcctctcgaaggagacagagtatatggctcgtgctgataccgaagacaagcagctcgtgaaggagaagagacaggaaaagaagcgcaaacgtctcgaggccatgcggcgcgagatggaggctcttcaggacgacgatgatgaatacgatgcacctacggtcgcctatgttggcacgggtaatctaagtgacgacatggcgtccggcgacgaacctgattttgcgccagcgtcccctccgccacgcaagaagctaaagggtcgctacagcgaatctgctgagtccccagatacaggtgttatggaggtggaagaaccagacactctagaagaccttgagtcgctgactgcccgcctaattagcggttaactggcatatatatgtaccttcattacatagatctactggcattcgccatacctttagcaccagaatgagtcggagtcgggcaggctgatataatcaggtggcattgcatcgtgcccagctccgttaaagatgattttcaaattttcagctgaaagccctaccaactgcatgacacactcatcgtctcgttaacagcaccaactgaactgtactgttcggtgtggccatatatatctgtcgaagtcggtgaatatagatatttattgatcccagtatgtcttccacggtgtatcagagccagctaacgctgtcgcggccctatttgaccaaggaacaaatcagacaagcacaaaagaaaactatcacggaccgtcgaacatacaaccaaaagcgcatttcggtattcaagttcctgtgtgacctatgtgtacagctcaagtttcccagaaagacgttggaagtagcaatgtactattaccaacgatactacgtcttcaataagttcgagacagagatgtgctacgacgttgccacaagctgcctattcatcagctgcaagcaggtcgagacagtgaagaaggttgcagatgtttgtagcgcttcgctaaagttacgcaactccctgaagttgagcatggaaaaactagaaagctacaagacaaggataatacagatggagctacggatccttgagacttgtgcatttgatcacaggatcaacaataccgtccatgtggacgaatacatcgtcaaaattggccgggagctctcgctagaccacacggtctgccacctggcctggctgatagcctttgacgtgatcaagctggagataatattgatcgttccccagcataccatagcgctagcagtactaaaaattgcatgtgaactgctgcagaccgatcagtggccgaacatccggtacaacctgtttgagagcgacgaagattccgttaacgaggcctataactacgtgctcaatttcttcatcaacgtgtttgacatatgtgatctgaaaaacagtctgccgcaggggctaccaactattagcatcgaggagttcatgaagctgaaagccaagtctggagagggcaaggggctgaaggaaagcttgccatccatagaaaaggataagtacctctcagaagagcgtgattataaaattagagagaggcgttatgtccttaacaggaaaagagtagcagaggaggctatgcctgccggtcctagtggggcaaagcggacgaagtgacggatagaaccaccaacttggcatttcctcatcagagtaaacttgtattattatcatatatagattaagcattctctaacatgtggatgtatcgattgcgccgcatgctatcaagctctattaatcgttcaaggtggtgccgccgctgcgcgggcgactcctgctgcgtaggcgcaatcgagcctagaaacaccagcatcttgaggcaccatatgttctctctccccgagaactccagctcgtcctggttgatggccatgatgttctccctgaattttgtcagcatgcagtcgtagtcttgcagtggcatatcgtcgcgaatgcacgaggcctcggcaaaccacttgagatacatccacaccgactggtcctcggcgtccgtgtacatggcgttgatgatgtacgacgcttcctcctccgcaaaccgcgatgtgtctgcaatcttgccgctcgcgatcatccgcgggatgagctgcgccctctggtaccacgcgctgaagttggagatgttttcgttgatcttctcggtcgtgaacgacagctctgcagagtccaggctggccccgctgcgccgctccaactccctcaccacgactcgccggtagtgccatccgtggaagttccgcggatccagctccagcatcttgcctaccagcgcgagctctcgcttccacaccgccgcgccctgttccgcgtggtgctgcaagcaccactgccggtggttccagatccagtacaccttcggcgactcccgcagatgcgccatcgtcagcttcagctcggcctcccagaagccgccgtcaagctgctcccgcagcgcggcaatgatatcccgtcggtagttccacaccgcgttgaactccccgttcatctgcagcaggctcgtcgtctccgccagcgcttccatgctataagcgcccgcatcccgtagccgcagtacccgtgctgtctggtccctataggccttgatcctctgcttgtcctgtgctctcttctgtttcagtgcttcttgagtccatagtcttcgtttaaccccatgctatgttgttgttagacattcgcccatgttttgattccctggagcccagataaacataccatcaggctttttgttggctttcgcgtgtattgcttcgttttggagtggaaagtagaaggtagttcccgaaatgtaaaacgtcaccacttcaccaactcaacttacaccgtgaagtcttgtacacagccgctataaaatcaagagggatcaggtgctatcgatatgtcaagacctatttcgctaaagggctcaacacgtatggtaacggaattcttcgagtatagcataaactctatcctctaccaaagggctgtgtacccccccgaggatttcacaacagttaagaagtacgacctgaatctgctcaagacgcatgatgaagaattaaaggaatatatacgtaaaatcctgctccaggtgcatcggtggctgctcggagggaaatgcaataaactggtgctggtgattctagataaggacgagggcgaggtgctggaaagatgggaattcaatgtgcagcggagcgagcgggcaccgcaggaggctgcgctcgagtccgcagacctggaggagacgcagaagcaaattcgggcgttgatacggcaaatcacggcgagcgtgacgtttctgccggagctggcgaacgaggggaactacacgttcaacgtactggcatacacggacgcgaacgcgaacgtgccgatggagtgggtggactcggacgcacgcgacatcgacaacgcggaggtggtccagttccgcaacttcaacaccggcgaccacagcgtgaatgcgcaagtcagttatagattcaacggctaagccgttcaccgtgtatgtaagctacaaaagtaactttcgtaaatgcattacacttacccacctctgttgaagaaccttgtgttcgagacgaggttcttgagattctcgtttatacttttgttacgggctgggccgatattggatgggggcggcgtcgagggcctgctgctggagcgcgaggagacaaggcgcagttcctccgaggcgaacgccttccagcccgggtccacgaccttcagcattgccgcaacaaagtggcggaccgtgctttcgtcgcggtagaagatgaagagatcaatgctactttctgtggcactcgtctcgcgcgtcttgaactcttcccagtatgtcttccactcgctgatctcccattgcattcccttgagtgcgaacaccaatgcccacaccgcgtggtttttattgttaatgatgccgaagtactcatcgtggtacgaggctggcgagtccaatggcacggccagcactttacacagggcggataattgggcaatgttggtgtcgatatgccgattgattctattgttttgagtggctttcccgtctggcagaccttcaggaagctttttcaaaatacgttccagtgactgacagtcaagcagaagttgcttaccaatgcctatgacctgtgcgacagtgaactgtctcctgcttttcatgttaccaaagggttcctttggaaccagcagttttgtaatgcaacgtagaaactccgttgttacgagttcggttattctatccagcatattccaaacaaaaacatctctattgaactgcgataatagcttgtgcacgagggaatcaccctgcacatcatccggtgttagaatatgttctaacgtgacaatgtacctgctataaccctcaccaagcggatgtctccagtcggagttcgaaaactccctccatgcaaagtgcagttcaggcgacaaaatgtgcgtcaacaggaactgtaaaccttgcgacactaacaaaccgaatctcgacttggccttatcgaattgttttgagatagtgtcacccgaatccacatattcttgtaatttttcctcaagctgtcctgcagtaatagagcagtaatcggcggtattgatcatgagtattgtgtactgtataacctcatccttttcttccattctagcgttctcaggaagtaagagaggctgtagtatcttgttcgagtactcaattaaccatttggaaaagaacccagcaaggtcagagaggactgccgaccttccttctccatccgtgagctctaaggtttggctcagtatttgacggtatgttcgaaacaatgccgcgctggatggcactacatgcgagtctgacgagttcgggagttttgtctcgctcatataggccagcattttgctgttcataacctggtcatgatgggagagccagagcgacagatgaggttcgaaacaggttgagatcttttcgtgggttatgttggagagtttattagagaactttattccaatatatttttcaaagtcgacagtcgcttgcagggcttccatgaacaattccaaggaaggcgtcttcttcatctctctgtcgagcagtatttggatgtcatgcttagtaaaaataaagaacatcgaggtgagtctcagaggcatttcccagctagctgggaagtacgatgcaaagtttgcctggaaattgttcagcacccttttaaagaaaaggtaacgtcgtgatatattctcaagtgaccctgcctcatcgtcaacctgaaatatctctctaatttcccccaggatcttatctaaagaccaattgatgacttcaaacttatcagtggggttggattccagcaacacacatgcaccttccttgaaagtcgcctcggtgacattgagggtctccttgctctcaaagagctttcgataaagctgtttgatagagtgaatggtgtcatcttccaaagcacgtatcagctcaagcaggcgattgatctctgtcacggacttgtatccttggaacatatcactaagagaggtcatcaccgcatagggtgcgctcatttccttgaaggactgctgctcgagatagtgcttgcactggcagtaggactcgctcaggtcattgaggttctggaaccacgccatagagtgcgtcaaattcttcttcactgtatccaggtacgcaatgtctttcgttaaatccgagatggtcgattccgtacttttcgataattgctgcgttctctcaaccttgtgaatcagctgatccagttcatcgtctgcgcttcccagcggcgagtctgctaattccctttcagccttaacctcttcatgcaatcgtagcttatgctctctcgtggccactaacagcttgtccaggtggtcgagcgaatcaattccagataatatcgttacaaggtcctccaaaggatcatagtcaggcttatcgcaactcatcctaccagaacggccttccagcgattactttgcccgacgtgttaactatcggtaggtaacatgactgggaaccactatcgactacaccttttgaagtaccaaaattacacgttaagtataaaaaatgctccaggggaggttcgaactctcgaccttcagattatgagactgacgctcttccgactgagctactgaagcagtaataaagatattgaaggaacgatctaatgccgttaagttggccactccaaggcacgagcacagaaatgctgtcgctgggtactgcgcccaggtattatctgccactagaagctacctgcagcatgatataggtggtatttcagccttagagccctgcagctcccttttagtcgtgttacacgaagtgagcttcgaaaagttttctatgagtttttggtggcaaaagatgggtaaaatggtgacaagatcacctcagagttcccgaacttacaagtctagattctgttcaattgaatccattctacggagcttataaacatgtctctgaagctacctcaaaatccgaatgccggcctcttcaagcaagggtataacagttactcgaatgcagacggtcaaattcaaaagtccattgcggcgattcgcgaaatccatcagatgtgtttgacttcgatggggccttgtggcaggaataagatcattgtaaaccatctggggaagtacctgatcaccaatgatgccgcgacgatgctacgtgagctggagatcgttcatccggccgtaaaggtgcttgtgatggccaccgagcagcaaaaaatagacgtcggggacggcactaacatggtcatggtactagcaggagagctgttgaacctcagtgaaaagttgatttctctggggctgtctcctgtggaggttattcagggctacacaatggctaagaacttcactattgaggagttggataagatggtggtccaagaggtcatcgacaagcacgataaggacgagcttattaaagtgataaaacctgtgatatcttccaagcagttcggttccgaagagctactcagcgagctcatcgcagaagcagtaagctatgttttgccgtccaaatccaattttttcaacgtggattcgatcagggttgtgaagattatgggaagctccttgtccaactccactgttatcaagggtatggttttcaaccgtgagccagaaggccacttgaagtctctgccaaagggtgggaagcacaaggtggctgtgttcacttgccccattgacattgccagcacagaaacaaagggtacggtcttgctacacaatgcgcaggaaatgttggacttcaccaagggtgaggagaagcagctggatgcaatgatcaaagaaattgcagacactggcgtgcgctgtgtgattgcaggcagtggcgtcggtgaattggctctgcattatctgaacagatatgaagtcctcgtcctgaagatcccctctaagtttgagttgagaagggtatgccgcgtgtgcggtgctacgccaatgccacggctgggcgcccctactccagaggaaatcggtgtagtagagactgttaagagcatggaaattggtggcgacagagttaccgtatttaagcaagagtcggaggaaacgacgagaactgccacgattattctacggggcgccacacagaataacttggacgacatagaaagagccatcgatggtggagttgccgccatcaagggcctcctcaagctcgatggcgggaagctgctgccgggagcaggtgccacagagatcgagctcgtgtctaggattaccaaatatggagagaagacccctggtttgctacagttggcgatcaaacagtttgcgatggcattcgaggtcatccccaggacgttggcggaaactgccggcctgaatgtcaacgaagttctaccaaaccttcatgccgcgcatgcacctgctggcgacagcgcaagcactgacgacaagatataccagggcattgatatagacggcaccacaccagagggtattgtagatatcaggaatgaaggcgtttacgacatgctggctgccaagaaattcgcaatcaacgtcgcaaccgatgctgctaacactgttctctctgttgatcagatcatcatggcgaagagagcaggcggccctgcagctccaaagggaccaaaaccaggtaactgggatcaagaagattgaaccagtggttcctaaatcctggcaactgaagcatacctatgtaaattagtaagcagttatttacatgtctgaagaacgttgtgatgctattatgtgtcgtgtgagtttatatcagcataatcgaaaaaagaaacgaacttgatgaaaatttgaatgtagcagctagcggagctatagttcgcgatgagattaagaagttaacaagctggagtagaactatcagctgcgcgaactgtgctaccatctataacctcttgatataatggcaaagcaaagaggaagaaagctgctacagaagcagaataaagacgatttcaaacactcattggatcaggaaagacatgaggaagaagttattcaagtcccagttgacaaagcgccggccccaatctctgcggatggacctaatacgttctttggaactcttgacactcaggagctagagtattttaagcgtgccgagtcaacaatggccgttgatacctttgagagtgcggacgaaaagtaccagtttatcaacagtgtcatcgaagagagcaagggcaaggaactgaagctcgccacgtcgcaaatctgttcgaaactcatggagagaataattttggcggcagacgaccaacagctgaaggccatattccagggaatcaatggcttttttgtcaatttgtcgtacaataagtacgcctcccatgtagtggagacattgcttgtgaggagtgctgcgctgatcgaaaaggagcttctgacgcctgtgtttgaggcggaacttgacggcgatgagcaagtgtatgcatctatggaaaacatgtttttatttatgctgaacgaattgaaaccccatatgaaaatgatgattaaccatcagtatgcatcgcatgtgtttcggttgttgatcctggtcttatccgccaagaagcttccaaagagtacgcaaagtaattctgcgctgcggtcaaaaaaatcgaagattgcacgtaagatggttgatctgaaggataacgctgatttcgacagaacatacaggaccccagactcatttaagctcgaactaaagggaatattggttatgctatacaagcagtttacaaatggaattgagccgggcaccaaacactccgaagtgaacatcgcctgcgtgacgaagtttagagaatactgcgtggacaaggttgcctcaccggtcatccaacttattatccaagtggaaggtatcttcgacagagatcggtcattctggaacctggtgttttccaacacagaacaaaatgatccaaaagaagaatcgttcatggagtaccttctttccgactctgtcggatctcacttcttgcaagcagttatcggcttcgctagaacaaagcaagtggaaaggctgtacaagctatacatgcaggaccgtattgtgaagctcgctaaaagagatacaacaggtgcatttgtcattatgtcattgctacaaaacttgggttcaaaggaggtcaagagcatactagatgatttggtgccggagctttcgatcttgttaaactccaacctggattttggttctgagataattgaagcctctatacgccaaggggattacaagaaaaccgaaattgtggagcaattgggcaagaaatactatccggcagattcagagtcaaagaacatattagagagttgtctgcagcttgcttcatctaccctcggtaacactaaggatgactggcctactgcagatgagagaaggagagccttatttctggaaaagctaatcaattttgatgactacttcttggaaatcgccgtggagtctttgttgaacctcccagaggaacgcattatgcagatgtgctaccatggtgtattttctcacgtcgtggaacatgttttacaagctaaaagagttgagacggtgaagcgtaagctattattgaacatattatacaaagatgccgtgaatcttgcttgcaatgcctacggctctcatattatggataaactctgggaattcacagccaaactgactctatacaaggaacgtattgccaatctacttctggaggaagcagataaggtcaagaatagtatatatggcagacaagtatggaagaactggcatcttgaactatatgtgagaaagcggtttgactggcggaagaaggtcaaggagcaggaattggaagtattcccagactccaagcccctacaaccaaagcaaaaggaatcaatccctgctaagcgctcggcaccttccaacaaccagagacctggcagcctaaacaagaaaagaaatgctgaaaagcatcatacgtagtcctctacacaattcatagacagctccaaggataacttggatattatcattatatctcaacgctgagtcacataatttcggaacgagctatccaacaagtagcacgtaccaaacaggaagatccctttatctcatattatagtccatagtaccccgtggatgcctaccacacagaggtccctcttctggacctgagacctagatatcttgcgatatcattgaaaatatcgttcaattgctcctccgtgagccgcttaacttccgcctcgatatcagcatcgggtgtttccgagatgtggaagttctcaactttgccctccaaaaactcctcaaacttctcttgttctctcagtgtcggtggcaacaactcataaaatttcgcaagcttatacagcttcacattgtctagactttcgaagtcgcccaacgtgagagggaatacgccgtccttcacgtccggaatctcaccgtccgcgttcggcaatggagccaagaagtccttctcctccgacttcgtcgaattcactaagcgccgcaccgaccgctcttccatcgtgtcaagctggccctgaagctcccccactagctgcactaagtcctcattcgtggcgaaatccgttgtatcaaacttgccggcgccccctttaggaaggaacttttcgtctaagtttgccatgtcatgcttttgcttgctgacctgtagctccagcaccgactgtcctgtcttggtgattaggacgctctgccgtttaactagcgcctgtagctcctcaacctgtttcttcaatgcctcgtctgacataacgcacttcaaatttagtagaacgcttctgaatattccctacaccaaacgccgcagagagaatggtaaaagactaaatataagcgcggggccgtactttatgggtgaattagtagggagtaatataattacccctccccttttatacttttgtgctccaagctcgcgaactttgaggagatctcgattatattatcacgtgctaatcaggagaacgtttagatggtgaaagggcgggttatgctagagggtatatacactgttcagaacttcaggctttggacacctgatgtaatgctatcgagactgttcttttccttgcgagccttatttcttctggcagaaagtttccctttgctgacctcgtcagcagccttcttgaggttgtctatctctttgtcctttttggcgaggcgcctgccaccacgctccagctcgtagttatctaggaaatcatccagcatatctgaaaggtctgcgcgttcacgactcatgtcgaagggctggtattcctcttcgtcctgctcttcctcgtagttttcgtagctgccgatgacctgatcgtacttgtcgtccaggatcgtcatgacttcagtacgagcgatcgcgctggaactcatggagaagccggaaacgtcagacttggcgcccttgcgttggcgctccctgcgctttttggcaccagtacgggtgccgaacgacggaagttcgccaaggtcgtcctgttcctctgccgcagagccctgatcagataggccatcatcggaatcccagtcgttggcgttgtccctggccatctgctgtttgaagcgccgcacgtctgcgctcacgtccagtgattgtagcgtctcgagattgtcaacattggcaaactgggccatctcgtcccgatagttctgctcttcaaagtcatccaggccgtcgatgtcccactcatccagctctgcgtctttgccgcctgggacctctccgccctcaagcagttctgcgaacaggtcctcctcgtcctcgaccgccgatgctggggggtccgatttcacttcaacatcctcgttgacaacgtacgcatcgtcttcaagagcctcaagaacctcccgcaaggcggggttcatatcaggctggaagccgcgaatttcgtctggaatatcttgcatcttctccaagtattccggtttagccacacctctggaaaagagcggctcggaccgcttttgacggtcatcgcggtactctggctcaacgaaaaggtcgacggccttcttgcggcggttatctccctcgcgcacgttcttcgacggaatgaatacggagttctcgggatctaatccgatgggcttcaggtgctgtgtgtagtcatactgtgagtcgtcaaactcaataccatacagttttgcttctccagcacgctcgttcacgtcccgtgcctttctgtggccctttttactcgcgcgctggctagttgccgcgccgacgggtaccagcacatgttgcgatgcttcatcatcgtaatagttaggatcgtcgtggggcctatggacaacggcaaacttctgcgccgtcttcttgttaaatactgacttggacatttcccaggaatgcagccgatgaacttaaagtcttgcaatcatgccttcaagaccggccatgaagctcatctcttgcaatcttgcgggtactttcgagctgcagaaaaatttgaagatgtgtgggtgccatcacgtgatcaaatgatattggcggagagttactttgcaaggattatgcgagaagcaacctaatgggagcccaaaggactgtgtctatatcttgttaccatctatagagtctataccttctcctatgcggtagtctatcttattcgaagccatgaaatttttatataatgcctgtatgggttcatcaacccggcgtgaaagcctcatcgcaccctcctcacagcacatagcaccggacttgatatagatgtttattctaacaaagatcagtgacctggtgcggattccaccagaccagtttcacagggatactgcgtccgcgattaatcaccagctcaataacaagtacgcaaacaaaattattcctcatgtcgggctatgcattacgatctacgatctgcttacagtagatgagggccaactaaaacctggcgacggcgcatcgttcatcaacgtgacatttcgtgcgctagtattcaagccatttgtcggagagattatcactggctggattactcaatgtacaaacgaaggaataaaggtctcgctgctaggaatgtttgacgatatattcatccctgcgaagatgctttttgaaggcagctactactctgtggatgatagtgcatgggtatggcaaatggacgaggagaccaaactgtatttcgatgtgaacgagaagatcaggtttagggtagagcaggaggtgtttgtggacgtgaagcccaaatcaccacgagagcaagaactagaagagcagttgaaagaaaaagacacactgacagaggaagaaaagaggctagtagagaagccccctgcatatgcattattaggcagttgccaaacggatggcatgggtctcgtcagctggtgggaataaacatcatgtaatagatatattttgtacactatgttatttgttaatacgtaacacctatttttcgaattaactacccttctaacatacagcccacagggctagcatgacagttcagttgtattgcatataacgggaagtggagctgaatttcttatagccgttgatgaccttatccacagcttttaagaagtccttttctgtagctaccttgcgtctggatctgattgcaaacatgccagcctctgtgcaaacagatcttagttcagcgccggtggagtttggacacaacctggaaatcaattcccatctaataccacgctcaacactcatggactttgtgtgaatgcggaaaatattggcacggccttccaaatccggaagagagaattctaccttacggtctattctaccgggtctcaacaatgctgggtctaaggtgttcggcctattggtagcaaacatcaccttgatattaccacgtggatcgaatccgtctagttgcgtaatgagttccaacatagttctttggacctcattgtcaccacccgctccatcgtcaaaacgagcaccgccaattgcgtccacttcgtcgaagaaaataatacatgccttttttgttctggccatttcaaacaactctctaaccattctagcaccttcaccgacgtacttctgtactaattcggagccaatgactctgataaatgtagcatcggtcctgttggccacggcacgggcacaaagtgtcttacctgtccccggaggcccatatagtaaaataccctttggtggatcaatgcccagagtcgcaaatctctcgggggagagtaggggcagctccacaacctcacgcagcttctctatctgctccttacacccacctacatctgaatacgtcacatctggtttctcctccaccgtcatcatagtcacactggggtcaatccgcggaggcaaaggtagctcgatgaaatacttggacctgtccacaccaacacgcatgccctcctctatatctgtgggcgaaacgcgctctccaaggcccacaacaaacttagcaatctgttttaaatttatcacatacttggcatcctcgtcatcctcacccgtgttcgcaccgctccggctcgcgtcggccgaggggtttgaccggatgatcttcgtacacctggccacctgtagcggatgtctttcgcttagtttctgccggtcgcccattatgtcccacaggtgcgatggcgcaaggcctgtatcgctctccttgacgccagccttctccttgatccgctgctcgatatccttgaggtctttctccgtggatttgagcttcgccgcgtatggagcggctccataggtcttcaacacttggatatctccttcggagagaggtttgatcttctcatccgcctgtttctgctcctcctcggtctccaccggtgctttatacttctcccagtcttccttaggcggcattgcgtagtcccttgtgatcgtctgacggtgtagcagtgtagtatagcttaaggcgaatctaaacatttgccacccttctcataagtgctgtttgtccactagtcacgtgacagaacatggtgcgcggctgccaggcagccttggaagtgcaacgcctactatacgggggacctctgcaggcagatgaagccctacgcattcgatttccacagttatatagtgtctatttcaattagtcttttgtcctgctggcaatggccatcagccataccactgcactactgtttgtacggtagtatagcccataatgccgagcccaaaggccatcaccgccaaatcaagcgctagcgcaacttgggaaacggtacccgtgcctcggaagaccacgtagtgcagcaaaggtgggtatacatagatcaatgggatgcatgcgaagctgccaatcaacgagacaaacttatcgaggtcgttcgagcccagcgaggcaaggacaagcatgagcacgacgaccagcgcgcggaaccagttcttgatccacttgaccttcgtgctgtacttgccggagcgcgaggtggtgacgacgacgttttccagaatcctgatggcggggaaaagctgcagaggcgtcgagagcattatggcagccgcatacaggagttgcactccggtgccaagtgcgctgtcctgcgggaagttcagcaggatcacggtctcgaccttggctccgaacgcggcgtagcacagcatgccgaaggagatgaacactgccgtgactgcgaccatcacccacagcaggcaacggcggaacttctccgggctgcgcatggactcctgaatcggaatcagaagccccacaccctcgtacgtgaagatggctgtaccgaggaagacggtccacgagctcgggttgaaggcaagcatcgagtcggtcgctgcgccgtgctgcaccacctgcgacgcgctgaagtagtagacgtacaccagccccaacaggatgaacaggtccgcaaggagcgccgtggcagacagcttcgtgatcctgcgggtcagcgccagcggcaggtacactgcggcctgcgcagcaacatataccccggtggacgcgtgccagccaaacagcgtgctgcacacgacctgcagattggtggcagtgaacaccgcatagaccgcagcaaaccccagctgcgacagcacgatcgacgccagcaccgtccgctgcatcgccacgccgcacacacgccgccccaggtccccgtagccgccaacgccctcctgctccttcgccgcaatcagcagcatgaagcacacgcacgacgccgccccgcagaacaccagtgcccccgtgctgaacagccacccgccgttgtggaagcccttcggcagaaacagcacgccggtccccacaaacgacttcagcaacagcagcaccgtgcggaaaaccgacgcgccgccggcctccccgctgtccgtcccgtagctgcgccgccggccctgcagcagcgtctcctcctcctcgaacagtactgcggcgtccgccagcgcatcatcctcgtcctccgacaggtcttcgcccgcaaagtgcccgtaaaggctcaggaactccatgaaactgcccgtcagcaccccaccgcgctccatcatgtagctcctccggaacccgttgggcgcccgcatgtcccgcgctcccatagagtgcaccgacggcgcccgcgaccccccgtagctgtgtgaccgccgcctcccgggccgctccgcagtccaccggtacagctcccgcgttatgtcacccccttgcagctgcagcgagctggccggctccgccgccaggtgccgacttacgatgtcaaccatcgctgcctcggttccgcgcgatgtcggaacgctaccaccaagtgtcgatgctctgcgcgacattactactgccggtggccgtagccccgtgagccccgcccgtactcgcctatatacagcggcgcggcacggcgcgccagcgccgtggctcggagacgagctcggctgcgctcgaagctgcccgcggacctttcggaaaagaacggccccgcggtcacgcggggccgcagcgccagttcgagcagcacagctatttaagtggcacaggcagcgtccgcgcgctaaccttacctgagcggaagatccaacgcggacacatcggtcttgcacacatatcatatgctttctgttactcgaaccgctcctggcgtgcgtacgcgggcgctcagactgttcagcagcggccgggccgcgtcgctcgccgccgttggcgcgggcgcgcctcaggccaagtaccacatagtggaccacgaatacgactgtgtagttgtcggcgccggtggggccgggttgcgtgcagctttcgggttggctgaggcaggttacaagacggcgtgcatttccaagctattcccaacgcggtcgcacacggttgcagcgcagggcgggattaatgctgcgctgggaaacatgcacggagacgactggaagtggcacatgtacgacacggtgaagggctccgactggctgggtgaccaggactcgatccactacatgacgcgggaggcgcctgcgtcgatcattgagctggagaacttcgggatgccgttctcgcggaatgacgagggccggatctaccagcgcgcgttcggcgggcagtcgaaggagtacggcaagggcgggcaggcgtaccggacgtgcgcggtagcggaccggaccgggcacgcgatgctgcacacgctgtacgggcaggcgctgagccacaacacgcacttcttcgtggagtactttgcgatggaccttttgacgcacaacggcgaggtcgtgggtgtgatcgcgtacaaccaggaggacggcactgtgcaccgcttccgcgcgcaccgcacggtgatggcaacgggcggctacgggcgcgcgtacttctcgtgcacgtctgcacacacctgcacgggtgacggtaacgcgatggtgtctcgtgccgggttcccgctgcaggatttggagttcgtgcagttccacccctccggtatctatggatccggctgtctgatcaccgagggtgcccgtggtgagggtggcttcctgctgaactctgagggtgagcgtttcatggaacgttacgcgccaaccgccaaggacctggcctgccgtgacgtcgtgtcgcgggccatcaccatggagatccgcgagggccgtggtgtgggtccggagaaggaccacatccacctgcagctatcgcacctgcctcctagcgttttgaaggagcgcttgccgggtatctcggagactgcccacatcttcgcaggtgtcgacgtgaccaaggagcctattccggtcttgcccactgtccactacaacatgggtggtatccctacgcgctggaccggcgaggctttgacgattgatgaggagactggcgaggacaaggtcatccccggcctgctagcatgcggcgaggctgcgtgtgtgtctgtgcacggtgccaaccgtctgggcgcgaactcgctgctggatctggtggtgttcggccgtgcggtggcgcacaccgtcgctgactcgctgcagcccggcttgccccacaagcctctgccagcagacctcggaaaggagtccattgctaacctggagcgcatgcgtacagcctctggcccattgaccaccagccagatccgcttgaacatgcagaaggccatgcagaaggacgtctctgtcttccgcacgcagcagaccctggacgagggtgtgcacaatgtgtctgctatcgacgagaccctgaaggacgtcggaacctcggaccgctccatgatctggaacagtgacctggtcgagaccctagagctgcagaacctattgacgtgcgctgtgcagaccgccaagtctgccgctgagagaaaagagtcacgtggtgctcacgcgcgtgaagacttcccagagagaaacgatgaggaatggatgaagcacacgctatcctggcaacatgcatccggtgctcccgtcgagataaagtacagaaacgtcatcactacgacgctcgatgagaccgagtgcccaccagtgcctccaaccgtacgtgcttactgagaggcgagttaaatagttttgtatacgacccccacacaccgcactgctgtcttggtgagcttcgctgagccttcgcagtggatatttatttattatttgatattcttgctccatagatgagttgcaaggcccatgacacaggaaacgcttcgtatcgccgtacagggatgtgcgcacgggcagttggatcgcatctacgatgcagtggccaatatgccagagcagccggacctgctgttggtgctcggggatttccagtctctgcggacaacggcggactatcctagtataagcgttccccgcaagtacgcaagtctcggcgacttccccagctacttttccggggagcgcactgcgcctgtgctgacggtgttcattggcgggaaccacgaaaacttcgcacagctgctggacctgccgcacggcggctgggtagcgcggaacatatactacatggggtacagcaatgtattctggttccggggcgtgcggatcggcggcctcagcggaatttacaagcactgggacctggttgctgcgagaccaccaacggcggctgcggcggcggcgtcgtgggggtctgtggtgcggtcattgtaccacgtgcgcatggcggatgctctgccgctgcttttgctggaccctgcgcggcgcctggacgtgatgatgagccatgactggccgcgcggcattgaacagtatgggaattgcgcccagctgctgcgctggaaaccgcactttcgctccgacgtctctgcggggcgcctggggtcgccattgagctgggagatgttgcggcggctgcggccacgccgatggctcagcgcgcacctgcacgtgaaattcgaggctgcggtcgatcatgataagttagaccagaaggactccgacgagattgcattggacctggatgacgcccctgcaccgccgcccgtcaagaccgagtttcttgcgctcgataagtgcaaggcaggtcgcaatacccacctggccatgctctgtgtcacagcagatcccggccacccctccgctgccgatcctgaacacctcttttgggacccggagttcatcagcaacgtgcgttttgtgcaatgcgacccacagggcctggcggcaacccgcagacatttttctccgacagacgtgcagcacctcttcgcggagcgcgccccactgcggcaggaaccagacacggactggagcggctatcgcatcccccccttcgagcctgaaatgctaacggaaaccaaaatccaaacagagcactttcgcgcggcgtttctaggaccgcctagcgttacgtagtgggctgtatgtacgatctgcattaagtaatgtccacaacaccttagaacttgtaaacatggtccttggtgtagcctagctcagataggacacccgtaacctgaccctggtcagatggggataccttgttgccggaaaacgcgtccataaatggtgggggcccgcatacaaagatgtgcgagttggagcccggggttggcaagttctgcttcaagaagtctttcgtgataaagcccttctcacccttgtagtcaccctctggtttgtccacgaaatacgttaccttcacctggtcagggtacttcgaagctagctcctcgagttccttgcgtagcagaatgtcctggggggtcttgttgccgtacagaagatgcaccttggtgttgtcagttgggttttccgcgatatgatgcatcatctggaacagaggggtaatacccgtaccggcacccatgagcacaatcgagtcaaacatgttggggtcccagcgccacttctgtataggtcccttgaactccacagtgtcgttttccttaagcccaaagaggtgggtcgtgaacttgccgccgtcgtaatgtttgatcaccagctggaacatcccgcgcgccatgttgtcactgactggggtgtatggtctgatcacgttggagccctttggagtcacatacttggctagcagcgctgacgcagtggtcaaacctgtcacgtgatcctgagaaggaagcgcgaaggtgaaacggcgcgtgtcgtgcgaaacttgctcgatcttggcaatcttcagtgcgtgccattggccatccccggtgaatgtctgcgctgctgcctgcccggtcacgtcgcctttgttcagactggtgctcagattcccgcgcgactgcgcgtacaggtagccggcggctgcgactgcggtagtaccgagcgcaaagtttaatgccttgctggatctcgttattctggacaacattgcgtatagggactgctcctgctttgtgtgaggagacgtgtgctgactttaaataagtacgatgaaacggtcagcctacggtggggccccgtttttcagtttcgcacggagagggtatcaaaggaggtcgaacacagctacgttattggttcgtatagcatgcttttgaagcccctagcttcacgagcgctccgaccatcccagccaccgcgcccctacgcccaaggccagctcccgcaatacggcagcgccgtgggccccttttcgtaagtatatatggcgtggccgcgccgcgcggccgaggtcgcgcggtcgacaatggcttctcgacttgacaagctcccggaggcggtcagtcgcctgcagagcctcagccatagacagctgctccgtctggcgcagggcgtgtgcatccctgccctgtccccgtccctgcacaagggccagagtggacgcgtgtgcgtcgtgggggggtcgctggagtacaccggcgcgccgtacttcagcgcgcatgccgcggcgctcatgggctcggacctggtgcacgtgctgtgcgagtggaacgctgcaacgccgatcaaggcctactcgccggacctgatggtgcacccgcacctgcgcgacagtagctccctggcgcgcgggctggagcccgccacagaagccgtgcgcgcgctcgtggatcgcgtgcacgtcctggtgctcggcccgggcctggggcgcgacccggccatgctgcggtcggtggcgggcatcctcgagtacgtcgcggacaagcacgagggcggcatcccagtcgtgttggatgctgacgcgctcctgctgctttccgagcaggccaccgcggccgcggcgcgcgcggccctgcggcgcttcccgccagatcgtgtcattctgacgcccaacgccgtcgaggccaagcggctcgccggcgcattcgagctggacgaccccgcacggctggcggagcatttgaactgcactgttgtgctcaaaggcggcccggaccgcatatacgcccccggcggcagctcgccactgtcctgcagccacgagggctcgctgaagcgcgtgggcggccagggagacaccctgacgggctgtctggccgctatgctggcctacaatcgcgccatacacgacttcggcatcgccgaacccgactacacgggcctggagggcggcacgctcagcgcgtccgagcggacagccttgtgctgctacgtagcctgtgccgtggcgcgtggtgcgtcgcaccgcgcatacgaggctcaagggcgggccatgcagaccagcgacttgaacggtcacgtgggtgccatcttccgagatttcttccctgaacgtcagtaggctggcttcctgtcttggccgtttcctgcggcttccactctcgtcatgtgcgcctggtcaggctatttctttttcgaagagcacacacgtagcgtgccggggcggcagcccgtgagcgcatggcactcctgggcgttcgggacccgtatatatattatagcctcccctgtccgtcttagagtgtcgctggagcggtagcaagacacaagcacacacacaacatgcctaagttagtcctagttagacacggtcaatccgaatggaacgagaagaacctattcaccggctgggtggacgttaagttgtccgctgtcggcgagcaagaggctgccagagctggtgagctattgaaggagcacaatgtcaacccagacattcttttcacctcgaagttgaccagagccatccagaccgccaacattgcgttgaccaaggccgacagaatatggatcccagtcgagcgttcgtggagactaaacgagagacactacggtgacctacagggcaaggacaaggctgccaccttggccgcattcggcgaggagaagttcaacacgtacagaagatccttcgacgttcctcctccacctattgcggacgactctgagttctcgcagagcaacgatgagagatacagagacgtggacccaaacgtcttgcctaagactgagtctttggccttggtcatcgacagactgttgccttactggcaggacaccatctccaaggagttgttgagcggcaagactgttatgatcactgcccacggtaactcgttgagaggtttggtcaagcacctagagggcatctctgacgccgacatcgccaagctaaacatccctaccggtatcccattggtgttcgagctggatgagaacttgaagccaaccaagccatcctactacttggacccagaggccgctgccgccggtgctgctgccgttgccaaccaaggtaagaaatagatgcgacgtcctggtagcagggctgtatagcggtattagtttttatacacgtaatgcacagcaagtgtaattatctaaccgagtggtggcgtctgatgcgttcgccaacgcggcgcttgaggcgttcctccagacgcaggcggtggccgccgtccgcggcggcctgcatgcgtccgaaccaggcgccgttgtgcgacttaattagtgaatcgcagatgagttgcatgtcttcatattgttcggcgagccacagatcaagaagcgtccgggcggagcggatcatctggggggcgctcagcagcttcgaggaggggtagtgcagtagaatagacatcaggtcgccgtggtcttcacaggaatgcagttcttgtacaatgagtgtcagacagacaacgataatggctgctacgagctgggatactgggtatctaaatgtcagcaggtgatcccacaagcaaagcgtgtactccagctcgaactctcggagaaagagcagcctgctccagcggatgagccatatcgagttgtccagctcatggtgcattagaagctgctcgtacaagcctggcaacgcgtgtcgaagtatcggttcaaacgtgttcttcgtccactcgatgaggtttccctcgtcgtagaaggtcacagctacctctgcgatgaactccttgaacatatgtagcgtggtgtgctggatgccgtcccggtagccgttgcggtaaagctgcatgtagaacatgccgcatagctcatggaaaccctgcttgtacggccgccccgactccagcatatactggcgcagaatctccaccatgtcgttctgcacctcggggaccgtgaatatggggtccaacagtagtcggctgacgtccagctgaatgatctgtagctgctcctgcgcggtggcatgttccttcagcctgtcgtccagcggcgcgtcgtccgtgtcctgctcaaccgccgtctcaccagtaagctggcgcacactatcctctggggtcgcagcggcccggctggtggctatgtcaaaccacgatccctctccctgatccgagagcagcagcgtcttccagcaccagccccggttcaagtacggtagctcctcctcctcgtagagccctccaccccagatacccttgagggtcaactgttccttactcggatatctaccgacgagatgctgcaccggcacattcatggcttcagctcagcccgggagttggtactcttcgttgctccgccttcgaacttcgactttcccagttttcgcggtagccttgatcgaagccgcttgccaagccccaaaacgaggcttcggaggtgctagctttttacggcgtatccgcggctgacatggctggtcccgcaacgcccgccgtgaccttatcttgcgaatactacagttcggcctcgcggcctctacgtacgtaacggctgccggtcctcacagtagtggcggtgggcagttctcctcgttgttgcagccccaccacacgggcagctcgccgcgcacgcggcagcccgcgctgcccgtcccgttcaccacctcgcgcaaaggccgaatcatggactgtaggtattgcaacggcgccatgacaaccgagtcaaactcgtactggctctcgagcgcctgcacgtactcgcggatgaaccgcgcgtgcatatcgcggtggcgcacatctgcatggtacatctccaccaactcgtccaccatggtccgcatctccgcgccctcgccggcagacaccgccgtcaacggcgaatcgggccacgtgtgccacgcctgcgactcaaacgaggactgcgatccgccgtccgcgtctcttggctctacttcctcgggtatggtcggaagccgcagctctgtgtagtacatgccatcatgcgcgcgctgagaattattcccgccctgcatgctccatttaccggcttgtggctgtcctacaccgttaattaccttgtgtacagcgctggcagcatagcccctcaactagccgtcatcgtcattcttatacgcctcgccattgtttctgccctaattacggctccccaattgaagaaactatgtgttcggtgactgacgcctattgtttcttcgagaatgagtagcgccgcgcagtttttttttgcacatgttcggggcaaggctgggctggcggccatatggtgggattgcgcggtgagtctcgcctgcggacttcttgtgctgccagttttgctgcctgcgcgagtatgctatatcgacagcacatcattcacaggcaattatgtaatcataggcaaaaagtagcgtgagactcaaaagtgagtccttacgtaggttagcccagagaacacaaatgatattgatcatttactgtattgcgatcctgtaggaaggatttcaatattataggcccgggaaaggattgtagcggatacatccttgtcagaatattttaagggaagtagactgggactagagaacggaggcctgaagcagccaggagtgtatgaaacaagatcagaggccagccatggagagcatggaggctaagaaaaagcggcgagagatgcttttggacgatggaagcatcccgcaggtcgacgtgaattggctattcacggggaactccaaggcgcccgatccgtcgcggtgcggcagagtgccctccctggagaacctgtcggtcctcccgcagagcgggcacgaggcgcggcaggagcggcggaactcggaggcgtgcagcgtgcccgcgagccagcagaacgagacggccctgcggcgcacgcagtcgctttccaccgacagcaagggccacacgtcgaacggcacgcggaagagaagcttcctgacccgcatgttcggccgcaggaaggaccgccaaatgcggtcctcgccggcggcgcggtcagagcagcggacgggctcgagtgctggggcgcactgcgtccaggcgtctttcgacgagagcggcctgatgcgcatgcagacagagcccgccaaggggcgggaggaagagcgactccgggatttcctgcggtactacggcaaggtgggctttgagacgttccagcggcaattggcagagaaagcacggtctactgctgcgaggcccaccgggcatttagcgccgtcgtttgagggaacccagcccctcaaggaccccggttgtttcgagcactatttcgagcactatcccgtggaccggcttggccgtcggattccgccgcacccagatgctcacaggtttccatcgatcctgaaacacgtgaagcgaagtgcgtattcagatggcacgatacctagagtaaaagccgaaaatgcaactaccaacaaatttgaagccctgttgcggaaagtggcctcatactcgagcgatgagtctcccagcggatccgttgggttatatggtgacacggaaacaaatggcatatacggactcgggaacaatgggccggccaagtatagtaacagttttcacgacattcccggccttgaggaacagaaaccgctgaagcgagtatcctttgcgcgtaatacctatttcaacagccccccgcagcagatatgctcgcggaacccccgcaaaggggaggtggaggttaaggctgatggatcagttgtgattcacaaattaactgcctccgagcgccgcattttaattcaaaactccacaggtggactggtggtaggggggtctggccatttgaagttgattaaccccttccaaactacagatgaaggcgaacatgaccacgacaagctacatgagacatatgatactccggttaagagaccttcttccccaccgcccccttccgccgggtcaggcaattcaagttctttgtcagactcctccctctctgtggaatccatagctagcgggagttccgagagtctgctgccgccgcgaatgcctaatataccaaatgacatgctatacacaaggtgttgctacctacgcgagattcttccaatcccagctatgctaaagcagctgaagcccggttcttcagacccgatccctctgttacagcttcggaatcccaaaccgtccatgatagagattctttcactgggagactttttgtcgatagctcctgtgttatgcttttctatggacggcgtctcactcagcgtccaaatgctccatatcatcctcagctctttaaggtgcatgggccgcctagaaaagctttctatgcgcaataccccacttgatgaagaaggctggaaaacccttgcctattttatctcttcgagcaaaaccctacgcggactagacttaacgatgatccctggaatacctttaaatgttcagaaaccctctaaatcatctggccagtgttctataccgaggatgaagtgcgatttgacttctagggctgaacaaaactggaacctcttcacagcagctattgctataaacggaaatctagaagaacttattatttctggggctaagatatcgttgggccagttcaagatattgctagacatcggctgtcactctttggaaagacttgggctagcattcaatgacttatcgcatggccattgcgaggcccttgcttcatggctacctggctgtaaggtcaccggtttagatattgggttcaatcctctaaacggaaaaatgcgacccttggcagaggccttaatgcggaagagcaaagtaggcaataattcaattgcctgtatttctttaaactcaactgacctagcaatcccccctaatgctactgtggaaactagtgatgtggttgcactgttgagcgcacttggctactgtgagaatttgaaatttttggacctgtccaataatccaaatatgttcatatatggtatgaaaccactcactgacattttacccgtattggtagggtttgccaggcttcagctggattataataatttgtccagcactagcattattacactggcagaggttttaccgatgtgcactacaataggctatttatcattggtgggaagtaaactagatacttcctccggtgctgctctcgtgctggcactcaagaagagtggctccttatttaccattgatgccgactttagcgaaatgcctgacgcaattaggcatgacgtatcgatatattccttgaagaatctagaaaatgtgctagagctcagtaaaacaggtcatgatatgggaaaatctacatcactgcaacaggaactggcggttttattggctggaaagacccaagacaaggaagactacgatcatttagtcgaaagctttgctaagcgcatatgcgatattcggaaacgtttgaaaaccgttacaaaggatttattcaagctcagagtaaggggcgaactaagcactgaagggaaggagacattgattcgcttttgttttcttgattccagttttgaaaaggccttgggcttgttggcacaaagggataagagccaggccttaatatggaaacaatttttaaatgaatctgaaggatctagccctgacacagcgaaagcggcagaagatgagctaaaaaatatggacagcgaagcagatagctgtatccgccatgtcccatctatcaacggcctttcctccaagacgttccgcgagagtggtcatgctgcgctattgccttttcagcagccccctattgagaaactagttccagcggatgacgcgattgagcttcgttgctctgcccactctgcgtcttcgcacgctgacgaacagaccagggaggaaggtgagatgttgcgtaagacccatggcattatcaaaggtctcgaaaaatcagcgaaggaccgtggtaccccattgtacactgagacgctaaaaaaaataggcgagggttatgattgtgacacgattaaaaaattccttttgggcagggatgtcaatgacattattgccattttggatgagcttcaaacctccggtgttggcatcgacgacatattcaaaaaaggacgttttaactccgatcaaaatatacatacaaaattatccaatgctgagagaccagtgcagctaagttctgctagcgaacttcagcttggtgcttcggtggagccggacgatgacaatacttattcggctctcatagatcgcgcatatgacgatgttctagacgatctggagagaactaggtcaaatcatgaaagagcttaacttcaacctcattatatgcctttattaatgcataattgtctttagttgattctgttgatacacatattctcttgttacgaacttgtataataacatatatgcattcatgaaccgcacggcatcacagcccggtagtacttggtccatataaagacactgcgcaattctagttcccatagactgcatagactcatatttggaactagcgatgttcttgagcaccgggcatctaagatttgttggaggataataatcacgtgatactcgacattgaacaaattttagctttgcttacctttaagttccctgttgaagattgcagatggatacatctacagcgaacgaagaggagacccaataacctttatcagtatgtttggccgacagtcacattgatatagcatcacgcttgatatcttgatacttgagtggttttactaacagttcctctgtactaagtgagcggaactttcaacttcaatacgcaaaataaccaaggaaaaccgggtgattcgaaacctgcattcagcttcgggaacgccggtaacactgcaaccaacacattttccggatttggtagtggatcaagcggtacaacgccggcgttttccttcggcgctgcgaaaccggcagatgggaccggctcggcacccgcgttcgggggttttggtgcgaacaaacaatccacagcaaactcaacgccagtttttggtggatttgacgctaagaagaccgagggctccccagcaccttctttcagctttggtggggccgcaagctcggcgcagaagactgaaccagtgaagcagtctaattctaccggtgcatttacgttcggcaacacatccacgcccagtttcggagctacggagaagaaagaggaaaataagccattgtttgggagcacagcatcgaacagtatctctagtaacgggccgtttccctttgcctccagcgcgccttctggaaagatagaggataagaaacctgcctttacttctggagctaaaccactatttggatccaataaggatgatgcaccaaaacctgcatttagttttggtgcatcagccgcatcaacagagaaaaaggattcgcctgctaaatctgcatcaccttttgggatcactccgccagccgctgcacccgaacagaagaaggctgactctacgccggccttctcctttggtagtagcacaacatctggagagcagaacaagaccaccaacgcacctagtctatttggaaatgctgcccccgttaatgttaaggaggaagcgccaaagcctgcgttttcgtttggaaatgcatcatcccagcctgtgaagaaggagacaactcctaaaaatgcattcagctttggtgaatccaaagtcactgcaacaaaagaaggcgatgcatccaaacccacattgagctttatggggtctacaaagactaatactcagtctgaggacgctcctaagccagcattctcatttggagcaagtgcaaagacgggtgagacgccgaagccaagcttcagcctcagcaatgcaacagataagaaggagcccagtgcaaaaccagctttttcactagggaccgccactgacaagaatccagctgcacctgcattttctttcgggtcaaccacaacttctaacgcaagtacttcaactaaagagggggcaaataaagaagttacacccaagcctgccttctctttcggaaagaaggatgagggtaagaaagaagataacagtggctctactcccgggacttctgctacttctactgtcacttctgctccgcccccaccaactgcttcctctgctgctacagctacaactaatgctccttcttcggcaactacttccaaatcggttgagcctcaaccaatctcgctagacaacaagactcttgatgacttggttaccaagctgaccacccagttgaccggttctgctggtcactttgagacttatgccaaaaagattaacgagtgggatcaagttcttgtccaaggcggagaacaaattagccaattgtattctgacaccctgattgcggagcagactcagtcaagggttgaccaacacttgcaatatatcgaacggcagcagaatgaattagaaaccttcttggacaattatgagaaaaaggctgaaacgttactctccgaaatattttcctctaacacaggatcaccggcaaatacaaatgatcaaaagaggcaacaagcattccggactgcagagatattggatgagaacttgaatgctctatctgtcaatctgtcttctctgatttctgaaataaacgaagtttctgagacattcaacaaagcgacgaacatgaacatagctaacaaagatgaacatgcgcaattgataaagctattaaactctcaccttgatgcacttaactccttggacaatagctctacgactcttgaaaagaaattaaaatctctgcacaaatagttaagatatggttaatttatctagcgcagaggaatatatgtaccatattatattatatacagttaatgagagataattggcggcttccagtagcgtatcaccattagtcccgcgttcagtagaggtatttaaactttagaactaattcccgatgagatcaaacatcctgctcgcccaaataaccggtcagtgtacataataagacaactagcttcacttgctgttctaagccctccatggtggaatcatcaacaacatatttttcattactctcaagcaaagcgtctctcttcaacactccctgcaccaacttcctaaaatggactaggagttttttgacacttttcattaccggcctgttagcatttcccatgcttaacaagattgagactattaattggaagataggcacaacaatttcaaacaacgagataccgtttgcttgagaacccagggttaatgggttgtcgagattcaaattgacacgaacgaagtttgaatttttgacggaaatctcatcaaagattaattctagccctaggtctggatcaatctgcaaaaacgaacatgactcaatagtattgaatatctcgttttgaataagagcctgcgcaccgcttcttgttttagccaatctaattagaaagtaaactgttgatttgaatgcagtgagctcatatagcagagtatccaaggttattgtgtgggagctaacgcttaacaactcatcagtcgcctttatggaacgaattatcaaaagcagcatgttgctcttcatgaggacgtctaatatgaagttagtcttgtttaagcaggcaatttgggccaatgcatcgagaagaagaattccagtaatcttatttgacccctcaccagaaatcgcatcgttgcagataacctctacaagtctttcacttgccatttttagcgattgtaaaacttctttcgccaagctttcttcttttataattctaagaagatatttgttcgcaagcacataaaaatcggatcttagacatagtgttgatagtggcgaagtgataccatggatgcaagttttaaatagcgcatggagtcttccatctatagtcttttcctgatcaatctgaatgcggtctttctggtacagatcatatagaaaaacagagagagagaccagttcctctgaataagccacatcgaattcaacatagtcattgattttcggcacaattgcttcaaaaacctccaaaacaaagttagaacgctcaactggggtaagagagccgtcaagtaccactatctgtaccaactgcacccacgaatgcaaaacagagagctgaagtgacgagtagctttcgtgagccaagcatgtcgtaatgaacctctttatcttgagggtttcttctttcgcaatgctttgtagagatgtctcttggacatccaccgcgggaactgaaagagcatgtgttcggaagctcagatccagcagtgcgtctaaactgctgaaatcatagatgttacccgtacaactggacgataacttgattttgttgacactcaaatctaaattcttgaagagggtgagatcttttggaggatcccctgcaacaggtaacttactgtatgtcaaagtgtccaaaaatgcaaatatagtaggtgcatggatttcacttgatattagtacggcgactgctgcggatatctttgattgctgtgattcagtagatagccagtgcagatctaaacttagatattgcaataagtggctgcggtatcttaaaaaggccaataaggcgcctactgctggaccatccaagacactggagttaatgttattaaatgaaccatggagtgattgatcacaccataaagacgtattatcaatattcggatcgagttcaataatcctctcaaacaatcccttcgaagaaaggaaatccagagtcagccgagaagtgagagtatttctgcatagtttcacaattatttccatcagtatggaggccaaccgaattggggcgtaatcgacattacgcggattaatcgatgcgagagatgacaatagtatgtccagtaatgagttcagcagagaggagggggaattgatgaacgtagaaagagttggtccaagcgacaaaatgttggtaacttggaaaccgaggagaaaatgggctacagtcactgttttgttagtgtatgagagattcatgttaatgaaatctaaaatagccaacttcagggaaagcgattcttccgaatcgatgaaagaagaaacttgggaaatgaacgcttccttaatccttgcagattcatccactgattcgaaaactgtcaaaactttgtttttcctcgtatcgctgtaagggaagcgcaatgatatctttttcagcaaatcaagtgattcgctagcaaggatatagtctggtataccaatgtatagcccacaatgggcaatcagaggtagatcaaaaagtattgcatcatagtatgagctcaatccgtgcaaaccaaaattttttgggataaaatgtgtctccttatggtgtttttttacaatcgggcagagctcttccgtataagttccctcgtaagttaaaagcatattgagtatccgaatggctgcccgtgccatcttcagctgttgtccagttgtttctaaatcccccgataactcatccaccccggctgaagctatattaaaaatgattttgaaaaacttctcttcaaacagatagttaaacgcagcggtagctggggattcttcaacatacgtaaaaaagtcaccaaactctatcaatgaatctaaattcactcctgcagtgatagagttcagcaaaacagaatagtcaaatgaagagagactatgctgaataatactgaaaataggatccacgatagaaaatttctcaggaacatctgtgagttgtgtaacgtgggcaaatatttcatgaaaaatgaaatcgaaatatggccatatccctgactttctgtatgcagcgcctaatttaatagggtatggcaacttcccaaatgccaccttaccagaaccgttcttggtattcgcggctagcatgcaagagaaaagccttagaaacccagatacatcagagaaatttgtgagaacagactggaatgccatacgatatgaatcatcagtagagttcagtggagaacctttaaaaatccatttatctagattagtccagaatatttccctcttttcttgagttaatggaacaagtgtacctagaaccttcatagttgcaccaattagcggagtattcacctttataaattcaaaaagaacttcagtaaacatttctgttaaagagagttggatttccgttggtaaatcatatgctaccgatccgattagtgtcagtagcgatgataataatataactacctcttcattgagtccctcttgtaatgcgacattgttaaagttggccttttcctcttctgattgcggctgaagctccatcattttcttttcaacgatagaaattttgacagtgtagtcactaattatttgtgcaattgtgtgccaagatatagcttggtttccattgatataatggtagacattcgtagcattttcctccccataggacaaacttgacatcatcaaataaaaacaagacttcatcaagttgtcgttgcacttggcagcccactcaataaaaccgtagaatgtggattcgctatcctgccaaaagaactgggataaagagggcctcgaagcataaaagtaatagacgacaaggaaaaacctttcgagatccgcctttgctgaaatgtcatctaagtaaagatcttcaccagataacagggaatcttcttcggcattctttaccttggttaatagaaatgcgcagtctgagatggatgctcgaatgaagtcgtcaaaaacatagagaaactgcgattctagttgggcagagaatgtaatcttactaaacttgtttggaacttggctaacaggtttaatgactacagcagttcgatgttccatgtccattaattgtttcggtaacagtcgaggaatgtgtctctccaataacgagcgcatgtcgtaaaacagttccatgcttttgtcttgttctacagttgaggtctcggctgcaaacaccattagctgctcaagagccccctgctccaccgcaactgtcataggcttgtccactgtgttttcgaaatcaaatgcctttgctcttttggttggtgcagctttgcaccagccaataaaataggtaagaaaaacaaagatcaaagtcaccttgaccggtttcgtatatatgccctcattattaatctctttaacaaatgcatagtgcagtgctttcacgtcggattccgaaaagttggagagttttgaccacgccagaaagagggccggcatgtagtacatgataaaaaagtcatcggaatccatcccggaaacatgatcaatgacagacataatcttgtccttgtcaaacttagtgctgttcttcaccaccccgtatagaatctgagccagaatgtcgtactccttcaatagaaagtcccgcttgaagttcacattctgctggaatagagaatcgtacgtatccagaatttgtgccttattgatagactgtttgatatcgtctaattgctggtgtaccgctttgcagcctttgagtatcttgtcgatgagctgtccgtcttccactatagcgcggtatacctcgctctccgagctgtgaacattcaccacgtaggacactacctgtaagatgaactgcttgcgcaggtaaaagcgcaccttcccttggttcaatagtagtaggtcctgatctagtgcatccagttcttcgtctgacgagagcagaagttcagccacggccaattcatccaaattcaattcatctgccagctgcacagcggcaattataaactgctggttgatcttataacggtcaccgtcagatagggtaatttctccggtttctagctgttttctgctggtgtcattccgcggatatttgtccgagagattgagttcttttaagtcaggtagcagactgttatacagctgaagatcaaactgctctgcctgaatagagttatagagctcttcaaagggcagcacggaccacttcatggtaattgtgggtagtctatcagcgcaagcaggtatgccctcgagatgcaccttattacgacttcattactacgagtaaatacgtgctgtgacagaaaaaatttgtctcgttcgcaatgaccgtctcctcaacaaaaattagcaaaaaacactcacggtgggggtcgaacccacaatcttctgattagaagtcagacgcgttgccattacgccacgcgagcttgtattgaacaagcgaccgtaatttcatgtcacaatgtgtacatctggtcatgtgacctctgtgggcggtatgttttggctggccagacattaatgctatttgatcaagtacactgaggtaagccagcagatcagttgcgtggccctactccggccccatgcttaagttcgcgcttctgcttggcatcttctcatactatacagcatggctgttgttgccgatcttcgaccttgacgggaagctctggcttttcccattaccttccctctacgcggtcctgctccccatagtactgctactctgtggcgctttcatagtcggctcatcgctaggtgcactgctgctgacaagcaaacgcaacgtggactacgttcattataaataaagtctatagtcaaaacattagccattaattggtcgcgttctcgtccagccaggcttgccagggatcgatgtccttatttagcacacttccggcacatacttgtaccgcagcctccaggtgatcaagtttgaaggcagagccggacgtggcaaacacagtggtcaagtcatcctcgcccgcgcctttgagatccttgcttttccgctcgatgatctggcccagttccttttctagcgcgtccttgatcatggtgggcggcctgctggtgaacgactccgacttgttacacgcaatcatgatgtcaatggcctgcggcttgcgctctgtaatgctcagcacatcgtacaagaactccgccgtctcggtcacccgcttcgggtccacggtggagtcgaccatgaagatcaaacccctgatgttgctcgacgctttcaacgtagtgaagagctcttggcggagcttcacatgccccgggaaatcgatgagcgcaaacttgaacttctccacacccgaggggagcataaacgagtccgaaaagctagcgatctgggacgccaccgttttcccggcctcgccggtcgttagcaagttgaacaacgacgtcttcccgctaccgctaggccccgcgataatgaaaattggtgagctggttactctcttcttgctgcccgatcccactgagatagcttggccactatggataattatgataagaactgctgccgtggtaatcagagcgattaccagggcaatatataccgtagtatccatcatgatgctctagtatgtgcagtaatatggttgacatagtcgtcttccttgttagcccgctctactgcttataaagcagcatatttagaaaattttcgcccgtaaaacttacttcggctgaagcgatgagctagctaaccagtgatataactgaggcatagatagcaaatgttggggcgtagggttgctatactgcaagtaaataggcgggtgatttccaggaaggcgtttattggcgcggatatcccggattccttgctgaaccctcgagcaaacgcaccgctcgctggtagtctggcggcatccgctgacacgtcgttggttatagatcgtgagacgctaattaatggggtggcaagcccctttaggaacgagctgggtgagactattaagggaagcaatgcgcaagaatctcggcttgcggaagctacgctagcaggcatggcgccgcgcgggcagatacagctcaaccccgagattgcaaaggtgatccgcaagaacatcctatcactgcatgtgcctagtagcatccggagcacagctgccaggcattttgtagaaatatatgagcgcaagattcacaggcctgctgcgacgcgcatggaggtggatgcgcacgtagcggcactcttcctacaaaactatgctgcgatataccagaccctgagcgaactgcgaaaacgcgtgggcccgggctttaaccccgaacgggttctggacgttggctatggcccggctacgggtatcgtagcgctgaatgacttgatgggtccggaatatcggccatccgtcaaagaagcagttatcctcagtcaccctgacatgcagaaacgggccaagatcatcctgagcaggcaactgaatgaggttccagacagcagcgctgctgctgtagaggaactgttggaaacccaacagtcagaaggtgaaaatatggacgatatcccggaggaggacgatcttgtgggcgaagttatgaccaagaaaatcaacatcaacacccgcttacgcaaggatgtgcctggatcacagtactatgacctcataattgtaacgcaccagctcttaaggcaggaagagcggttccccgtccaagtcgacgaaaacctggagcactatctaaacctgcttgcgcccggcggacatattgtcattgttgagcgcggtaacccaatgggatttgaaatcatagcccgtgcaagacaaatcatgctgcggcccgaaaactatccggaggaacgcggtaaaattcccagaccgtggatccgaggctctacgacgaagccatataactatacggtggtacctgagaaacatactgagggttcaaacgaaattgaagaagggacagcattgttaaaagagattacagaacagcacggcgaggtgaaggaagcagatctcgaatttgagccggaactcatggagtcgctgcgcgatcgttccagcacgcgggaggccgactatcacctaaagatagtggccccctgcccgcatcatggcaagtgtccgttgcagacaggcaagccagcatactatgaactggacgagggtgcatcgctcaagttttgtaacttccaacagtcggtggagcggccgaagtacacaattgagctcaagaagggcaaggtcttggcaaccccttggcagacacccaccgatgcaattggaattaagggtaaggcaaaggccggatctggtcgggaaaacggcaaaaacagcgaagtggttaattattcctatctcatcgcggagcgtgcccaaaatgattcggcaacgattgctgcgattaatgcgcagcgccagaggtctggtgctgcggagtcggggagtactgttgccaatgcttcggagacgtggccccgcgttattcgccagcccactaaacgcaaggggcatgtgatgctcgatctatgcgcgccttccggccaatttgaaaagtgggttgtcagcaagtctttcgacaagcaagcttaccacgatgcccggaaggcgcagaaaggtgacctatgggcactcgatgcaaagacgaaaatccctggcaagggcgccctgaacgtcgcaaaactagaaaaacggcataaggaacgcatcaaggcggctaagttggagagcaaggagaagagccgcatagtccgcgaggaagccgcagagctcgaggcagtcgaggactcctcgccggcacacatggaggccaccatcaatgcactggccaatctgcacgcggactccttccgcagcgccagcaagaaacgcgacaagaacaggaaactcgccgtggacgccatccgtaaatagagtccaggcacctgttatgaacacagtaaagtttattaggtaaaacaggtgatatttatatactagaaaatatatttatatatattcacaaatatagagcatcaaatctattttcttctgaaggaggtaccctcagatagcttggccttaccaccagttggagtgcacaacacggtcgagcacgactcgcaggtcaccgccgtctgtgcatgcgagaatacagtggtgatgttcaagcagcctgggcacttgacgtccaagaagtatgatcttggcgactggaccaaagtcttcaacttgtgctttctagcctcggaagcaggagttgggtgcaacaaatcttgaactaaaacctgcgcctgatgttagtacctgtacgtcccgccggtgcccccggccacacgcaaatgccacgccgcgcttcctgcgccctctggagacccctctggtcgctgccacgtcccgccggtccgtctgcgggtccttatgccctccgtaccctcttggccacgccgtttacgccactgtaacgtccctctctcttgtctgctgcatatgcgctgtgtccctggcaccactggctttcatatctgcccacataccatcttgattacttgcttgtgaaaaacctagctgtttgtgggctagaaagtgtcttcttcactatatagtttttggctatcgcgaattcccaccgtaggctgctgaacaagctacagtgtgaagccggtttgcagaagttctacccctgctagaaacggccgcacacattctcattgctttttcgaaaatttttcagattgtccacgacgcagcagcagcgctatctggaatccgtgtgtgtgggtttatttcagtaaatatgtatgggtttatagtcactcagttcggggcgagctgcggacataaatctcgaggacataaacctcgagggggggtgcggcgcaacccagcggctatgggatcagaatgcaagattggtgtatatatatgcaaacaggttaaatgctataaaggggctgcgtagcagaacgaaaagggcgcctgatatccagatcagacgataatgcaagaagaggtctcctgggagcgcatgcggcgtatggtgggacgtcttcttttgatcggtggcgacgcaaggcgagaaatagagggtgtggtggacgtgggggcggagaagacgcgggcggacgggcacgccatgtctgaagaggctgcggagcgcagcagggtcgagtccggggagtggcgggtggagggcgggggcggggaggcgagggagcggcgctcggggtcggggcgcggcgcgcagtcgaagtcgtcgcagccggcctggcggcggcgctcagcgcgcatggcctctttgtagtagtcaatccgctgcagcagcaggaaaaagagctcgtcgacgccgacgttctcgagcgcggaggtctcgaggacggaatcgggggggagctcgaactcgcgggcgagctgctggacatcggacaaaaagacggtgcggtcgtcctcgaggtcgcacttgcagcagctgatgacaattggcacgtcgtcgccgcgcagcgacacgacgtagcggtgcagcagctgcagcgtgccgagcgattcctcgttggtgtagtcgcagcagagcacgaagccgtccgcctgctccacttgcaggcggcggatctcagagtagtccgacgggtccatgccggctgcatccagcagctgcacgtccagctcgtggtggcgcaccaccagtggcgcgtccagcggattgacgttgtgcggcgcgcggcgtgcgtcccggctaagcctccgggggtttgcgcacaggtctcggtactcgttctgagagcggctgagatgcagtgcctcatagttcacgcgcttgtggtatatgtcctccgccagcgacccgagctccaggccactctccagtccgtgtagccatcggagcacgagtgatgacttgccactgcccccgtggcccagcacacagattcgggccactgcaaggtcgtattcccggggcagtgtgttcggattgtctgttgaaaagtcaaacagcacaaggggtgacacagacattgctggtgctgttagcgcccacaatgaggtacagtcctggacatcacctattttaaatgtcggtagtaatgtttgctttttatctcaccttttcgtttctttttgaaaacatgaaaaagaaacgagtaaatggtgaaggtggatcgtcacgggcatcgcgatcttgcatgagatatgggctcgaacaaacacggccctgtaggcgagatcattatgcaaccgaatctggtatctcagaggattaccgtaggactgtgcctgtccgatcgattacgttagtggggtagagaatgaagtaagaagcagctctgcgattattgtcgctttgcgcctcatgtgaggtaaagccctatcccgcagggtggcggctttctgcaagaaaatctgggcatcacgcccccgaaacgaaatgcgatagtcacctgtgccatggcgacgagtcatttccccattcgtacagaaatgaacgggcagaatcgcgtaatggattttctgtggcgttcgtgccaaaaggtgatctccacctgcgtgctgccctgcgggcgtggttgagcagagcacctggaaaaagaacagcacagaaggccaatgcagttggccaattgaggcaatagccgagcaggaacagtcgaaagtgggtgttctggcgctgttggatctgaaaaatgcaggaagttacaaaaaacagtggggcaatacatagaaaccggcgacccggcgatcgcctaatcatctgccatggagacgcgggtccggcgctcgaaccagcggtcgaaaccttgagggcatggtgatacgggcccgtcggcggggcactcaaacaggcacgtgttaatcctgacaaaacgcagcggggtaattctttccgcaagccggacgggtatatgaatcgtacgataccagttgtcgagcttcgcttcgcgcgcgggatataggcccaaatgcggagggcctgcggcctctctgccgcacaggtcgaggtatttgagacggggaaaagcttcgagtaaatccccgccacagttctgcagagagtccccatatatgcgcagggactgaatattttcacagcgcgccagttttgagagagatgccgcggggatatttttgtgcaattcgaaatagtttaactcctctttcgccagcagtgatagcttattcagggttgcacggtgtgccgtgatgccctggacgtagcgttctgtggtagactcccatgtctccgtcagcgcccgactcttgtcccaacggatcatgaggtcgatctcaactaaccggacacctgcgccagcaagctctttcagaaattcgggtgtgctatctcgcacagcttccttgtagtctagtcgcagtctgcgcagattcctgaattctctggcaatagacgggaggaagccctgacggaagtgcgtatccaaaagccatcgcatgtcgctaacttcgtatgagatttccggtaatacctggatctcattgacattagtgaaggagagcgtttccacgtggcgcagagctatgttgtttcggaccgtcactgcgtcagagggcctgaagtctgcacctgagatgtctaactctcgtaagttctccaagggaccgatatccttcaagaagtcccagaagttcgtatctaggtcgccatagatgactgcaaagtcccttatggcgccatccggctgaggcaagttattgtctatcatatattgtgtgacaaccaacgactgaccgacgttcacagcccgcggcgtaaaagagtgcgacatgccatcacggtgcagctgcaacttggtaaggttctgccgcaattcccacgaacaggcgcttatgtccctcagatactggtgcagtgcacctttgcacacatacgtcttgcacagcagctcctgtatgaggaatttctgttttcgtgccgcgactatcggtttcagcggcatgtctataagcgctatctgctggggcagatgagcatacacatcatccgggatccagtctgccctgatgtggtaccgaaactcccgtaattgtgtcagcagcggcagcacctcctgcacgaagtaatgggactcgcagcgttttacccctaccgggagacacaggatgcgcactgcgcgcacgagctcgccgcgcgtgcgcctttcccgcaccaccccaacgaaacgccgccaagaggctgcagaccgaatgacggtcccacgcccaacagcgcttcgttccacgggcccccgttcccccacctccacaaccacttcgcgatatatggcagcgagtgcggtgccatggaacgcccgtgacacgctagccagcccgaccaggtcatgctgactcaaatgtcgcacaatctccgtcttcacctctagcggcagcgcgggcatcccctgctgctcttccgagactgcgcacatcctcatcccacaatggtccagcgtgccaacgttttgtccccctttgccccatttttttgccatatctaccgccgaatatataggcttgtgtctgcttggacgcggtccctcctacctttcgcacccgcctctacttcctcgcacccccgtatcccctcgtttctgggtggacggcttcaaactgtgcgatcgcaccctgcctgctgcgcccgtcgtcttgccgccgccctgcctgggcccagaacgtatgcccagagccgccaatgtagcagcgacgctcattatcctgtcgccgtggctattgctggcactcgtctcgccttgcctgctatatggcataccggaacgtgggatagcgcatcacgtgtttcatcatatgcttcgtttgtgtcctccatgtgacgttgtatgttgcgcggggtttgcggggttcgggtgtacatagatacacggcagcacgtggcctgcagcaagcagacctgtcggctaccgataccacctatctgggtggtccggtggcactgcggccgtcctgcttgctgtatggctgctgtttccgcgctcattctcgttgcccgtgcgtcccgcagtccttacattacgtctgccaccgttacggcaatcaagcggccaaggaaacgcctaagtggcctcatccaagcagtttgaatcttgtggggtggtcaattgcatccgccgcctctattgtgatggctcttggtagtagacctggttcccccgttgtagctaccccacacctggccggtatgtttacatcatctgccttgtcgtcgctgttgtcacgtgacgtgtgcttttctacggtacatgcgcttgtcacgtgaccgacgtgtatgctcgaggccgacataaacaaataagtgttcgaaaaagtaggtcgtgtgaatatgagatccaacattgcttcgtgtgtaacaggcaggtgattaaagtaaagttgaatttggttattgcatattagataagttcaagagcatctgtcccgatgagtgaacaatgtcaaatgatttgggttccagatgctgaggaggtgtttgtgaaaggacagttggtttccacaaagacaattaaaaacaaacagaacaaggatgagaaggtctgtcttgtgagagtgaatggcaaggaacgagaagtgctggaggtggagaccgcggcggtgaatccgtcaacgtttgacaagatagacgatatgtccgagttgacccacttgaacgaggcgtctgtgttgtacaacttggagaaccgatacaaggacgatatgatatatacttattctgggctattcctcgtcgcgttgaatccgtacagcaacatcaaggtgtacacgcaggactatgtgaacttgtaccatgggtcacccaaggaagacaacgagccgcatatctttgcggtagcggagcaggcataccgcaacttgttgacacagaggcaggaccagtcggtgttagtaacaggggagtctggggcaggtaagaccgagaatacaaagaagatcttgcagtatctcgcgtcgatcacatcggatgaaaagctggcacacacaaacttggaatcgttcgaacgcaagatattgcaggccaacccgattttggagtctttcgggaacgcgcaaactgtgcgtaacaataattcgtcgcgctttggtaagtttataaaaattgaatttgacgagtttgggaagataaacggtgcacatatcgagtggtatctcctcgagaaatcacgtatcatccagcagaacatcagggagcggaattaccatgttttctaccagttgttatctggtatgccagctgggaagttgaaaacgcttgaattggtgtctaactccataacagactatgcatatttacgcgactctaatccatctattccgggggttgatgacgcgcacgatttttcgagtttattgtctgcatttaacgttgtcgggttcaaggaggatgaaatacatgacatatttcagtgcattgccatcattcttcatatcggcaacgtggaattcacctcaacaagagcagaacaagcgacgattaagaacgacgttgcaccattgtgcaagctaataggcgtagatgaggcggccttcaaaatggcagtcttgaagccgaaatctaaggcgggtaaggagtgggtatcgcagtcgaagaatgctgcacagtcgaggttcattttaaactcgttgtcaagatcactttatgaaaaactttttgcacatattgttaggagaataaatcgcagtttagatcatggttctatgacggaaaattatattgggttacttgatattgcaggttttgaaatatttaaggataattcgttcgagcaattatgtattaactacactaatgaaaagttacagcagtttttcaaccaccacatgttcgtcttagagcaaagggaatatgtcaaagaggacattcaatgggactttattgattatgggaaggacctagaatatacaattgagttgatcgagaagaaaaataaccctgcaggtattctttcgattctcgatgaagagtctatcttacccaaatctactgacgaatccttttattctaagctcatgtctgcatgggatggtaaatcccccaaattcaagcggtctaaacttcagcagtgttttgttcttgaacattacgctgctgacgtcgagtataatgtgaaggactggctatcaaagaataaagacccgttgaacgatcatctacttactttactatccgaatcatcgaataagttgatatccgaattttatacagaacaatcccggggtcatttttcgaagactgcgtcgaatagacacaaggagcagttgacgttgttgcttgatcaactctcatctacagacccacacttcgtcagatgcattgtgccaaacacaaagaaaaaggcgaagacttttgatagaaagcttattctagatcagttacgttgcaatggtgtcttagaaggtatccggattgcaagggaagggtatcctaatcgcatctttttcagggagttctttcagcgatataagattttaggagctgatccgaaattttccaataattccaagaaaaactgtgaatacttgttgtcttgtatttccctagacccgtcattgtacaaggttggaaacactaaactgtttttcaaggctggtgttcttgcgcaattagagactcagaaagaggagaagataagcggaatcgttactggtttaaatgcaatcatccacggtaagacggttagaaccgcaataaatcttcaattccaaaagcttcaggcggctaaggtattgagcactacatttaacttatattctaagctgatggaagatccttggtacagcttgtatgttaaggtcaagcccatgttaggatcatctcagtttatcgccaaatctaaaaaaattgctgaacaggttaagcaattggaaaaggatctctctgcaacaaagagtgaaagagatgaccttgcaactaagaatttcaatgttgaaaaggaattagcagagattaggactgccctttccaaggagacagagaagttgcagaatttcgagcgcttgtacgatacggcgaagaaaagggaagaagagttacgcagtgcctacgaggaagcggtcaagttaaaggataccctacagtcagagactactataaacaacgaagagtatcagaagctgcaaaaagagctccagcaactaaaggaatctagagaacaaagcaacacaaagatcaaggagttggaaacggagaaatctaatttacagaagcagattgacagcatgaaacggcaggttgacagcagtacaaagcaggccatggccatgaaggctgataaatctgacttggaatcacaattgaggaaacttaaactggaactaaaatcaaaggagaaacgtgttaaagaacttgaacagaaagttgataattctggcgaggatttgaagttgaagttgcaacaggtagaaagagcggcagccactaataataagagattagaacaattaacatctgagaataaactcatgaaggatcagatggaaaaatctaaaaaagagcagcatgaaagtcaaaggcaactatcctctagaggaagtgaactgatacgtctgaatgaaagaatcgaagcggaacgtgagcaagtttccgacctgactcgtgaaagagataacttggtagcagagcatgagcaagtcgtgaatcagcttgctatagcgagaagtgagattgcagagtacaaaaagaaaattgaggcgttaaaagcagaggctgaaaatatgaaggagaattatgctgaatcaagccctgcatctcaagctctagttgctactgttgaaaatagaatgcgcggattggaagatgaattgaccaaagaacgagccatgaataggttcctaaatgaaaagcttttatcggcctttcataacggaggcgtgcacgacgcccagtataaggaatcagcaaccaaagaggaccttattgcatgttatgaagaggcgaaactcaaattacggaaaactgctttcagattagagaaagaacttgaggagaagaaggaattaatatcgcgcttgcggtttaccgaaactagactagcttccgcatccttcgacaatcagactatatgtatgcaattaaagaagttgaaagagttgctgcgtaagtcgaacaaaaatatcaacatggaaaaggaattagaagaagttgatataatcgagtttaatcatgagaagttattgttggagattgattatttgaagaggcagttggagcatgaaagaaatgctcgagtcaatgctgagcatgtggcatcatccctccatagcaaatttaggcagatacaacgctccgactccatacctgacatatacaagctaaagtatgaagcgagtgaagaacgtgtcagagcattggaaagtaagttaatgtcatctcctctgaaagacaagactaatacatctaatggtgaaatattcttacatcgtgaatctatttctaaatatgaggatgaattgaaactgcataaattggagaactacaagctacaagactacttgaaggagagtaacaaacaactatcgacactaactcacgaattgaaagtagcaaagatggctgaaactgctatgcacgaccagttagtccagttagagcaggacctagcttctaccgaaaagcagaaacaattgctccaatccagcgtcaggcaccatcaaacacagtatgaaaactgtataaatgatttgcatgctacagaggctcagatgagggatttagttcattccttaaaacaatcagaagaagatatccagacaatgaccgatttgatccagaaattgcgtagccaaagtaaacagaaggatatgctgatatgggatttggaaaaaacaattggccagttggaaggcaaacttggcgatcgtactcgtgcggagtccgaactgaagaaagagctgacgactttgacgtacaagggtaatgtactcagagctgaaacagcctcgaagattgatgacctgctgcagcaaagcacccattacgatgcgattattcaagatttagtttcccaaaaggaagccgccgaatcactgcaaactgccctacagaacaaactcaatgccttaacctcccagatggataatatggctaaggatttgaactctctagcaactgaaaagctacagttagagaatgatagagaaatgcttttatctaaactaaaaactactaatgtggattttgaaaaatccataaatgagaggaccaatatagtcaacgagttagaatttctacgggagcagatggttctgcaacagcgtcaaaacgaaagaaatgaatcgcttattgagcagatacaggaagaagctctgagaatcaagtcgcaattaaatgatgaacgcaataaaaatattgagttgtatgaacagaatcaatcgttgggtagaaccaatatgcagttggggcagcggcttgagatgctggaagggggattggctgatgggtcggagaaacgtgtctggatgaaacggatccatgaacttgaaatgcggctgaacgaagaatcagaactgaagttcgaagagatgaagcggaatcagggcctgcaacgcatgcttgaagaactgaagagtgcgaccaacaaccaggagaatattattagcattgccagcaaggatagagatgtcgtggaaaagcaatttgctgaggtagcttctcgtgttgacggcatggagaagtatatttcaaagcaggacggagcatttaagaagatggaacaagaaaacacatactataaaaatagaattgcggagttagaacaggagatatttttatggcaagaaagatacaaaggactatcgacacatcgcaggagtttggcgcagtcaacggaggaggtgttaatataaacattttatttagacattaagatatatgcgattcagcaatgatgtaatatgtaattttgttcttgtttatgaggcatatatgtaggcgaacgtctccagagcgcaacggggttctatttacaggcggctaaacccaggccttgagagcatgaattcctcaagcggaccaaccgaatgagccggtaccttgagtaatgcgatcatagcgacccaagccgtagtgcttaagcacgtgtaaagaatcgccaaatgcagactcactaccttgcgtgataatcgtaggggcaccagtaccactcaaactattttccacgctgccagtcagcacaagctcagcgacgcgcatacagtcttcgggtgtgacttcagagatcttggatatcatctgcgcgaccggaatcttattcccacgtaacagaatctgtctccccagatcctccaattcaacgagcctcgactctaggttcattagtagggatgactttaattgattcttggctctatctacctcctcttctgtcaacttatattttccacctggtagaagtgagataagttcctcagcaataatgggggccatgtaccgtgccgcgttcggataaacagatatcgaaataccgaataagccagagtctgaataagaatgatggaatgccatgcagttgtccacaaagtggtacttgttcagcacgttggtgtacaagcgagagtacatgcccttaccaggtccaccggcgctgaatgagccgccgccaccgagtagcgtttgcaacgtcgctaacgtgtagatgtcaggatggtcaatcggcaaactctcaaatgcaatctgcatgtgatacatttctggaaggctggggttattgttacgctctagcgagttggccataccaccaatatagcgcgctggctgtgtggcatgtggaggatacttattctccatatcaccaaactgcctcgaagccatcgctacagcctcctcgtgtggtacgccaataaaagcagcgacaaagttctgggggttgtaaaacttgttcctgtagtccctcaggtggtacctgctcaccccgcgaatcgcttcctccgctgtcgccatgggcacccccaaagcctcgccccggtaggccacctcgtggagcatctcgggcagtagcatctcgtgattgtggcggacgcccttggcgtcgtagagggccgcgctcttctgctcttcgacctcctgctccgagatctgcgggcgacgcaccgtgtctgccatcaggctgagcattttctccacatcccggttgaagaccgacgcatggtacatcatgtactcccgcccagacgtgcactggtagttcccccccagccgttctagcgcctccgccatctgcaccgcagacatgttctctgtggacttgaaggccagccggtcgataatgttcgtgcaccctcgcaggttcttcacctcatgccgcgttccaactccagcgtacatgcccagtgcagaaaagtggcccacaacgttcgacgtagcaactttgagcccattaggcagcgtcgaaagctcgaaattctccgccatggcctccgtagagtaccctctacatttgattatgcgcgagggcagtttgccgcttaaacaacgaagcattacggatgtcacctgtgcaagaggctgcgtttccaatgtcacgattgatggattagtactgtagacggctgtcttacagtgcacatagaaatccgaaaattttcatctctcgagcctcgatgacgacagaacccaacggttacttaaagtgggtctcagaaaagcatcctggccggctatgtagtctctgagttaacccctggcccttcaattacaccgtcattatatatatttcatctgtatcgttctttttggcactatgttttggccgtttagcagctgacgctggcatcgtatttttcaattctgacacatgaatcttcatacactacaaccaagaccattaagttcaggacgtctctgtcgcagtggaagatgcagcgcaagtttaagataaaggttccagcatcgtcggccaatattgggccgggctacgacgtgctgggcatcgggctggggctgttcctggagctgtctgtcagcattaactcggagcaggcgcaactgaccaacgcagaccccaacaattgccacctggagtacacggaggacagcgaagggtacgcatctgtgccgctgcgctcggacgaaaacctaattacccgcacagcgctttacctgctgcgctgcaacaacatccgcagctttcctgctggcacgcagatcgtggtgcataacccaatcccgctgggccgcgggctggggtcttccggggctgccgtcgtggccggcgcgcttctcgggaacgagattgggcagctggggttctctaagcaacgtgtgctcgacttttgtctaatgatcgagcggcacccggacaacatcacggctgccctgatgggtggcttctgcggctcgttcctgcgcgacctgacgcctgccgaactagagcggcgcgaaattcctcttgctgaggttctgccgggcccgcgtgcgagcggcggcgaggacaccggcatgtcgccgccggagccaccgttcaacattggccagcatgtcaagtacaactggaaccctgcagtcaagtgcctcgttgttattccaaactttgagctgtcgacggcaacctctagagaggttcttccccaggcatacaccacgaaggaccttgttttcaacctgcagcgtctggccgtgctgacgactgcgttgtcgcagaatccgccgaacccggaattgatctaccctgctatgcaggacagggtccaccagccctaccgcaagactctcattcctggtttgtccgagatcttgagtagcgtgacgcccaccacccacccgggcctgctgggcatctgcttgtcgggagcgggtccaaccatcctggctttggctacgggaaacttcgaggatattgcgggagagattgtcgcgcgcttctccaagtggaacgtgacgtgcacctggaagctcttggacatcgctgagcagggttctgccgtcgaagcctaatgatgggaggctccacatggcatgctgctgaacagccaactgaatacatatagagaatctgacaggttgtgtagaccgtgctagcttactagcttctttaatagctcgaaccgctggttaggcgttggatgcctatatatagctggttacccggacttggtgaagaaggtttcttgggcctggcatttccttgagatcctcggtaccacttacatagggggacacaattgcttgcaggccaatagcagcgggaatagagggtactgtaagctcaaaatgtcatctaaaggctacaaaaagccatctttatatgggtacgccaaaatatacatttatagcttccttacgctgatagttggaagctacgggctttacaagctcctaacgaaccatggtgaagacattaacatcggaaaattcttgagccgcacgtcgccctatatgtgggccaacctaggtatctcattgtgcataggcctgtcagtggttggagctgcatgggggatttttattactggtgcgtcgattatcggggctggcgttcgcgcaccacgcatcacaacaaagaacttaatctccatcattttctgcgaggtggtcgccatttatggattgatcatggcgattgtgttctcctcgaaactcaccgtcgcaacaccagagaccctattttcgaagtcgaacttgtatacggggtactccttgttctgggctgggattacagtcggtgtctccaacatgatctgtggtattgcagtcggcataaccggtgctactgcagccgtttcggatgctgcaaactcggccttgtttgtgaagatattggtgattgagatttttgggtcggtcttagggttgttgggtttgatcgtgggcctattgatggcgggcaaaacagtcgaattccaataagctttagcatagcgcaatgatcttgcacagataaataagtaagcgttctatagctgtatctcaagagagtacgcgtttcagtctgtctactccgttaattatttgatgtaatatacaattatttgatacgcttgtcacagctcctactcctcctccttgtagttggggttcttcttcaggatcaccacaccctcaattctactagcatagctgatatattcgtttgtctcaagttcggcccgctcgccatggtttagtaaaacgggagtagactgggtaatccaaccggtaatggtctttggcttaccggcctgaccgactgtatcgacggcttggccgacccgcacatttacctttataggttctccctcctcgtttagagttagaatgaactttggtctgataccactgtttaggtagtaaaacaactggtgatgttttagcataaacgttgggctcgttaaaccaatcaaaactgtcaaaagggatgccaacgttaccttgttgagaacctgggcatcattgaagacgtctaaagtcattgtacctttccctaggtgtacaagaccttgtgccagtctagtcacaaacaaagtgttttgttctttagagtagtagctggctagttgtctcagcagttgagccaatctcgcattattagtaccgcatccgcacaagcccattgcaaaaatggagttaatcgaaacgtctaagtcagggtcatgggaaaaccgtgatagcgtgtcgaacaccttcatctgcgggtctgaaacgctaactaaccccatagctagcggaacgacacgacggatatgctggttaccatagtgcatcaaatggccaaaatgacggagagacatctccttgccaatatcttcgcccattgcaaccatagcaataccaaggacagagtaagttagttcgtcaatgtgtgccatggacttttcactactttcatcatccttggactcgtgctttccttggtcgccatttttagcatcttcttccttggagttgtccacatccattttatcctcatctgccttttttgaagttgatgtcgactcttcgttagaaattgctgagtcttcggtggtgctagcggtattcatgacttcctgaacaagggaatcaatgtcctcgggtatattttgaccgctgccatctctttcgccttcagcatcatctccgtcctcatcgttttcaccgtcttcattctcgtcatcgtcctcctcctcttcctccttcttcggagttagacgatacaacaggtcttggattaacagaacgtcccctgtgccagtgtatgcgcagacgtttaccaaaacctcaatagccgaagtgattgggtgttctatggcagatatggtctctagcacatcctcaacttgatcaccctgtcccatgtatagtataccgagagccaatgtcaaaaacctagtccactcagttttcaattcaattgaagacctttctagaagattgtccatgatagaggtggtaatatcaccattacatgttccaacaaaggcgtgcgccaaggccaacgacgccatagcagaagtctcaatcgacaacgacgtatcagcggctatcggcagcaacaaacttagaagctcatcatttctgcttcctgcaaatgcaatacccaagcccaaaattgcagcgctgctcaatttagcatttgggttggtgacataatcttgtaataacagcaaggctggttcaacgtctccgtcatgaaccccgcatgcagatacaccaatacctagcagcgcgccggctttcacttcaacatcatccgcatacaagtacttgtctaaatgctggagcccatccagattccactggtaaatagagccaatgcttgccacggtagacgtcataccatcgcccttggttttgtacacccagttatcgtcgtcgaggcacattttatccgcacagtaacctaggtttagccacccgttcacaaatgaggcagccaggttctgctgagcagagtctagcccagagcttgcaaacgcacttctgaccgagttgtccaagtgacttttgtatatatcctccggaaacttgggaacagtcaagtttagctccttggccaggtacaaaaagtgctcgctcaacttcgtacttccgatgatatcttgaaccgctgaatactcaaaagatgacttttgagccgccaaaatataagctagttgcttgtgcatgactggatcagtggtcgcgtcaaagacggagcgaatgagagattcctcgcctagtctgattgcgagggccagcgcctcagtaagctggttctctgatagatacaaagaaaatgccgtctgcaagaaggtaacatcctctgggggaggtaacagtgggacacacgataccatatactggcagacccgctggaaggtattctcgtcaatgaactgtggtaacttatcgatagattcaacttcaaggagcaaatcaacagcatcggcctcgccattgtgcttcaagaagtagggcacaatatctaacgccagctgaactagaacatcctttgggaactctgcgtcagagatagcacgctttgattcttggtcgtatgtttcatccgactcgttctcaacctgctcgttgtagacatcgcccacctccagcgccaagtggcggatgtactcgtgcccccagctctcgatgtccttctcgttcgatagcagacggaaccgcagagagtcatgcttgccctcatccgagtacgtcatgctcaacacggacagcacgtcggcaagcagcgacttcagcttcggatccacccacttgtcgtacactgcacacaggtccgggtatgaagggcgcagaaacttgagtggcgcgggaacggccgtcatagaactggtcgagttcttgataaactccttcagctgcgccaggctctgttcgcagagcgacgcgtctgactccaatagcctctgtacaagtgtctccaggtctgccttcagccttaagtcatcctcagatagttcttcctcctgcttttggtccttggtcttccctttcttggccgagggtgtttgcagaccgcttgccgaaccgatttgtttgtcctcgttgttcctaatatcgtccaccatacttcaattgaattcaatgtgtgatatggcgaacagtatagctgcagagtctcttcgaggtactgaactgaagcttacggctttgccctttagtaataatattcatttgccaccgagagcggtccagttccagctacagcaacatatacctatgtacgaaacacgttacccgaccataattatctggccagtctgggtggaagagtcctaatgactaccccagagcaagttgaacatatgagcacttagatattcatatttaggatcactgcacgtattagataacttcttaatgtcttgtgagggatcacttaggatcaacaaaggctccgctatatgcctggtttgcccagtttaatatcttatcgtaaacgatgacgttggcgttgtggatgtctatggagtgcctggagtcggggaatacaagtagatcgtagttctctacgccggcaaggtttagctggtctaggaggaccaaggtgtgctggaaatggacattatcgtcacctgtgccgtgcattaggaggaaccggggcaccttagccaaggcggagacattgtgcactttggcatcggcataaccgcgaggattggatagcggttcggacatgtagcgctcagtgtatacggagtcgtataggcgccagtcggttacgggggcgaccgcgattccgtacttgaagtagcggcctgcatcgcgctccaaggtttttagcgtgagatagccgccgtaggaccagccgaatagcgaaatgcgctctttgttaacgtagtacttctcggagtagagcttcgccgccgcaatttggtcctctgcctcgtagtggcccaagtcgcccgtgaccacggcgcggaatggcttgcccttgaagccggtgccacgcccatctaccaccacgacgatggcatcgagctgcgcagcaaccacctgcaagaagctgaccgcgaattcttttttcaccaactgcgagcctgggccgccatatgcgaagaaaaacacaggatagtggttccgcaagttcgagtcgaaatcgggaggaaggatttcataagaattggcaatcaccttctggccctcactgtcgtcgcctaggttgagttcctggaatttcgggtagttaaaggagtactcctttaagttttcctttagcgcgttgttttcttcgaggtagtatagcgtttctccgaagacgttgccattggagtcgctgtcggagcccaaggacttcaaatcgacgagtttttggtatggcacaccaggcccgcgataggtcaatagtaggaacctactgccctccgaaaacgacacatcgtagaccccttccttggacgtatcagtgacttcttgaacatcgttcggttggaaaagattgacgtaatacaagtgcctctcgtttgatgacttcctcgtagcaataaaaaacacatcattagtatctaggtcaaaggctacaggcccgccaacaacctcccacgcgccagaagtcaatatcgttggtgtggatgcgctcggtggagagtaatatgccaaatgattatatccgttgaccgagacaacgtcaatgtagccatcgttcgccctgtcatttgtatcattccgcgggacatacatgaccgtctgcccaacatcccaccatccgccattcgtagactcgacacgtggagtggtgaacggcttattttcgtcggtactaactagcgcaacagtcaatacctgtgcggagcgatccatgtacttggctagcacctggttctcgcctacccagaccacctctgtaattagcgttgcattatcgccaaagttcaccacggagttcttctcggcagctacgtcaaagatattgagggtgacaattgggttgggcgtgccgctttttgggtactttatcttgcgcacctcgggatacaaagcatccgcctcctggagatagtatgcaattggaaactcatgcacctgctcctcgttgatcttgaaatacgcgacgtatttgcccgtgggtgaccaccatagcgcgacaccgctgctgaggacctcctcctcatagacccagtcgctccgaccgttgaatatagtggcgctgccgtcagacgtcacccgcgacactttcccatctgcaaccgaatgcaagtacaagtcgttgtccttcacgtacgcgatgcgctgcgagtccggcgaccactcggccaccgcaagtttctggcccacgggatggaagtcccgtttctcgattgagtacacaaagtacgtcgcaaaggtcgagtgcctccagttcttcgtgctatttgtgcgcacaagcccgtacgagagatccggcgcggcgacgaacccctccaccacatagcccacgccctcgtgctcgaacgtattcccccggaagagctcgcgcgtgtagttctcatcgaacacagacttgagcgaatacacgtcgtcctccttcttcacaaaaaggcccttgtcgtcgtgtacagacgacaagccgtgcgtccactgtagctgctggaaccgcggcttgaacttctgaccgcggacagcctcaaagtccaccttcaacttgccgctgcgcgtggcccgggagctcgtggtcggctgtgcgcgactggactcctcaagcacgggtatggagttaagtagaagaaaggtgccccacacaagcgcaaccaccactagtccaatccgcgtgaaattcagcgccaactgccggttctgccttttgcactcgtcctctagctcgtcgtagtcctcctctggcagttttaaagtcgacgacatgctgtggtcgctgtacctatactgctgtgctgccattgtcagcctgttgtgctgtagcgaacggattgcaggttcttgataccgtcggctgctttcacagaagcggcatttaaaacagcccgccggcccgtcgacaaaagctgggcttgggaccatctatcggagtgtcactgccgcgccgcgactaccgcgccgttccttcgggcttctgtcgtgctttccgcgacgcacggagcccccgtgacccgccgcgccagccagccacgaccaatgacatccgacatggaacacgcatcggccaccttcgtgcggcagccgcgcacgcacgcgctcgggcgacgcgccagagatacagatagcgacgctgcgtctgaccgcctccgctgcgattccgggcaagcctatgcacccacacacctcgtgccacccggtctctggccgcccttcccatgcctgtccgtccgcgcgcctgccgggccactggcgggcgcgcgggaaggccccggggagccgccaatgcccctctccggtgcatcggttgcccttcgctgggacgagctggcagctggcggtctttgttacgtcacattgtacgaaatccggatatctaacgacccctgtatgaagactatgcttcccggagcttcaccctaggcagatctcgaggcagtatcgagagtgcaagggtatctgggacttggcaagtggcacaggatgtctgagattaagcttggagaccaatggttcatcatcgtgtctgacccgcagaagcaacgaggggacaagagctcttctgggtcgtacgtaacataccaaatatcgtcgaagcctgcgacggagggcgataagcgcagcggcgaggacgacataacggtagtgcaccggcgctacagcgactttgtgcttctgtaccagattctggcaaatgactaccctgcatgtatcgtgccaccgctaccggacaaaaaagtgctcaactacctggaccggttcagccagtcgttcacgcagaagcggtgccacagcctgcagaacttcctgcagcggctggcgcagcaccctgtgctgtcgcagtcgaagatcctgcatacgtttctggtcagctccgactgggatgcgtaccaaaagagccttgcggagacggtcggcaacctgagcaacaaggaggagctgacggagacgatcatgaacgcattcaagtccgtgcacagccagagcgacgagtttgtggagatcaaggagaagagcggcaagctggaccacaacgtgtcgaagatcgacaagctgttccaccgggtggtgaagaaacaggaggccatcgctgaggactacggcaagctggggctgagtctgcgcgagctacaggagctggtcacgaccggcgacgacaggaacagcgaggtggggaatctggggacgaaaatcaagacgttcaacgaggggatggcgcagctgtcatacagcctgcgcgacctgagtcgctacatcgactacgaatacatcatcgacttgcgagacatggaggactacatcgactcgatgaaacagctgatcaagctgaaggaccagaaacagatcgactacgaagagctcagcgactacctcacgcgatcgatcaacgagaagaacaaccttatttcggggtatgggtccggaagcaacttctttaagagcaagctcgaggagttcacggggatcaaccaggaggccgctaggagggaaaagatttccaagctggagtcgaaggtccaggcgctgacgacagaggttgagaacgccaagaaggtggccgacgccttcgaaaaggaggcgctcaaggaggtggagatcttcgagcaaataaaaacacgcgagctgaagcgctccctcaccacgttggccgaccaccacatcgagttctaccagaagatggtcaatacatggtccaagatagaagagagcctgtagctggttccgtgcatgtaccgctgctatggactatttgagcttgcatatacgtcttttctatcctcattacattaatcattagctaggtttcaatttcttatgttgatgtaggtggaacgcacgccgctgcgtttccagctcttcgatgatgttgtcgtggtcgccgtctatcagcgcccagtccacgtcagcgtggacgtccgcatcggcgtggaagcgggaaaccaggtctgcgccgaagacgcccacgaactcggcttcgctcagatactgcgaccactgaagcggcgggaacgtctccctgtccagcttgcgcgcggccttggcgcgcggcttgggcgctctttcgttctcccgcacgtagaagtagcgcaacagcatgatggcctcccgccgcagaacgccaggaatggcaaggtgccggttctgcggcgcggtgctggtgtcgcgctgcaccgccaggatcgagccattccccccgaaacgctcgtttccgcagccgaatatcacgcgcccgatgcccagctgcttcagcgccgaggcgcacatcacgcagggctcgacggtcacgtacaccgtcacctccttgaaaatcgatgcgtcctgctcgccaaagagctcttgcacctgcgcaatcgcaccaaattcggcgtgtgcgatgccagtcagcgaccgattggtgtcgttcataccataagcgatgatctgatcgctgggcgtgtgcacgaagacacatgcaacgggcgtttcgccgtggtccagtgcataacgggccagcctgatggccgtgcgcatatgttgtgtcatcgagcccatggacctcgcaattattcgacggtgagatttggtcactagaatcgcttttccagtgcgaaataaaataattgtactgatctggtctataaaaaatccatctatatacacaacacagcactcatggcagccccagggcctttgcgatctcgtcaacaatcggccgaatgatctccttcttgttggggaccatatggcctccagggtgctcaaaaccctttacctggtcctcgccataggccttcacgtagatgtcctgcaagtatttcgatctagccgccggcaccgcggcgtccgcagcaccgtacaggaaaagcacctgcgtgggctggccgggcggcggtgcgaaggcctgctggtggcgggccgcgatgcgcagcgcctgcggcgccacgggatcgggctcggtgaaggagtagcccgacacaaagagcccgaccttcagcggcgggtgcccgggcaccaggtcgcacagccggttggtgaggatcgctgccagcgccgcgccctgcgagaagccgaccacaccgtcgtacggcccgtgggcgcggatgtgcgcggcgaccgtctccagcgcgtccgcgacgttcaggtctgccgacacgtccgtgtggtggaaccacgcccggttcatgccggcgtccaccgtggcgctccaccgctcggcctcgaccgagaacggcaggtccgcgggctgcagctcgaccggcccatctatgtagtcacactgcactccggccttcttgagtagcttacgaagtccggacgacttctcgctgaagacgcgcccgttctgcagaaacccatgcaagaagagcaaccgagccatcctttctgtcgtggtgcttgggaaacttaatctacgcggaacttcgccgtcgctcaagtacggcagcgtgtgcgcaccacgagatgccacattctcctgccgaaaacgcggcggctgcgcagcgcgcagccctgccgcccgccgaagcgcgccgttacatgctactcagttgcccaacgcaagactcttgctagccgtactactgcgtgccagcgcgcgagtgcacggcactgccaaccggaggtgccaatgaccggcccggcgccagccccgccgccgccacaagctaggggcggcggcagtgcatgcgactagtaactgcacgatcgagctaagcgctcgtgagcgtgggaacagtgcttgatgacaaaaaaatttaatgaccatacagaagcactgcctcggcttggcattacgacgccgtggaagaccccaagtcactcgctgtcaagtaccgtcggtgaggtaccctaggatcatggaccgtctgacatctacaaacctggcttccaaggttggtgttccgatggcggtagacgcagaaaaccagctcgtggcccaaaggctagtgggcggaggcacgccagaaagcggagacatatacaaggtaagcaagccggcacatgcaacgacgcgcataggggctattgggatgtcggagagcatgcgcggtggcggaggcgacagcaagcggaaaacgcttcgatacgtgctggaaaaacagggaaacgggccgtcgttcgaggcacaactgttgctagagcggatacctgacagtttgccgccgtgcgaagagttccagcagcgactgcgagagtgccaggacggcacgctcctgctgaatttggctacgacgttctaccagcccctagaggatgtggcgacggtgaaggcgctgttccgcttccgggactacttcttccaccaccagggctggtacagcctgacgttcaaccagttcgtgcgcgtatacccggtgatatcgtgcctgatggtgaagtccaagggccagcgggagaaggtcaagtgcccgaaggcctttgtgtccgagtcgcgctgcagaatggacacttcccatcgctcgcgcagccagcggacacgctccaagaagccgcggctggagtgcgactgcaaggtgaactaccggatcgagatcgacatgacggaacgcatggtgacgatgctggtgaagggcctgcacacgcatcctatcgagaatgtgctggcgttcaaaacgtcatttttcctggtgaacatcctggacgacctgtgcaagaagggccataaaaacgtgaaccagatacaggatataatgaagcagcggctggagccttacgactgggacaacatcggcttcacacagatgctggccacacgctcgcacttcacgaatcgcatagccaagttccacccacccaacggcctggcccggggcttcgaacctggcacaattgtcataacccacttcgaggccgataagccctccgacgagcgcacagaacacgacctcccggagctggtgttgcagcatggagacggcatgcttcagcagcagctcggccgtgcagaccccatggtggacacacagctcgaaaacgaagcgcccgaggagatggagcagctccaggatgccattattttcagcctcaccaagatcggcgaggctgccaggaaccataaacgcaatggcgatctgcagtggataaggaaagcagccaaaaagttaaccagtattgccaaggagctcgatctagactcatcatctgacctgcttaaagagtagcaccaaatttccgaacttctcttacgttaacgacaataatgaacttctttaccttgcttgcagtttctgctgaaaacgcatacaatgcactgtactatagctcttgaagatataccagtcatgggtatcgatcggtatacatgcctactggcggaatgccgttgagaggtaccgtaatctcagtatcatatatcatgagagacggttgcacctggatccattttcggttgtccacctcaatggcgtgaaccactaaccactactacttgaccgcaagcagcagcattcataacgtcggacagcgcttataggtttgtccagacataatattgctatataggagagtacaatgtcaggtatgttatccagccgacttttcggtcgccttaggtggcgaaggcgttgcaatcaatagatcttactaactatggactgcacaggaaatgctcagaagcccgatgcgtccgagatgctagcagacttggatttgaacaagaagacgaaggaaactacgctcgaggcgggttccgccgagagtgcgccatcggcgcctgcggaaaatcaggcaaagtccgattcgaacctcatcaactcagaatacgaggtcaaggtgcgcttggcagacatccaggcggacccaaactcaccgctatacagtgtgaagtcctttgaggagcttgggcttgcaccggagttgctgaagggtctttacgcaatgaagttccagaagccgtctaaaattcaggaacgcgcactaccgctgctgttgcacaacccccccagaaacatgatcgcgcagtcccaatccgggacggggaagaccgctgccttttcgctcacaatgctgtcccgcgtggacgttgcggttcctgccacgcaggccatctgtctggcgccgtcgcgcgagctcgcgcgccaaacgctggaggtgatccaggagatgggcaagtttaccaagattgcatcgcagctcatagtccccgactcatacgagaagaacaaggcgatcaacgcccacattatcgtcggcacccccggcacggtgctcgacctcatgcgcagaaagatgatccagctgggcaaggtcaagacgttcgttctggacgaggctgacaatatgcttgacaagcagggcctgggagaccagtgcatccgggtcaagaagttcctaccgaaggacacccagctggtgctgttttccgccacgttcgacgacagtgtccgcgagtacgcgcgcagggtggtgcccaacgcaaactcgctcgagctacagagaaacgaggtcaacgtcagcgcaatcaagcagctcttcatggactgcaacgacgagcgccacaagttcaccgtgctctgcgacctgtacggcttgctcacaatcgggtcctcgatcattttcgtccagacaaagcaaacagcaaacatgctctacacggagctcaagcgcgaggggcatcaggtctccatcctgcacggcgatctgcagagcgccgacagagaccgcctcatcggcgacttccgtgagggccgctcgaaggtgctcatcaccaccaacgtccttgcgcgcggcatcgacatcccaacggtctccatggtcgtcaactatgatctgccgatgaccgcaaacggccagcccgatccatctacctatgttcaccggattggtcggaccggccgcttcggcagaaccggcgtcgcaatctccttcatccacgacaagaagtcctacgagacgctcgccgccatccagagctacttcggcgatatccagatcaccaaggtgcccacggacgacatggacgagatggagaagatagtcaagaaggtgctcaagtagccggccgccaggctgggccccagtgtatataaattaattactgctgcgccatcgcctgagcaatcggcgcgccccgacgtatcgcacggcttgcttccccctttttccgcacagatgcccctgccgctgtataaaaagcgcacgctcccgcgccgacagcaccggcatcgcccagacgccagccatgaactccaccaaggtcgtcaacgttattatcggtatgtccggccgcctcgccgccacccgcagcagccactaactccgcgcagccattttcttgccgccagtcgccgtcttcctcgcgcgcggctggggggtcgagtgcatagtcgacctcctcctgactatctttttcttcttcccgggcatgctgtacgcgctctacatcgtgctcaccagctgagccctgtgtaacgtatctaatggggccaggccccgcaaaacagcattattatctacttacaaaggcatacatctatgtatcagagctgtggcgccatcatgtccatcagcgacgactgcacgaacgccacgcccacgccgaacagcgcgaggttcaccaccaccgggtacgccggcgagtcgcggaactgctggaacatcgactgcttcttgggcgcgcttgcgcctgcgcctgggataccgtaggcgccgttcatctttgctgtgtggtggcgggagcgtgcgcccgcggcgcgggcgcaaattttatctgccgctgttcgtacacagcgaccctcctgctagtccctgtcgctcgtcacgatacataccccggtcacgaccagcgctgccgtctcgtccttcgtcaaccgccgcctgagccagcgcggattgcagagcgcgcgggttcgggggcgcaacaccagcgaccgtgccagccgcagcacatataggcagaagtcgtacgcgtacaccgccaccagcggtcccagcaacagccacgcgagcaccttgcacacctgccgcgcaacggcggcagcggccagcacagcccagtagcaatctgtaagcgcgtgtagtgagacgtccatggcggtggtgcgagcgggcggtaggtggcgatgcacgctgctgttttaaacccctgcggcgcgtcgagtgccgagggtttccgtgcttgtgtggtgctacgcgccccttttgcctgccggggcgctctgcgccaatcaccagcaacgtagcccctcgcgacgaaacaccacagcgggctgcagcgcccgcggcgctcaggaacaacgttatcagccgcgcacaacagctacggccacggagtttatgtatacagtgctagatgcccggcacacggctattgcatgcctactacggataactctagggtccagaccctgcgtatgtgcaaattgacgggaatagtgagaacgcagagagggctgttgcgcgagagcacgagcgtgcctgactcgctgtcgtagtggccgttcagctggacgtcgacggtgatagtctcgaggccccaccagcacttgcgcgcgggcttcttccaaaacaacaagagcttcgtgtttatctccgggcgcggcacgaggtcgtagagcgagggctcgcgcggcgcgcgcgaggacgagcgggtgcgcgaggacgagcgcgagcgcacgttgtccgtgaaggtggagaggcgcgacttgcgcttctggtcacgtgacgggggagcggacgcggcgtccggggtcacgtggtcctcgtcgtagcggcggcgcgcggcggccacctggtcgcggaactcctgcacggtctcgttcatgaggcggcagagcgagagcgagctgatgacggtcttgccgggctcctgggagcggttgccccagtcggagtgctcgcggaagccgctggcacacaacatgtccatgagatgctgctcggcggggccgagctggtcgggctggtgctgcgcgtccgggcggcgcacgcggttcgaggagtagagccccttgaaaaccgagcgttgctgacacaagtggctgcctgcagcattctttacttgcgccatcaattgttccaggaggatatcctggccctcgcgggagccgtcctccagggccagcgagaccgagggcacgcagtagtagtccaggtcctcgcgcaagacgatgatggcgggcttttcgtgcaagatctgggactccgacatcggctggctctgcgagggggtgagcccgaggaagcccttggggcctgcgtgcggcgcgcgccgcccgaactcgcccacggggaagttctcgaggtcccgctgtgccgtcgtgtacgtctccatgatggactcaaagcacttgggcgggaagttcgcgatgtacacctcgtcctcgggcgtcaagttcgtgatgacctgcccttcccggttcatgaagacgccgctcgggaaaaaacagagcaacaatgactcggggagcgacatcaactgctcccgcgtgatgtagtagtgccggccctggatgttcaagtgtatgagcgtgttctcgtcgtagtagtcaggttcgatttgctctgtcatcagctgcgagccccccagctgctgctcaggggacacctgcgtgatgatgctctgtggctggctcatagtcctatgcagtcgctgcacacaattctgcaaacccactccgctgccccggttcgtgctctgttcgagcttttgtgttgcggactcagttatacgctactaaaaggcatcgttaagtggcacctccaaaattttcagcgtggtttcttttcaccaggtcatccgctacgccaagcgggacgaccgcgacggtatccccagtcactggagacaggtacccggcgcgcgaagctgaccccagctacctgcacggccggcgccaaggcacctagtgtgccctgcatgcttgtcctcggcggggctcagccctagttgtcaccgtattatcactataaacgaacgtaatatcatatataaagccgtgggcgcaccgttcacgaccgcccgggtctgcggccagcatgcgcgagcttagggcttgaaggctcaggccaacagctcgtgtagcacgtttcctaatgatgacttacgttgtttcaaccttatctacattatctgaaaacataattgaagaagacaacgctgctgattggaaacgaacttgcgaagctgcattaacgtatatgtctacctatagctcgtcgtcactgttgatcaggtaatcgtcctggtccgggtcgcgctttttgttctgggcgtggttccggccgccggctgtgaccttagtgggggcggagactggctccggggggagcggctgccagcgcttgcgctccacgtttggaccgtcggggcgggccgggagcgggcctgtagaggtgcggcgggggggcagccggggcgcaggctcgtcgtcgtgctcgtcgtgcaacgaaacgccgcggagctgttgctccgtggggtacgtctcgtcgtcgcgggcgccgaaggagttgaagcgttgttggcgcgcgcgggggggccccgcactggcacgggcgtccgggccgtccagctcctcgttgaagttctttttgatgccgtcccaccacttgccgaccttcttcgacgtttcctgcagcccgcggttgagaacgtcgatgaagtcctcgtcgtcctcactgccgtagccgccgtattcggagcgcagccgttgctgtttccgctggaactcctcttcgcgctctctgatgcgtctttcacgggccgcgcgctccgcacgcaagtcctttttgttgaactgctcgtccagctgccgggctagcatctcgtcctgctgcaactggctgattggcactgtcgcttgcgcggctggcgccgcctgcgtgggcagcgcggcttcctcttcaaaagtagggtcagacaagaaaagcagcgcactaaacgctgggtctagtataccttgcgatgcgatgatcacagccttgacaatcttctcctccacgtttgggaacgctgccttgagctcgctgagaattgagttttcctttggaagggtctgctctctctccgccgaaggctggctttggagcttctgccccgttctagcttcgctgttcgctgctgggtcttctgatgctttagcatcaccgtcgcttccggtggtggcaccttggtcttccgatggcaaaacaggcttcgctggcgcttccttgggtccatcttctatcttggtacttgccgagctggcgctttgaagttctcgcccgctatttttcgctccatcagcatcagtagccttgctgagggtagtgtcaggcacattctcgaccacaaccatccttgatatgcgtattgctcctggttccgtggctcggtcaaagtatgtgacttacacttgtccgagtctttctcagagacaacgtgcagccttccccagttgagattacataataaagcataggccgggtaacaaaatattttggtatataagctcgagcgaaacccccggttgttgtggatacttgtgattcttgcctattaaccccaggaatctaatgttaaacctccgtcactaatggagcttcatgtcgcctttctctggccctgggagtgtggacaacggaggaatagcgttttcctgggactgggatgcttgtgtgccctgttacagcccgcgcggctgcggcttggggctcatcccgggcaggtacatctcgtacgacagcgtagcggtcgccatcacagtcacggtatctacatagtgttcttcatggagcgcagcttggccatcacatcggctctggcccacgtccggtgcaggtcgccgacgcgtcttcggatcgtggggtcgtcgaggcgcatgaaggggttatactccgtttcgtcctgtagcgtaaattgccccgtagtaaccgcattcgcgtttgcgaagctctccaagcgatcaaaagcggggttatccccctccgacatgtagatagccgagcggataaagtgcacattgcccttggtgtactcgtggccggggtagactttggtagcagcatggtcctgcacatgctctagtagacggctgttgagtgcagcgtccatctcctcagcagtgccctcgaagaaccggccacatcccgccgtgaacaacgtgtcgccggtgaagagggcttgctgcccggtttttgtgtcccgcataaagtagcatatcgaatcctgtgtatggcagggcgtgcggatacagagcacctcgacggagtcgccgagcgtgtacttttgcaggtgctctgggatatcggtgcttaccggcgaggtggtggagcccgcaatcaccggcactgcaacaccctcgcgttttagagccgctcttatggccaaatttccgccggcgtggtcgtagtggtgatgtgtgttcacaatcgcacggatcgactgtttctcatcatgactcaacgctgggagtacctcgagcgcctctgctgggtcaattagccacgaggcctttttatcctgggtggagacgagatagctgtagttgacgccccctgtgagccaccgcattttaattgctttcacatgcatctttctgagctgcctgtacataaaactgctgcttcggtgagctttgcagcatgcaggacacatgtatataaaagttaaggagcgaagttatcaggattaatttgaattgaaagcgatggcaacctcggtatccgatgtaaggatgttccatagaagccactgcaatgtgttatgtaattttatactgctatgttatagatgcaagtttcacagcttctgaaacttctcttcaatcaagttcatcaacgtgtcgctatacttttcgagtagcttgttttgaggttctatgattgagcttatcagcttgatttcatggattatggcatcgtgctctggtcccggaacatcttctgaagaaagatagtccctgaacagttttagctgtaacaatagtgttggctggtgaaggtcttcatcgccaatgcagctgcgcatggagctgcagtaatttccagacttgctggaagaaagcccatagcgctgattagacatcctgaatctcggagagcaggcggagtctgccctgctatctggacacttgtatggcaatttcaccggtgaaaccgttgtgtattgcgtccgcggcgcgatggtctcgggccgcgcggccctggcggacacaggttgctcatccaaggattcgcgaagagtcgagttgaccgatatgccagtgagcggaatgaagaattggcgctgttctaacaactggtcgctctgtggcgcccaggagaatatgcagccgttcgaggaaatagagagcaacttgccatcgcgggcaggaactagccccaccacaggctccgaatgtccgaagtactgcttcattagcttacctgttgtaaagttgtagcagcggaggactttgtcagctgacgagcacataatctcttcctgcttgcagttgcgcaggttgaggtacaagttgtcgattataacaggatcatctgtatcagagagcaacttcaagtacctggacttttccaatgctttgtcatatatcaatagttgcttatcattcgtggagataaggaatctatcatcaaataggtgaatattaatcggtgccgatttgatggagaggatcttttctttatagatcagaaggtcatcgtcagtgtattcaaagcgatatttggtaatggaccgatcagcggatgccacatagacaacattgtcgtcgtgtatcatcttgatgacgttccctttgttgtcggaaagtgtctgctggagctcccaccgctcttctgtgcggaggaacacctggacaatgcgatcacgacctatgctgactaggacatcgactttagtcttcgttcctgtttgtaggcacacaatgtcatttatcttggacgtgtgcgccttagtatcaagtacctttttagttttcgagttggagtattcatagatgagcaaatcaccgttgccggtgcccaccgcaagggacaccgtacctgcagtgttgaggaacatctccgcagcgccgattgagctctcggacccaagagggtagggtaggtcaggttcgaggctcaaatctagctcggatatttgctctccatgctcatcaagttttttgaagcgaccctccctggaccaaagaagggtttcgctagtatatatctttttataaccggcgatgttgtttaggactggatataccataggataagagcattggttggctatatcgtaaaatcccagacagccttgagtagtgacataaagcaagtgcgacttgctgaactttctaactgtaattattcctttcaaattattctctgcaatgtgcagcagcggagccaattgtgaatttaaaaatgagcagttctttattacattgctattgtttgggtgccgaggggccccgcgtggagccaatgcagcttcggcaacctttagtcgttcatggttgcccaaaatatactccaacgagacggcatggatctttccatctgcaatggtccagagtgtatcattatcggcgtctgccaagatactggtgacctgcccgtcaaggcatgtctccaagttatgcacactggatagggttccgttctcgtatgaaaccatgatgttcttgtcagtaagcaagagcacacggttctggtcaagctgagtggcatcaataaacgtcgcattgatgaattcccgaaggacaatgttctttccctttattgaggtccgggttcgggcaggctggatctttccggtgctcccggccggcgccggataatcaatgcgccattccttgagatgtctaacaccatatgttataaatttagagttacaccagagtacgtctgtgacagatgatatgtttttattggtgcctagcaaaacaacgttcgtgctggtcaaccgccaaacgtggaggaagccgtcattgatctgccccaagctcataaacacgcgtgagtcagacgggtggaacttcaagtttgcaacaccgaaggagtgctgctgaatcacgaatacaggaaagtcattcgagtccggtgccaaagagtagaccaatatccgtggtttgtggcctagctctccgacaatcatgtagcgcccatcctgtgaaaggttgagacatgatatggtcttgatgcggttcttcactttcgagggcgacaaccgtgcaggcgtgaggtccgacgagctgctgaacgagaccttgtctgggttgtcgttctcgtgccagctgcccgtttttacaaggattgactggtcttgcttgcagagcccgtacaggtccttggcaacgttcgcagactgggcgctttcctcatgctggaccgcagagtatgcacaaaagaatctttgtgaacatatcttcaccgttggacggctggcctccgcatcctccgccccgcctagcttttccacgccctccaaactatccatcgaggaaccagccgacggcgggccatcttgcattctaatatccgatactaccacccctccgctggccacatatgcaaccttcgaacccacgtggcagaaacatgacttggaattagtggaggtcccgaatatcttctcgatatccaagttctcaaaagtaatttggtctttctcctgcatccggatgattttcgctgcacttcgcttcgctgtactactgctctatggataatgcctcggagtgagttgtaacacttaatggcacaacagtgggaatttcctttttacatgtgcgagtttgtcccctggagcctgtagtctgtcggatatcgacaggccatctccgtgcgacggggcgcagatattcttggaagttagcggaattcgagtacctacgtaatgtaatatcgaatacaaagaaatattgtgccggccgcatcgatataccggcaatcggcataccgtatgtggacagtttatttgacacattaggtattgcagatagcatccagacagcgatccatggttacttaatgtgtaaggatttgatatttgcattttttcacctaaagtttaagccacctcaaggtaattcaggttcatcgacagcgccagtaagtgatgattaattggcgttctatctgatttgagaatctatttttgattaattaggttgccgtattctatgtttcgtttaatttagtatcattactacttcctatacaggtagatcaattattagaggcaatatcaaagaagtcccatattactgaggagaacagggaacagcctggagaaagaatgccgcagacgtacagatacacgctggaaaatcagcttgcccagtgagtgctcgaacagccgataagagtattgacagtggtagcgtgcaagagtcaacgacaaaatgaacagaacatcatacttcgggcgcgagatgttgaagctcgacttggtccgcccgtggaccttttttgaagaagttgcgccaggatcccacggcggccttgcgcgacgcagcagggactggtctccagcgcgccagcagcagggagcttgtcaccacgctcacagagctcatcgccatacccgcggcggcagccatgggcggcaattgtatgccccacggaatgaggacgcccatgctgactgggagcatgagagaattgtacaggactgcccagaaaatgttcagcttgacgcggttaaacgtggcgcgcgcgagatcgatggcatacagaatgcgggttagcggcggcgccgaggaatggtccaaaaccacgattccggcggcgtccgcaacgatgtcactgttgccggacagcgaaataccgaggtcgctttcagcgagtgccacagagtcgttgatgccgtctccgataaaggcaacatagtcgtacttttgccgcagctgccgcaaaacgtcgcacttgccctctggtaaacgttcactgaaaacattgttgagcgggattccaagagcgtgcgatacatgcatcgccgcctcgtggttgtcgccagtaaccattccgacgtagtggccgcgggaaaggagcgcctggaccacttcgtacgcgtcctcacgtagggagtcagaaaggtcaaagcgtcccagtagaacatcgttcacagcaacaaaggacgcagtggaaccggaaaacttcgatggcccttcgggcagcaagcgtgcactgccgatggtgatcctatgctccacgccgtctagttgcaaaacacagcgcacacctaggcccacaaggacctcgtgatttagcacaacaatgcgcgcgacggcctccggcgaagcgtatggttcggcatatgtaacgatcgcacgtgcaatcggatgctcgctgaggcgctccgcggcgcaaaccagggcccactggtccggagtcagtgccttggactctgaggtgaagttgtgtacagtcaacttgccggtggtcagcgtgcccgttttatcaaacaaaatcgcctgcacagcagcggcggtttctatcacgtcgccgcccttgaacagtagtccgcgttcagcgccgagccccgtcccgaccatgatagcggtgggcgctgcaagccccagcggacacggacaggccaccacgatcacggtaatcgcgatacgcgagcagacgtacagtcggttggagttgttgaagatggatggcggcgtcgccaaaagcgtgcagatgagcatccagcatacgaaagtcagcaacgccaggatcagcacgctgggaatgaaccacgaggccaggaagtccgcgtagcgctggatcggtgccttcgcgagctgtgcctgcttcatcgcagcaacgatgcccgccaggcgtgtctcctcgcccaccaggtccgcgcggtacaggaaccctgccgcgccgttcacagagccgcagagcaccctgctgccggggtacttgggcaccagcgtcgactcccccgtcatcagcgactcgtccacctccgcctcgccctccagcactgtgccgtccgccggcagcttcgtgcccggcctcatcaccaccacgtcgcccgcctgcagcagctccacctccacctcgcggtcgctgcccgactcgcggatcgtgcacatgctgggcgcgctcgacaccatccgcgccagcgagtccgccgcgcgcgcgcgcgcgcggctctccagcagcttgcccacacagatgaacgccaccagcatcaccgtcgtgtccaggaacgtgctgggcgggtccgcgctccccagccacaccccccggcagatcgtcgcgaccgagaacaggtacgtcacccctgaggacagcgctaccagcgtgtccatcgtcccccgtccgtgccgcagcgcgcccagtccccgcagaaacggccgccccgccgttgccagcacgccgctcgccaccgccagcccggccacgtcccgccagaacagccccgccagcggcgtgggccccagcgcctcctccagcggggccaccatgtaaagtcccatcatcaccgccgccgcggcccacgcctgcgccgcccgccgccgccactgcgccgtctcctctgcccgcgcgagccgccgcacctgctcctcccgcgcacatccgcccacccgcgcctcgaacccgcagtcctcgatcgtctccacgatctgccgcagccccacccgcttgcgctcgtactccacccgacactcctccgtcaccaacgagacctccgcgttcaccactccgtccaccgcccggaccgcttcgtccaccgtcttcacgcacgccgcgcaggtcattccgcgcaccgatagcactgccgtagtccccgccatgcttccgttgcccatccgagccatctctgcctcaagccctgttacctccatcgctttatatcgcgcatcagctggttgcacctctcttcagaagagcattggtcagtcagccgtcgttatatggacacaaatattttccagggtgcagtaaggcattacttacataatgagttctagagagtgagtaacagtcagcggtagccatgttttattggtaactttacagattagatgtctatagcacaggacggcctatttcttgtagcccccgttcttcgtcaggtcgacacccttcttgatgagctcgcgctcgagcttcaagcgctggagctcctgccagcgggccagctgggcctgcttgtgcaggtcgaagccgaagaccttgggtacatagcgcttggtggggtgcttgggcacgacctccgggaaggcctgcaggaacatgccggggaagctggtgccgaagtaggcgccgtcgatgctgctgtggcgcgaggacttggggatgtagaggtcctcgcacgaggggcagtagagcttgacgcagtcgatgccgggcacgtcgtgcaggccgacgggcagcagcggctggaagttgcagtgcacgcgggggcagcggcagaaatccgcgtcgcggtacttctgcagcatcttctgcaggcccttgatggtgatgatgtagcgcgcgtggatcagtccgtacagcttgcgcgcgtctgcctcgagctgcgtgagcttggtgcgcgacatggcctccagcgtcgtgtcgtcgagctcgtccaccatgtactggatcacctgcgtgaacttgctgacggtcttctgcagattgatcaggttgaagcggtccgtgatgtactccgtgtcgacgtcgcagaagtactcgtggcccttcttgccgaggaagaggtcgatccagagctccacatagtcgctcgacccggtggaattggtctctactgcgtctgccatctcgacgtccgcagtctccgcggtcccgtgctcttctaagcgcctttcagacattgccgcacgtttgccagagcgatggaggttctctcgcaggtctgatggctgctagcatcgagtggaaaacactgtgcatggccggcttttcatgcgtccgtttttgctggaaaatttcagcctcttcccaccagagctcgaacggtagcagcagcaagcaggtactggcgggcgtgggacgttagatgaagctgctgaagtacccgagacagctgcatgacgggcaactgctcgcgggctgcgtggttggcggcctgctggtggttgtggggcgagacaggatatctgcgtacgactgcgggaagctgcaggcggccgcgcggggcgagctggcggtgcgggaggtgagcgcggaggtggagctgcaggtggaagttggggaggatgcgctgcggtacgtggccgggggcgagggcgaactggtcgtggcgggggaccggcagatctgggctgcgggcgctgactggcggtctgcggggcgggggacgcggttcctcacggtggcgcagctggcgggcggggcgtgcgtgacggatgtgaaggcggacggggcggggctggtgttcgtgagcgtgagcgggaaggacgaggtgtggttgtatgcgacgggcgcgtgggagcgcgtgggcgtggtgacgttggcggcgaagccggtgacgctggtggtggacccgctgggcgagctgctaaccgtggtgctgcagaaccggtcggtcgcggtctaccagtacaaccggcagggcgcggtgcgcatgcaccagcagctgccgcagtacgtgcagacgaacccgctgcgctacagcatcacgatgtcgccgcagggggacctgcttccgctagtgaattcgatcaagaacgggctgccgtcggcgcagctgctggaccgcacggcaggcttttctgtgcagtctacgctggtgggatacgtcgacaagtgcaaaatactaagattctcgccgcgtctgtacgagaagccgaataaggataagccgcccacgcagtacaatctgctggcgtcttcgggcaacgaggacggcagcgtaattgtgtggaacacgaagcgtacgaagccgctgttgaacgccgcgaaggtgaccgacactttcatcaacgacgtccagtggtcgcgcgacgggaccgggctcttcgcgatcagcaacgacgggtacctcttcatctttgcgttccacgaggtggagcttgggcggctgctcgacgacgccgagctcgaaaagctgcgccagagcgtcccacggctggaaccgctgccgccaccgacgccgaagtcgctggccaagagcgaggcgaagccgcagcaggacaccaagcccgatgcaaaatcgagcgcgaacagcgtctctgccaagacaggcaagaagaaaatcgcgccgaccgtcatcaccagcacgtcgatggagttcaacgagccatcgtacactgttccgaaggatctcaagcggcggcccaagcaggagacccaaacgaacgggaccaccaccaagcgccccaaacgcgacgtcgagccgatggactttttggacaccaacctactaattcctaatatatctttttcgaaagcacggttggccactcccaaggttcgcatgaacttccagtactgcaacacactgcagcagaacctggtaatggaggtaaaaaacggtacgggcagcgagcaaaagcccacctcaataacgttgacgttaaaagacaaggagaaggacatggtcctgttccaggacttcaccccgcggttcgtcaccatctgcacatgtggtcattccttttgggcctgctgcaccgaggaaggcatcgtgtatgtctattcgaataccggcaagaagttgctgccccctatgattatgggcgtgccggtaagtttcctggagggctgcggggactatcttctctgtgttacaagcatggggcaattattctgctggaacgttaaagagggcaaacttaagttccccgtgaacaccatatatccgctactaaaccccagcatcagatactcagatgacgtcctgacccgtgcggaaaatatcaccatgtgcacgactacggaaaatggcattcctcttgttactctaagcaatggtgacgggtacatgttcgacccagacatggagatatggcttctcattaacgattcctggtgggcatatggatcccaatactgggactttactaataccagccatgcgggcagctctgcagcagctggtaatgacaaggaggacaagaagaacaaatactggaacgcagacgccgagtatctgatcgaagaggtgaagaaaaacaaaaagagtgtagtaaactaccttgaatcgaagacgaacgacgaaatgacccgcaagggtctgatccggaacctgcaacgatttgcaaagacaattctaatgaaggaagggttcgaaaacctggaggatatcgtcacgctttctcatttggaaaatagactgctggtagccctaaaacttaacgagacaaatgaatttaccaaattattgaaagtctattgcatcagcctagcagaaatgggcttcaaaaatagattggatgatgtgctgagctggctgtataacgatggagaatacaaggttggcacaatagctaacgagaagcgggaggaactgctgaagcagatattggttgcatgtgctgatatccggcaggtccaaagagtgacaaccagttacgcatctgctcttggtcttcttgatgtatctttataattattgctagtctatagacaaagttggaatctgaatataactaataacccattatcgctctgacttctgccagggttttagcagctatggcacctgctcgctcagccccattgcgctcaacctcgtatatgtatgatttatcattcatatagcgggcaaactcctctctgggccccctcagctcagctactaggatgtctgtaacatagtttttaaaagttgcgtggtccttaaatccagcaatatctgcctccaccgccgcgatagtcttcttctggatgccagctacgatgttaatcagattagatacaccagggcggccctctgggtcatacttaaactcatggccaatcgaatcagtgaccgcgctcctgatcttccgcctgatggcatccggctcgtctgtgacacatatgcacgaattttggttagcgtcgcttttagacatcttcttcagggggttctgaaggctcagcaccttcctggtgggtgtcagcagcgtagtgggctcgcggaagtaccgtgtcttataagtgctgttgaatgcctgcgccagctggcgcgtcaactccagctgctgcacctggtcttcgcccaccgggatatgcgtagacttgtatagcagaacatcggcggcttgcagcacggggtacgtgaacagccccagttttacagctccgactttctccgagctggtgtccttaatgttggccttggtcttccactgtgtcatccggttcagcgcgcccatcgaagtcagcgtcgacaagtaccagcagagctctgcatgctccggcacttgcgactgatggaagagaatggacttggtagggtctatgccaacagcaagcagagatgcaatggcttcatgtctcatctggcgaaatgcattgccgtcaggcttcgggatggtgatggcatgcaggtccgccgtcccgaagatacacttcccacccgctggtgcatcctcggagagctctgtccatacacggacagctccgaggtaatttcccagatggaattttcccgttggttgtatgagactgaagacgacggcaccatcaggcaacttcaacgacctgttggcgtaatctatattctgtatcgtactagctttcctcacgaactgccgtagccccgaaccgcacttgatctgcatcgtgatgcccgaggaactgattaaattactcaagtctttgtatctcaccattagattgtcacaggctgaaaaattggcaatacatgctcaagattcgtcagcctatccaacgtgatgattattctcggtaagtacagtacttaaacgacaatccttcactaagagagcttatatacatttgaattatcccaacccttggtgccaagtaagcccgtgacgggaccctgagaaagcccatgtctggggcccgctataaatgcgatgtagtcatcggggccgcacactaatgacagcacaggctccgcctttgggcgctgttcaaacggagcattttccgagaatgggaagggaccgctaacaagatcagaaatcttcgacaaccctagacggaggctctcccccttctcggactcaaagacatgcagatcaaccctgtcatgttgggcgcagcgccgcaggagatcgccgagaggccccagttggccccagcttttgcaggagtagaagagctggatcttgcccttgaacgggtcctcggtcgtcagcagctgcagcgccgtcacgatccctgtgccggctgcgaacagcgcgatgtcgaacggccgcgcgcgcggcagctgcgccgcaggctcgccaccccagaggaattcgcggtcccgctttgtgtctgcgtccaactcggggaactcaaattccgggtacgggcctctgacctcgacaatgtggcccttcggcagcttgcgcagccaacgcgcgacctccccgctcccgtattccttgatatagagcatcagcttgccaccgccattgtcgccgtcgcgcagcgccctgagctgctcgccgtcttcgtccgctacgagcggcagtggcgtgtactgtcgcactaccataatctctggctgtttgatctcaactgcccataggttccgcgccccaaacagagcccatatgttattccgctgctgcttgaggggtgtcaactccagcaggtagtggtcgatatcgatgtccttcctataggatatcttgtactttgtaaaatattcttgcgacagctcagcgtggtagttcctgcgatggtattccgctgcagcgcacccagcgcctagcgctgtaacgccacataaaaccagcgggagacggccgggggcccgtcgctggacattggccttcgagcaggagttgtagaatctcttccacagcatggatgaaatggtacgctgtattacaaagctgccgttagacttccatagcatgaaaaatattattactacgtctgctcatctacagcagagcttcgaagctgaattggtcccttcatagtagcgacaggatgcccaacttgcatctagtgcgatcattgaaactgcatggcgaccgctgttggtcagtcgatatctcaaaaggcctgcttgccacagggtccgcggacaggaagatcaagctcgtagacgtcaggaacttcaagctcgtcgaggagctcgatgacactgcgcacaagaaagccgtgaggtcggtggcatggaggccgcattgcaatgtgcttgctgctggttctttcgatacgacggtgtccatttggggcagggatgacgatgactacagcggcgaaaccgagcttctggctgtgatagaggggcacgagaacgaggtaaaatccgtggcctggtcgcacgatggcgcgtacttggcgacgtgctctcgggacaaaagtgtgtggatttgggaagcagatgaactgagcgaggagttcgagtgcaacagtgtcttgcaggagcactcgcaggacgtcaagcacattgtgtggcatgccagccggcttctgctggcttccagctcgtacgacgacacggtgcggatatgggcggagcaggacgacgactgggagtgcgcggcggtgttgagtgggcatggtggcacggtgtggtgctccgacttcgagcgggccgagacgggcatccggctgtgcagcggcagcgacgacaccacggtgcgcatctggcggtgcctcactgacgacgccgacgtcttcgacaaagagtggatccaagagacggtcctgccggccgtgcatacgcgggctgtgtacagcgtaagttggagcgcggacgggcttatcgcgagcgttggctcggatggtgtgttggcggtatacaaagaggtacaggctggccggtgggaagtggtagcccgcgtagattgcgcgcacacggtctacgagatcaatgtggtgaaatggctggcgttagacgggcgcgttcttttggtgaccggcggcgatgacggctgcgtgaacgtgtgggaactgcgggaggagtaggtcagccagtagtatattaaagcgttacatagtagactagttgagatgttctaaagcactgtcaccccgatcaggaagagcaatgccagcagagcgagaagcagatataggcaccacctgttggaacgccgctggtatctcagtgcgcgcgacagttcgttagatgcatggttcgtgctggttaccgcagtgtatatgttgttttctatgtggtctaccagctcgctctgctgctgcacgatggaccccaagtcttggaagacctcgttgagttcaacgataccacgctcgatgttggctatctcctcgtcccgctttcgtatcagctcctgctggtaggcaaactcctcgttgttgatgggctcgcgctcgatcacaatgtggtgctgctgctgcgccgcctcctcttccagtgccgctgcgccagccgcttcctcctgttgctcgctcagcgaaatcttggcctgttcattgatctgcttcctgatgcccgcaaactccgactggcacctctggaactcctgcactgacagccgaatgtcccggttcagcttttctcgggtcgtgagctgggtcctgtccaactcgttctttggtatggcattgatgctatgcacaagcccattaagggtcttcaccagcaaagacaccttatgtataacttccatcgaccggttgctgatattctccaccaccatcgtattggccttcccattcctatagttcgactccagccccttgataaagtgctggaacgtgcccagctgcccgttcatctcgaacaggttgctcactatgtctgtgccccattcctcaaactgcgggttgtcgctataccgcgccacttcctgggtatcctcgctgaatatcgacatgttcgaccaatgctcagtagcgcccgaccatggagtagtcagttcttggctgtgcacccgcctgaaatcttttcgcgggtaggcgcagagcagtaagcaaagtcacgcatctatatatttaaacactaagaacagaactctatatatagacctactagtcctccttctcctgttgggagacttcaagcttaacctcctcagcctgtttggccgcctgggcagtggctagcttaaccaatttcttttggcctttctgccgctttgcggtacccttcggggtcgcgacgggcagcttcggactgaacaacgagtacagctgccatgtcaaagaccctatggcagaaacggctattaacttgagcagctttagattgctctggataaatttggggtccagcaggctcagctcgacctcctcgatgggctccatcttggggtggtgcgacgggaagtaacggttcacctgcaggtcgcggtcgttccgctcgtactcgattctgcgcgattcgtgctcaaagatctccgggaaaataccggcccgcggtggggaggcgcttaagcgatccgcgggctcgaggctcgtgtagataacggtgaccgccggtgacgggagcctgcccagtattctgcgcaagcgctggtcgtggtccgcaagtacgtcttcccgtgaggggcgctcgttccgaccatcgcccgggagcggcgagaagtgcacctgtatgatgcgcgactgtgcatcgatgtagggctcgaattggttggtttgctctgcacgcaagattatctctctctgcacgtcgcagcggcgcttggtgtgtgcaatgaggttctcaaagacattggagggcgagacctcgacctgctcaaaccgcagcgcactggagctcctgctgagataatttggcagcaccgtccatgcgtcttcgtagtcgaagtcctcgagtctcagtccgggctggttgacaaacacatatgcatgcgagttgcaatggtcgagcaattcgagcgctatcgcgttgaactctggggcaggcagtaccgtggtcatgttgtatgccaactggtactcttgtattccctcggacctgtaactgtgttagcattgaacgttgttggcgcctaatagtcgaacatacagtttatacgaccagagaagagcaggcgctgacttccctggaagcagttcaccctgcaccaccgcgaccaccagggctaggagccagctcgcgacgttctgcatggtgttggctgtttctctgtgtgcttcgatgtgatgaagttggtttgctatgtagtaagcctgaaaatcggcggtgtcctcttaaaccggtaccagagcaagctgggctacacagagttacacaagcttagacagctgtagctcccagaaggggcgtcttataggatcgtacgcggacgccaagcccttgtacgcacgccttgctttgtcgtgggtggccttctcctgggagtagacgtgcgccagcagttcgagtgcgtgggacgagcggatttcgggcagggcgttgccctcagattccgagtccagcaagtcgcccgtaaaagagagagcgaagtctacaacgtcctcgtcgtagcgccccccgcggaactggtcgtacaagcctcggaggtagttccagctgctcgaattttgcggcacgagctcaatgttggcgcacgcgtagtcgacctcgcgctggatgtcgctggccgagggcgtggtgctcttaagcacaaacattcggtgcgcccacgcgctgttgttgtagacgtcgccttcgatcatccaggccgcgtactccagctcgtgcctgaaatcgccgaagaacagcaccgcccacttgcggtacgaccacacgtggtagttcttcgcgtcctcctgcagcatcatgtgcagcaccggcagctcacgcggcagcttcggctcagggtgcagccgcagcagcgcctgccggtacgaccagatctggtagttcttcaggtttcccagcgtgaactcgtccagccagtcgagctccgcattcagctttgcggcgtccgcgccgtacagcgccttcaccagccggtagcggtggttccacgtcgtgtagtccgacggcgccatccgcagcgccgtgctgtttagggccagcgcccgcgcagacacctcgtccgccgccatcagtgcgcgcagcagcccaatcacgcgcgcgtactcgggactgtacatgatctggcatatctcgccctcggcgcccagctcgaggctgacgggctccaggtcctcgtagttgtacgcctccatgccgtgtctgctcccgtgtatgaacgtacgccgcagccctacttataggtgcaggcgcagatcacgtgattgaccccacttgctcgcgctgcatcaggtcacgtgcagactcctccagcctggtaggccgttcggctggccggtgttctaatgctggtgtcacgtgatatccccgtcggtgccgcggtgcggtcataccgccggaggcctactttggaaactacaaggtctatatttgaggtatgaacgccgaatgccgtcttcaacacgcatgtgcaccgttgggcggatttccactgtcctggaaaatcctgggcgacctaattcggctagttgctgagtaattcatgcgaagcaagctgaggtctacgttactcgcccgaacgacctactgcgtggtcccttaatttcccaaccgtgctacacctcaattcccccacatgccgagcttattgtgatagctccccaatcgtctagcgctcttagggggcttcagaagtcaccaaaattaaccacgtcagtgggctgggtccgagttcgtccgcgctatctgtggcatgaggcgtgtcgcgcaccggtgtcaggtaacaccgtgatagcgatttttcgatgtgccttgcaatataaatatgggtcgttcactctgtcacaaccataccacaacagcgaaccactacagcagcggacagcgcgttgcagaaccgggggcgcaacagcaagccccatgacagtctacgaaggcggccgagaaccgcgaccccaaaagctcgcagccccacgccggggaacaggatctcagcagacaggttcctagggccccgcagcggcagcggacggccgaggtgcaatggccgccaggccgcggcgcggtgtccgggtgttttgctgacgcggactccacgtgatcgccagttgccagggcaccgaccgatgcctccgtcactagaatagtcctggctgtgcaacggtaggcgcgtcgtaaccttgctctgtttatttacgaactacttgagactcttgttgccctgcagcgccggatcaacaacgtatcggcggcattccatgaagtgctgagcccctgaagcctcgtccgcgcagtcacgtgcgccttgcgcggcgctctccccgccgcggttatcggcccggaatacgcacgtgaccgtgctggcaatttcaccatcacagacgcgaaatcgccaggcccagtccccgaataggacagactggtgcgatgtcagtgtcagagatccagctgcaatacgcgcctccgtaaccaaaaacaacaaacgatataacctgacagaaccggggaaaaaagttgctcttttacacaccacttcagttgtttacgagcattgtgaagcataatcttgaggaggtatatatctgaattggcagacatatatagaccgcacgaggcagcgcgtagtttggaccaataggcgggaccagcatcaaggtagagaaggtacggagcagtaacgcagacatgggaccaaaggccacgagcgggacccggggacgggggaagaaggtgggcacgaagacggcagcgccgcttccgaaatacaagggtatgttggcgtggacacgggcggcgggacaatactaacgggcggcgcagacctgatagtggaggcggtggtgagcctggccgagcggggcgggtcatcgcggcaggcgatcaagaagttcatccgggacaagtacgcggtgggcgcgaagttcgacgggcagttcaatctggcggtgaagcgcgggctggaggccggggagctggcacagccgaaggggccggcagggtcgatcaagctgttgaagaaggcggcgcagccgaagccggaggaggcgaagcgggcggcgaagcccgcgaagagggtcgtgaaggcggcgaagcccgcgaaggcgaagcccgcgaaggctgcgaaggctgcgaagcccgcgaagccggtgaaggcggcgaaagcggcgagcgccgtgaagccggcggcgcggaagctggcgaagccggtcgtgaagaaggtcggcagcaagaaggtggccacgaagaacgcggtggtgggcaagaagtcggtagtctcgagcgccgcgtccaagaaactgctcgcgaagaaagcggtgccgaagaagacagccggccgcaagcccctcgttgggaagaaggtggttgccgtctcgcggaagccagcggcaaaaaagctggccaagagtgcctagtcccgcgtgggcgttgtattaaataagggaactgcgggtatgctgcgaggtagcggctgcccgtgtctgctggcgaggcacgttaatattgacttcagaaactgtactctttctactgctttggggctactagctacgccggtgttattatactcctttgattatctctatcttactatttttttattataaccatgttattattgtactgtactattcaactcatgtctcccctcatgtggaaatatagaccggccactgcaatggatgtgcctggctccagcaccgcctggcctgcgcgtcggataaagtaggagacgattgatatttagatactttgtcccgctaatataatgaactgtgctaattactcggtcctgcctgatatcactcaaaaagcactgggggcacgtccgatgggcgctgctcgtcattcttaggctaatgtagaatcgaagggtatatttagcttatatcacctgattcagacattctggcatcaggttcgaatatgcctggagcctattttgcgtttcttttttattttccacaatatcttttgacaatcgttctggacgttcgatgtccgcgatgagctagcgtctctggaggtgtgtatagtgcgacagagcggtattctgtgccttaacagcggtccttaaggagcaccaatggcactgggtataccatacttacatgaatacgacgaagatacgttgaagcagagactcgaagcagtattgcccggcttaccatatgcaactcagcttacgctcaagtcgcttccgctgctgaatgacatttccacacagctcctgcggcttttaactatcacgccattgcatgtgctgaccggttcggtgcaggaagacaaggcggctcaggcggaacacgagctgttccatgtgctggtcgacgcattgatagaggtgaaggaagtctacggagacacttctctgctgaccgtgtacgatgtggctcccgggatatggttcccaggatgcgacccgccgttgatcctgcggaactttgaacagttcgttctcgcaacgatcaggaagtgcaacctagtcatgttcatgctgaccttactaggcaagttccagtatggcttccagttcctcaacgagtgcttcattgacatcttctgtcccagcaattcgtattctacttcggacggtggtaaggacactggatcctacagtgttcagagcaatgcgtctttcacaccctgcaccagcaccttttccggctcgctcacttcagcgatcgggggcagactgctgaagacacataccgttctctacttgaacatgaaaacacaggcattcatcgcggcgatggagcaggaggatccgctactaaacagaaaacagatccttgatacactattccccgccgatatggctacatacctgcagcttaaaagtggcgaaccggcaaacgagttccagctaacgccaagtgaaaaggatttcatcacgcgctgtcagcgcagacgtgagacgttggaagcaaacacagacctccgagacattatggagctctacaaatggtctgattttctaaaggaatttttggcatatgtatccaagaatgtcagtcttctagtcttcgggaagcgtgcgaagtgtgcggctccaaaacaatttgaattatccgattcactgggatatgcccccatccaaaatgcccgcctgtcatccgctgtacatccaagcgactcctcgataacgcctgccgcggtgaacacccctatcgcaagcgcctcacctaacgaagttgaccagcgcaccgacggggtaaaagcacccaacggggtctccagttgctcggtgccctccggtcacctcaacgagcccattattgcccgcaaaaagttacagcagaagcgcatgtgggtcaaggaagaagaggaagccctcatttcggccctcaaagtatacggtccagcgtggtccaagatactagagtatcacggtgccggcggctctgtctctgagactctaaaaaatagaacccaggtgcagcttaaggataaggcccggaattggaagatgcattacttaaagaaaggagcgcctgtgccattctatctgctcaaggttactggcaacttggaacgagaggagaagttcaaaaaaagatcaaaggcgaaaagaaagtcaaagggtagcccatcccagtagctctttccatagacctcatagcataaaacaaaggcagcattcagaaatgccttgcacgtacataatcctaccttccgcacagtctaacgtgataggaaggacaatctcacgaacccagacgaaaaagctaatatcggtggtcacctttagaaaagatatacaacgagtcgtctacctggcgtcagcttggaatgccgcgcttaagtcaggcctacaagtatgctgatattcacggaggcgtgttccgtatgaaatcaccacatcttccttttgttccgcgattggaatgcctaaaagttgatgtaaatatatacatggcatctcattacgtaagctactcgagggtttgtgatcgcgtcaaacccacacagtagaagcaacgagaatacgagcggcacagcggcatagattgccttaatgatatgcgttattacttgctcctaatgtcggcatccaccaatttttctgtgccttcctttgtgcggggaaatgagagctaataggagttgcacagcagtatcttggcatcgtatcggcgcggacttcctctgcgtgtggctgcttcagaatttttacgtggggggttgctcgcactccgtcatatcccctcctgaaatggaatggatagcattagatatccatccatccaaatatcatttctcaatctgccagaaaccaaacgacaatccatctactatcagccagcaggagatagttgcttcagaatgaaagggtatagtgagaagataaaccccccatggcaacccttccatgcgcaagatataaatgtgccggacttccctgctacgacgctggagcacgcaccagaagatgtcgaacgacaaataggacttgcaagggaagaatacaagcagctacgcactcagattaataggataaagtccagaatacaggacgctgacctgcaatctttgtctaaaaatgtggcgccgataacatcggtcaacttaaaaccagtgacaacattaaaagggcataacaataaagttagcagtttcagatggagttctgactctagaacaatactcagtgcgagtcaggatggcttcatgctgctatgggatgctgccaccggcttaaagagtaatgcgataccacttcattcccagtgggtcttgagttgtgctatatgtcccaatggaaacctagtcgctagcgcaggactggacaataactgcaccatctatagagtctcacgcaaggacaggattcagcagaacattgtttctatcttcaagggccacacatgttacatatcagaaattgaatttctggacgataattctatcttaacggctagtggggatatgacatgtgcactgtgggacattactaaaagcaagcggataaatgagtttgctgatcacctgggtgatgtgttgagcttatccgctgcccccacagagacagaaggcaacggtaatgtttttgcgagcgggggctctgatgggtacctttatatctgggataaaagagtacccacaagtgttcagagttttttcgttagcgacagcgatgtcagtaaggtcaagttcttcagaaatggcaacactatagccaccggctctgacgacggatgcaccaatctttacgacttaagaagtgactgccgaatcgcaaattactctctttccagaagtattcatggtgcaaccccggttcaacagcagacgtatatcatgtcgaatatggactatacagccccatcgggtacccttgcaagagcgagcccctattcgcccgcaatcggcacagtttcctcaagcttcatagacaaccagggcgtgatttcaatggattttagtcgctcaggccgcctactatatgtatcatacacggaatttgggtgcgcagtatgggatcttgttaaaggagagataatcggcaaacttgacggccattcggacaggatatctggcgtggccactagccctgacggacttgctatctgcaccggctcttgggatatgacgatgaaagtgtggtcacctgcctatatgtgaatctgtactctacacagtcctcggcgcgtttgctgccctagtttcattcgaggactgcagatcccgcttagctgcaccaacaacagtgcaccaaatagctacttacacatcaccatgctaaatagttcccagttgtgcttactctagtattgtccctgtaaaatattaaataaaatctccagtacactgcttggcagctgtcccagttgaataacgaattcctctgtcctgtggcgacgcttcagcagtgcatcactgactcctggatacgcaactatagttttcactacctcgcccacaatctcctcgttcgcagccgcgatggcagtcgccatttggggtatcttctgcctcactgggtggtcgtcccggtcttctatactgtagtcgggcactggcccgctttctaataataccttacggagctcatcaatgtggtacggtaccatgatggtgaagtcgaccgcgacggcgctctccgaaaacgacagctcgtggttgatggtagcccggccgccattctggatgaacttggcgacgatcttgaagtcgaactccccccagccctgctcatccagccggaatggtggaacggtgaagcgcctttttggatgctcgaacgtcgggtgcagaaagtacgtgcacgactcgaagatacgcgcaggtacctcttctccctgtgggcccacgaggcaaatatccatggaccaccgccgcatgggcagaccatctatcggcggtatgctgggtatcacagcctgttggatcttcagcctgaccacccgttcaaccgtaggctgcgatgctcgtgttagtacatatgcctgtggcccaatagcggactagacttacactttgcattaaactttcttctgggcgaagtcttggcagtcatgtaatactttgttcagcggtctgatttcaggtgcccaaaacctgctacacagctatagatcgccacaaaggcaggcagacgtgggccctgatatttggtcgccgatgttaattattacagaaagctccgagacgcgattaatcatacctacttgcctactatacaagctagaagcctctactcgatgttcttcttcacatactcccacaagcttttcagcagcccctcgggcagactgtacaggtcgatcacaaactcgccctcctccacattgttggtgatgttcatatccggagtgcggttgtctgtgaccatctgcacaacgccgaccaggtcgtcctcgttgagcttcgtcaggccgaatgcgagcttctccaggtccaccgagcccttgactgtagaccccaccgcggtcttgaccttcttggctttggtctcgccattgctcgtcacggccttgcgcttgttctcaccgatggccgccgcgctcaccgccgcgccatcgtccaccgggccgcttttctccagctctgcgcgcagcagcggcttattgatcggcacctggatcacatggtctacctggtacgcgtccttcatgaagtgcaggtcgtgcgtgatcttgcgctcgccggccttctccagcaggtggcagctgatcagcagctcgaacccgccccagccctgctcctcgatcttgaatgggggctccgtgaacgtcctgttcggatttgcaaacgtcggatgcaagtggtacaccaccttgtcgaagagagtcgcgggcagctcctccccgtgctcgtccagtatggcgagctggatgctccatctgcgcatagggaagttgtccacggacggtggcacgtccgggagtatggactgctgtgtctttattctcacagttctcttgaccgtctgcgttgcgtacatcgttagtcactggatcaccacgcccatcccacaaatcaattgctagtacataccgcaaccataatgatgcaaactagaccaaactggcgcacttacttgctctgctgccagctgtagttgctgcttgagcagaagttgatatcgggaagattcaggaaaactacataccgtttgacatgatacatatacagctacccatggcaggacggtctatctacagggagcctggggccagctgtggacgcattgggatcatgagctcttcttgaaggctgcggcaagggccgagcgcactgctgcgggcgatgcgttccagtcctgggcgacggtcggccaggagacctgggcgaagaccttggggaggggcagcgcgccatgtgtactcttaagttcgtgtaggaaggcgtcggcgcgggcggccagctcttcggcggaggcgacaggcagagcggccatgtaggcctggatcagctgcatctccagctgctccttctggaccaggtcatcgcggccattcttgaggaagccatcgatggactcgcgacgctgcgcaaccagcttggagtagatgtcgtggagggcaaagtggtcgagcggcttgtcgcggctgtcgatctctttgttcttaatggtggccagcagcgagcggatcgtggttttcttggtgtcgtccttggcgagcatcgccttcttgaggtcctgcttcaggtgggcgagggcgtcggtgtacgcctgtgagctggcgctgcggcgcgcgagcgcgcggaagagcagcatgggcctggcagcggagttcatgagcatggtctggggcgtgcggtgtgggagaggtgaaaaagcttttcgggcttttgtgcgcggggcgctatctggacaggccaccgggctgggtggggcggcggcggcacgcgtggcggcggccgcagggccacggcggcctgggggaattgtgatatatatctgctgcgcgagatctagcgcccgaaactttagactacatggtgtatcgctatttctcgctctcccgttcgagaaactctgcccacaacgagacgaagctgtcgttccgtctggtcttgcggatggtgtctgaggagctgtgcatcaaccctgcttgggttttcttctcgtcgtcccagctcaggaaactggatatgagctctagaacctcaaacttcttcgggtcgccacgtggtatcgacacgaaggaaatgaacaggttcgagataagctccttatcgacagactcggagctgttggagtgcttgatcatagcgagcgccttggtgaggtgctcgttcagtatcacagcttcgtggcggagcttgccgatctgcagcacgcgctccttgcactcctgctcgagcttatctttcagcgcggcgtctgcgctcatcgcatctatctgcgaccgtagttctgcaaccttggcctcgtgcgtccgggagacatcctgtgcctgctccagcgcgccgcgcagagactgcagctcttggtccttcgcacgcagcgcccgctcgttctccgagaccagtgattcgagctgcgtgttgagctcggcgccgcgctgctcctgttgggctttctcctgctgcagttgctccagctgctgctggtatgccttcgtctgctcttccagcgacgcgtggtcatgcttcttgttgtccatcatcaacgtgagctcttctatccgggactgcaggttgcgctgtagctttgcgtggtcctggcgctcccgctggtaggccgccgcctctttctctatcctctcctgtgcctggctcagcttagccttgtacgcagagcactcgacgctcagggtctcgcactcggcgttcaggctggccatttctgtattcagcaccaccacggtctcctcgctctccttcttctcccgagacagctgctcgagccgcgtcttcagggtcgcgttctgccgctcgtattccgacagctgctcctgtgtgttctccaactctagctgggactccttcatcttgctgaagagcgacttcatcgacgagagccggctgagcagcgtgttatactgtgtctcgaactggtcgcgctcctcccgcagccgccgcagctcgccttcggcgctctcagtcccccgtagctgcagtctcaatgcctcgagttcctgccgtaatgcctgcatagactcggcctcgctctgctcgccctgctccgtcggctcgccctgccctgccggcttaacttgctctgcagactccgccagcacgccctgccctgccgtggcgacctcccctgctttctgctcctctctgccggtgcccgctgcctcgctggatccttcgcccgtcacctccgagcgggatttcgccctgtcttcctccgtgggagcagcttctttcttaacgtcatcctcaacaacggcggaggactctggtaacgccttaggtgccttgccacctttcttcttgcccttagccatcctttagctcgtcaattagctattttcccggaccctctggctgttggacgtacccggcctcactaggattgtgagattaaccgacgatggtttcattttagaccatcttgttaaataaaacagcatttacagaaaaagttcggagaaatctcttccatcgtctaagtaaaagcacatagaagaggcgatttggagtccataagaactcgtctgtgggatatcgtgggagcttcaagaacctggacagctgtggacgttgctaaatacagaaatggttgatgttcgagagttttttaaggccaacagtggtaacaagcctagtgccaaagggcccccgagaaagaaggccaaaattgaggaggcaaaattgcccaagggggatgctgcgtcgccaattgatgtcgatctggacgatgacgacctggagggcctcctggaggcgaagggagaggagaaagtggtgaagagagaagagaggccggccgtgaagaagcagccgaaacaggggatacagagcgcgggcggcgtaggaagcgggcgggcaagcgcggcgcccgcggggaacgcgcaggagatattggcggcgctgccttcggtggatctggacagcgtgcatgtcaaggagggcgcgaatttcggatttggaggctctggggagtcggggggggacgccaacgccgatgatttcgcgcaaggcgcgcccaactgcctactgggcttgacgatggtgtttacgggtgtactgcccaacattgacagaccggctgcggaagccctggcgaagaagtacggggcgcgcgtcacgaagtcgatttcgagcaagacgtcggtcgtggtgctgggcgacgaggccgggccgaaaaagctggaaaagatccgccagttgggcatcaaggctatcgacgagaacggtttccggcagctgatcaatgcgatgcctgcagagggcgggagtggggtggctgcagaacgcgcgagacagcaattgaaaaagcaagaggaggatgtcttacgtgaagcagagacgctagcacggcaggagaaggagcgcgcggcgtcgcgcgcaagcaacgcccctgggggccacgcggctccaagggagtccgatcagctgtggacagtcaagtacgcgcccacaagtctctcgcagatctgcggcaacaagtcctctgttgggaagctccacaagtggctctccgagtgggataataaccaacgcaacggcttcaagactcctggccgtgatggcacaggtatctaccgcgcggctatgctctacgggccccctggtatcggtaaaacgacggcagcgcacctggttgcgaacgaactgggctacgatgtcctggagcaaaacgcctccgacgtacgctcgaaaaagctgctgaacgaaggcatcaagaacgcccttgataacacctctgttattgggtacttcaacaaaaaggaacaccgcaatagccgtaaatttgtgatcatcatggatgaggtggacggtatgagtggaggcgacagaggtggtgttgggcaaatggcccaattctgcaggaagacctcatcgccgcttattctgatatgcaatgagagaactttgccaaaaatgagaccgtttgacagagttgtatgcgatatccagttcagaagaccggacgcacagtcgatgaaggcgcggctgatgactatagcggttcgtgaggggttcaagctagatcctaccgtggtggatcagttggtagcggcaacgcgaggggatataaggcaaattatcaatctcttgtcaacgatatctacaactacgaagtctataggacatgacaatgcgagacagatctccgcggcatgggaaaaaaacatagccctcaaaccatatgatataacccataagcttttcgaaggccgcaactatagcgatgctggggcccagtcatttccattatacaagaaaatggaactttatttcgatgactttgatttcacgccattgatggtgcaagagaattacttaagcacgcgtccaacgaacctaagtcctggacaatcgcatttacaagcggcggccgccgctgcggactctatttctgagggtgaccttgtcgacaggaagatacgcagtggtgaacaactatggagcttgttacccttccatgctgtaatgtcttctgtcagaccagcctccttggtttccggccagatggctggaagaatcaacttcacatcttggttgggccaaaactcgaagagaggtaaatattaccggctgctgcaagagttacactaccatacaagattgcgcacatcggcttccaaggtgtcgtttaggttggattacctaactacactaaagcggaggctcctaagcccgcttgtggaaaatggcggcgaggccattccaaacatcatcgaaaccatggattcctattatctaacgaaggaagactgggacgtcgtcatggacttcatgcttggatatgaaaacactgaagctgcactgaagaagatctcaacgagcgacaaacgtgcatttacaacaatgtacaataagacgactcatcccgttgctatcaatagaacgggcacgaccattgctattagcggaaagagcggaaatgataaaccagattttgaagaagtagtcgatgcggatgatgaggttcctccggacaacgatgatgccaagaacgatgagagcgcggacttgaagaaggacaaattgataaaggagaggaagcccagggcaagaaaagctacaggctcttctaaagcgccagctaaacgcaaaaaagtcagtaaataacgtaaggtgactatttagaactcaaactaatgtacacatttgtaataattttcttcagacaataaatgcatgctgacataggccttaagaagagagtgcgtcgaattttccggaaaatgcattctcaagccagtgatagatttgtctgtagagtataggtcctgcgttgtgaaacgtcagtgcatgatttgaatcaggaaatatatgcgaatcatagttccggacattgtgcacattaaagctgtccaacagcttgtaggtattttctatatgcacattatcatctgcagtaccgtgcaacaataaaaaccgcttgaccttactaaacgcatctatatttttaatgagtgcgtactcgccgtatgcatcatttgtgggtttgggtgtacccatatacctttcggtgtataccgcatcatataacctccaatctgtcacaggggctacagatatgccatatttaaacgtctgcccttgatcgtattctaaagtttttaaggtggtgaaaccaccatatgaccaaccccatattgccacatgctctgtatcaacatttttggcatgttggcttatgtattttctcgttaccgcagtgatatcacgcggttcccagtggccaatattttgtcttgcccaactccgaaagttccatcccttaccaccagttcctcttggctctatctgtaatacgatggcatccaggcctgaagagatacattggtccaacatgacatcgaatttggtattgaatgttctggagccagggcctccatacacgctgaccagcaacgggtatttttttttggggttcatgtgccgtggcttaatctctacataatgtatttcagcgtcatctgtggtgaaagcagatagatatgacgtctgtggaagatcatgctttgccactgtctccaggatatgatcattatgagaaattatgcgcgcctcagaattctcctcggtgctgccccctaaagttaaagctgttgggcccactctcgtggatggaaggtcaggtcccaaatacttcataatgctgaatttgctgctggcactaaaagtgaattcgtaataatcagtgttgtttgctggtccgggcatggggagagaatcttccacacctgtatctgacaaggctacactgtaaatgtgctgtgccattgggtgtcgtttattcgcatggaaatagataacctccttttctgcgtcgaaactcatgctatccgaagttatttcccaggggccagaagtgagctgtctcccattggctgcgtagatatctgggaaataaaatagatgagggtagccatcagaatccacgcaaatatccacatagcccgtttctctgcccttgtccttgtcagcaggaataatgagcacaggcttcattttctctatccagccgtcataaatgttcgaattgacagagcggacggtgcggacactcttatccaccacattgaacactctgatatctacattgcgagattctctgtcagcgaccttgaacataaaatgggtgtccgacaaccacacggcatcatagatgagataatctgcggcagcatccagctggatctcgtgcttgctcgcatccgcgatgttgtatagaatcaagctcgcagaaggaagcttcgagcctggcgccgggtagttgatctgcttcgggatcaggctgtcatcttcaatataccgaggaatagcgtagctccggaccccggtactattgatccgtagataaacgaaagcactgtcgtcatccttccaccagacggcattgtccgagcccatgacctcttcctcatatacccagtccgtcttcccattgtgtatgccggcagtgccatcgaatgttatcctatgcaaagccccatcgcctctcagctgccgaatgtagaggtcattctcggccacgaaatacagatatctgtaacatggggagaatttggcatacgatatcagcgcagcaggtgaaccagctcctcccggtgtgataggttctatggtgtttgcaccaacatctctgagccagtagttcgcttgcgacgagtgacggaaaacaggcttcctattagaagagaggatcgcaaagtcaagagagaagcttggaacgatcttctggaccctatagtcctggccgccatagttgaacgaagtggaagcaagcgccttggtgtactgatcgtctgtcagcttttttgccgagaatgttggaacgtcattctcggcgagcagtgtcacataaaagccctcatcagatacaggggagcaccttggaggggcaataaactcaaacagttcatagcccagcatgaagtctcccgccaacacattttcgatcgtgaaagcccggcttcggtcgcctcctgccgacctgtattccccgtgtacgtagctacccacccgttgagttatgaaattctgcatcggaaatagcaggaaccctaaaagacaccataaaatgcattttgcccagccttggcgggggtggcgcaggcggtgccatgctctgtcatcttcatcatagtagttatcctcatggagcagatagtctttagatgtggttgcagagtccacgcctgatcccgatccctcgtgactcagaacctggagctcaagatccggtatcgaatcttggccctctaccggtaggagagagacactggaatttgtcttctggaagaagcgtagagaatttggtctcctctgcccatcgtccatggttgaaaattgcaagacagccttattgttcacacgaaagtgcgagtgatgcgttaaagtccacgcaaggccatattatatagagtgggtcggttagcgccgaatagatcgcctgaaactccttttaggaacctgctaccttgtttgatagcatacctgaattatagcctcatctggaagtaacattaacatgctaaaacgggcaggaagaagaccttacatgggcttgcctgacgcgagccccgcttgcctggcctaaatatagctcagctgttgtcacgcatgaagagcaatcggaaggttactacagagctagaaaacggaatgttatatacacacggcttcaagcttactcctgagcagccaaggcggcgatcttggcagcgacacgtgcctttctctcctccttggtcaacttcacctgtctgaacttcttagactcggcagcgtactgctccttggtgaacttcttctcagttggcttgaaggatgggtcagctctgatggcggcgtgggcctcagtgtagatgtcctcgatggcgtcagcctcgatgccgtcggcgatgtagcccttgaacaactcggagtatctctcctcgtcgtcgtcggccaactcctccatgtaggcggagacgtggccgccgaaaatgtaggttctcaacaagtcggcatctagctcctcggactcgaagtcccagcctgggaatctgttctcggagtgtggaacgtatagaccaccgtcagaagcacccttcaaggcaccgaagactctagcaccggtggtggttctctgcaaaccaatgtccaagtacaccttgaatggtcttggaccgtcctcaacagcctcggttagctcgtactctccctctggctcctcgacacccttgtaggtctcgtccaagcccaacttctgcagggttcttctggcgatcagcagaccagtggcgtacgcggcggaccagttggtcaaaccgtgcgtgatgccgtatcttggcagctcgtgcgagtacgcagcggccaacacaatgtcaccggtgatggtggaggacacaacctggcagatgatgtccttgttggtgaatctcacgaccaatctgtactttggcgtgttgtacttggccttgtgctgggtgaccagtctcttacgggcatagtagtccgtcttaccttctcttcttcttctgaagggagtctggaatctggagtggtacgcggagttcttgatggacttgatgaaggccatggttgctgatacgctctcttggtgtgggagaacgctgaggccagcttcatctctaatgtaattacctgaaaaatttgagatgccggcggcgcgtcgctccgcgggtgccacccatgcacccgcgggtgcatgggtggctccttctggtgtatgggttgtgtacagcctccctctcgcccgtacatcgcaccgccccgcgttccacagtcacacagaatgatggctgagccaaggtaccgactagcgcggcaggaggctggctgactatcaaggagcgcggcgacgtgcgactcgcaggctgtggcagccaacccgctgcggccgcgctcccgcgcggtaatgtcacgcttattaagctgacgcggcgcgtcgctgaccggtgtacccgcagggcagcttgtagtatataaggttacgctgccagccaggtacagaagccggctggccgcggagagccctgtcacagggaacagcagcatggcacgcacgcaaattctaatcacagacgtgcccaaggcgcggttcgacgagcaatggccgcagctactccggcgcgagatggctataagcttcccggacgtggagccggaatacttcacgcccctctcgtttcttaatcgggtagtgatcattttccgcggcgaggaggatacggccagggtctacgagtggctgcgcgagcgctgcgcgcgcgagcactacaaggtgtacttgtcggagccgctcgtcggcaagccgcgcgggcggtcgctgaccgcggtgagcccgcaggccggggacggcgcggaggaggcggaggtcgagcggccgctcttgcagatcgacacggcgtctgccgcggactcggcggcgggcgggcttttcccgcccagcccaagcttgtcgccggacaagcagatttcgcccacaaagataaagttcccggacgacccgaaggtgcactactacatggagccggctccagagcgccacacgccggtgcccgagcggggcaccggcgtgccgtcggatccatccggcacgcagttcttgtacagggggcgctcgctgtcgccgcgggacaacatgcccctgagccccagcatcacgctcaaccggttcccctccgagaggggcgggcggcgcgcgcacgccgggcagtaggcttcgtttctatgtacaggttcggtgtatatttaattcgctagacacagcctaggccgcggcctccacggccgcggcgtcgaccacggcgggcccgagcgcgccgtcgggcgcagcctcgctcgcgtactgcgcgcggaagaaggtgtagtgcagcacgaggtcgtcgacgttgcgcatctgcgggtccgtcgcgaagtcagggtcgatgaagaagaacacgggcatgtccacctcctcgccggccagcagcttctgctcctcgaagcagaagcactggatcttgttgaagtactgcgcggcgccgccgggcgtgatgctgtacgtcgccatgccgatgatgtccttgtcgctggtgttcttggccttgtagaaggccagcgcggtctcgccgggcagcacgtagacctcgcgctgctgcggcacgaacttccacggcaggatctgcgacacctcgctcgtgaacgacacgcggatccgcttgtccatgtccaccggcaccatcttgtcgctcgtgaacttcctgcggtcagtgatcggcgtcccaccgaagcccgtgcgtgcgcacagcaggcgatacaacggcaccgcggcgtacgcgagccccaggaacaccacgcccacgctcgcgaagtagtacgccgccgtgcggtcgcggaacgcccgctccctctgcaccttcatgtcgcgcagctgcttgatctccgcctgcgtcagcttggagaagtccagcttggctcgactgcgcccgctgctgtgcagcgggcgcgacgcccaatgcgcaccgccgccagcgcaccgccgcgacaccccgcccgccagcggcctcaatagacatccaagacccagcattagcttcagctctggctcggaatacagttcgatgtagcgtggatgttgctttctaagcgtgcgcgttttttacatggcttgttccggcttctcgaggcagccgagtacagcgcatttgtaagtgaagcgtactcagctggatctccgtgcttggcatcatcggtctcgcggtgcgcctagatgtcgacagagaatgtgcagacggactatgcgtccactaagaaacgcaagaaggtggtcaaggcctgcgtgttctgcaggcgatcgcacatgatatgtgatgatcgaaggccgtgctcgagatgcataaagagggacatcgggcacctctgctgtgacgagaagctgcagcccggcgccgagcggctgcagtcgcagtcgccgctgcgaaccgagacgttcgacgtgcagccggtaccggagcacctggtggccgggctgggcgtcggggctgcaggcgggaaccggtacgccaacgtgatcaaccacccgaagtttgtgagcgagcacatcgggtcggaattctcgtcgctgaacgagttcctgacgctgctggaggacccgctgctgatggaggcgacgccgtcgccgggctgcaacgggcaggcggcggatcccggggcgcggggaccgggggagctggtaggcggcgtgctggccggcgctgcgccgcaggagcagccgacggccaaggagaacttcttcctgacggccgcggacccctcgacggaggtggagccggaggaccgcctgaagctcgtgatcaacgcgaagctggaggcgggcctgctgcagccttacaactactcgcaggggtacgcgcgcctgcagaactacatggacaagtacatgaaccagtcgtcgcggcagcgcatcctgaagccgctctcgacgatccggccggcgttccgcgcgatcgcgcgctcgctcaaggacgtggacctggtgctcgtggaggaggggttcgagcgcatgctgctgtcctacgatagagtatttacgtccatgtccatgccggcgtgtctgtggcggcggacgggcgagatctaccgcggcaacaaggagtttgcgtcgctggtggactgcaccgttgacgatctgcgcgatggcaacctcgcgatatatgagctgatgacagaggagagtgcggtcaatttctgggagaagtacggctcgatcgcctttgacaagggccagaaggcagtgctgacgagctgcaacctgagaagtaaggacggaaggaagcgcaggccgtgttgtttcagttttacgatccggcgggaccgctacaatattcccatatgtattataggcaactttatacccatctcctaagtgcagtacgtactgtcggtcagtctagcgtctcgctcgcggtgagccccgtgttgcggtccaccagcgcgccgaccgcgcgcccgggcccgacgtgcagcgcggccgtcgcgcccgcctgcaccgccgtgcggcaggctgcgacgaactcgaccacgttcgtgctcgagcgcacgaacttctccacggccacgtcaagacggtcggtcgccgcgccgtccaggcagctcagcagcgggcggtccaggctgcgcgcgcggctcacgccgttgcgcgccaaccgctcccacagcaggtcgtacagcgggccctggatcggccgcagcaccgcgtcgttgtggaaagggatgccgtccgggttcagcagcgcgtccacgcgcgcgcccgccggcagcgccgcccacgccgggtcgtccgccgcccccgtcacgatgcactgccgcagcgagttgtggttcgctaggcgcagcgtcccgcgcagctccagctgcgcccgcagatcgcccgcgcgccgcagcgtcaccacccgcgccacgaacccgcgcacgccgtgcgcccgcgcatgcgccgccgccgcctcgcgcatcagcgcgtgccgacgctgcgccacctccagcacgtcatgcacccccagcagcgcgttgctgccgctcgcgttcagcgcgctcagctcccccagcgagtgccccagcatcatcgcctcgccctgctccggcccgcgctccagccagcactggtacagcagcgtcgagcacgcggcaatcgcccccggcgctgcgggctgccgctccacgtatgccaccacgtccgccaccgagctgtgctggaagcccgcccgcgactcacaccagcgggccagcgagctcgccaacacggcgctaccctgcccaggaaacgtgactaatcgcataccgcaagccccgcactcgtgttacttgcctatccggacctctccgttcccgcgccgttgtaaccgctgctcgaatccgtaagtggccccggcaacgctatcccgccggaaccagtcttcagcttatgacttctggcaatttttcactgctcgaacggcgtccccgccgttattaattgaaaaatttggtttgctatataaagagctagtgacttgaccagcgcagctggagcgaacgtagccgttgacccagatcatccgacagagcgctataggagatgtcatccagcgatactaagtcgttgccgtttctgtaccaattcttcgccggggccgtggcaggcgtgtccgaaatcctcgtgatgtacccgctcgatgtggtcaagacgcggatgcagctgcaggtgcagggcggggccgggccgcactacacgggcgtggtggactgcctcaagaagatcgtggcgggcgagggcgtcgggcggctgtacaagggcatttcgtcgccgatcctgatggaggcccccaagcgggcgaccaagtttgcgtgcaacgacgagttccagaagctgtacaagcaggccttcggcgtggagaagctgtcgcagccgctgtcgatgctggcgggtgcgtcggcggggtgcgttgaggcgtttgtggtggtgccgttcgagctggtgaagatccggctgcaggacgcgtcgtcgagctacaagggcccggtggacgtggtgcgcaagatcgtggcgcgcgaaggcgtgttggcgatgtacaacgggttggagagcacgctgtggcggcacgcgctgtggaacggcgggtactttgggatcatcttccaggcgcgcgcgctgctgcccgcggcgcacaacaagacgcagcgcatcaccaacgacctgatcgcgggcagcatcggcggctcgatcggctgcatgctgtccacgccgttcgacgtggtcaagtcgcgcatccagaacacggccgtgatcccgggcgtcgtgcgcaagtacaactggtcgctgccctcgctgctcaccatctaccgggaggagggcttccgcgcgctgtacaagggcttcgtgcccaaggtgctgcggctggggcccggcggaggcatcctgctggtggtcttcaccggcgtgctcgacttctgccgcgcgatccactacggtaaatagcctgtagcatagcgcaccgcgcgtacgtaaagctacaactacgaatgtctgttctaccagccctccccctgccagtgagcgcccggcaggaagaaagggcgttgagatgaaccaactgatctctccgatggacttgacgctgtggccgcgtagcgcgcggccctagcaacacggttttagagtcctggatgcaaaaatccgcacgatttttattggttctctaaaaggaggaaaaacagacatgcagacggcaacaagaaacggttttcgccgcgccttatatagttgtggcggcggttacccggctcgtgcagcgtcataaaagcacctgccaacccctagtacttgagctccggccggcgacacgccaaagcagttgccgcccaggagctcgtcagggagctatagcagatgtccaaggaaccactcattccgcagcagtcacggcggcgtcggcggtttatagttgtgcggttcagcgatcccacactgcaggacctgacgctggaggtgtcgagtatcccgtacgcagacgtcactacgagatggctgcgggccatggtgcggcaaatccgccccgccaagacggtacggcaccggctgaagtttatccgcaacggccagccgctgaacgcgatgtcgaacctgcggctggagcagttcttcgagtccgcggaggagaacgacaagtactacatccactgcatcgtgggcccggagctgacaacggagcagctgcaggacgaggacgcgctggacaacgtggggcaacaggtggacgggacgacgccggaggtgatcggcttcgaccggctccgcagcgtcgggttcagcgacgaggagatagagctgctgcggcagcagttccgcgccacgtacggcgacctggacacgtcgcagcagccggacggcgagcgcgcggacctccggcagctcgaggagcagtggatagagaccggcgccacggagcagggcgcgcagctctctagcatccccaccgctaactacaggtacaacatggatctcctgatcggcctcatggtggggtgcctgttcggagtattcagcatcctgctgctgaagcagggagagctgttcacgaagcgccagaaaatggccgtcttcgcgggcatcgtcgcgaacgtcatcttcggcatgacccactggtaggggctccgggctgctggaacagtctaccaggagctgcgtctctcgttatatctaatagtatacagattctatgtacgtcggctcagcggcggcacagcaggtacacgttctcctgcttgaagttgctcaagagccggtagttgccctccagccgcatcagcaaccccccgaatgagtagtacaccgccagcatatccttgttcccgttggcctcctcgaacttgtatgccgtcccatacgtcacgtagtcgaagtcgtcggccagggaccgcgccccaggggccggaggccgccaggacccgtggctgtcctccgttccgtcgaggttgagtgtcgtcgccagcatcaccgttagctgctgttgtggttgcagcgggaagagctctgtgttcacatccagcgtcagcttgcacgtgtcctgcgacgtggagatggcctcaatccgcgataccttattgtaccgtccctggtccacttcctggatcgtgaagatgtcgtcaaagagagtcgaggacatagccgaggtcttggtgccgtacctgcgcttcagcaagtggaagtggcgatgagctgcgtgaaaattttgtatactgtgtgcaaacgtagaaaacgagaagctattaccatgtctattagatgctcgagtcgctacatagaaaacgggcggctctcgccggcccgcggacgtccctctgcggctggcgccggccggccgccgacaggctgcggcggcctgcgctcagcgcagctcggtcgccttgcgcttgctgcggtagtccttgatggcggccttgatggcgtcctccgcgagcatactacagtgcagcttgaccggcggaagcgatagctcgcgcgcgatctctgtgttcttgatcttctccgcatccgcgagcgtcttgccgcgcacaagctcggtcatgtacgaagatgacgcaatggccgagccgcagccaaacgtcttgaacttcacgttctcgattacgcctgtgctgtcgtccacctggatctgcaggcgcatcacgtcgccacacgccggcgcgcccacgagcccggtcccgacatttgtaagcttcttgtccaatgtgccaacgttgcgagggttggtgtagtggtctatgaccttggggtggtagcagcgccgcgcataccctatggtgccgaccggcctcacgattgcagtggctgtctgtctgaatcctagcatttctgttccgtgtttcgctgtggagaagtaggagagatgtctgtcctgtcagcgtagtgtctgtgtcaactttaaagcgccgccatttggccctgtctccactggaagtcacggacccgtatccgggtgcgccgcttacctccgccggtaaccccgtgtccgatccctgagcccctgagccgggtaactgattgccggacaggagcgctcatgaggtgcgggtaacaaaggggtttcgggtcttgactagccgaggcgatgccgctttgcaaacaacactacgactcgcgttagtagacgagcatcggggctggcgttgcatggtgcaggggctactgtagagcggcaattttacaccgatggcggatcagatgtctgccacctcagcagcaccgcggaccagggcggactactcctctctggatttcgatgtggatgtggcgtggttatataggggcaagaaacgtgggaaacagcgaaaggccggagaagacggcacacgcggacgggcgtcgtcggtgtccaacgcagagcttagccggcaggcggatagcgggcaggcgggcacgggcagcgcgagcggcagcgagcggagcgcacagagcgcggcgacggagccggcggcggtaccggagcggcaatcggggggtatcgggttcctgaagcgcagcaattcggtgggtgagagaccaaagaagtcgctgttcgggtcgcttttcagtcggcggctggcgtcgtcgtccggagtgcccttatcaggcccgccgcacggcgcgcgggcctcgcagcgcggcgacgcccgtggcgcggagtcggggaggcaatgcgcgcctgcgggaattccgatcgggcgcgccactgacgggatggcgcggtacctcaatgagccgtcgtctccggaggtacgcgatgccgcgccaataaacgacaggccgcggcggatggaaccgggagccttgcctgtgccctcgcttcagctgctctctggtgtgcagctgcggcgcgtggcatttgccgtggacaagttcagcacggacccaccgcagcagattccgtcacggcggcctcgccggggcaacgtgttgatccccgatgaaatccttggcgaggttccgacaatatctcagggcatctcgaatcctgagggaatatgtgggcaaaaggagagccagttgaccaaggactctaaagaatacaaaatcgcgctggaaaactatcggaaggcgctgaaggagtcgaagaagcaccaacaggaagcacatatggcagctttacggactgccaatgaggtcgcggcctttaagtacaagcaatcgcactcgcagagggaactggtcccagaagccgcggttgacgaccgtgccaagcacctggaaattgacaagcctacccaagcgaatgagacttcattcgacggggaggacactgaatgtggcgatgagtccgggaaggagctgacgctggaccagatctacacgcgctgctgtcatttgcgcgaaatcctaccgattccgtccaccctcaagcaagtgaagaacaaaacagcacccctgcatacgttaaagtttctgaatccaaagccgactctgatagacctgctctcgttttgtgacttcattgcagttgtgcctatccacaatgttgtgttcgataatgtaaacctgactccagagatgtttaagataatgatcacttcacttgtcaattccactgcattggagcgactctcaatacgaaacgtggttactgacgcagattgctgggcagctctctgcaagtttattttatccaatagatcacttataaagctcgacatctcgcagacgaaagttagacaggatctggcacgcacgctttaccgctccaatatgaactggcccttgtttatagaggttttacaacgcaggcaacatgctccgttggaggagctgctgttgaacggtatccagttttttgacctttccatcttcaacggcttactgcatgcgtttactcttcggccggcatccaaaaagcgactaggtgtagcgcactcctttttaaaggaagagcatctaaagttgctttttgactgggcttctacctataatgtgcaaggtatcgacttggcctttaacaacctcactgatctcgtgaaacccatggtatctaaattaacaactatgaactttgaccacctgcattatttcacccttaacagtacagcgttaggcttctgtgatgcggcactttgcctgcgagcattatccaagttgccaaacctttatttcttggatttgagcagtttaccggccatctttccagagatattcccatttttgaataagtatctgccgcggtttccctttctgaaaagactgcatttggacagtaacgactttatgatggaccacatctcgcttctcagccagatacttcaaaaatgtaaggagttattgcatctttctatgctatatcaaccggagtcctcctatggtatgagtgcatgtgctgccctgtatgacttcgtcgcaaactcgccaaagttgaagaatttggacgtcgactatgaatacatccctgaggaaatcagctcgagaatagcagtttgtttgatcaggaacgcccagaaatctctgaacgaggacttcgagctagacgaattaacatcgcaggatgacttgctctttgatggtgaactaattaccaaaactgcaggcggtatactatcgaaactcggtacttcgtccgagaaatccaatgatgactcttcaagacggtatctcctgaaaaagtattggcagaaaatcaatagggtccacaccaacgtacagagtaccatcgacgacttgttcgaaaagcgaagcaaagatgaactgacgctacaggggaaggagaacctgctgagactcctgttcgtagaaaataccctttcgaagatattagagatacttgccgatagccaggaggttgcgagcctgctggatgacaatcctgagggcatctccgcgccaaacttggaagctgtcgactcctcgacacttctgatgcctgccacccgcctggaggacgggtatcttgatacgcaagggatctccgccagcacccaggtggataggccgcactttatggctacagattcggggcgtacgatagacgtgaccacaggccgccccgtcgtactgcggcagtcttcacagacctccattgtgtgtaagaagcaggaggaggaagagggagagctccataaatgggggtacttcgtcgcacagaaacgttcaggcctgccgctgccgcagtatgtctcagagcaccctgctcagagccagccatcccaggcggacaatgcgaccgatatgcgggtgattatctccaagatcccgtcaggggcagagttgaaggcggccatcattaaggctaagggcattgcctcgatggaagacctgattgacaatgtgaaccacaaccgtgtccacctggacaacatatatggcataccgtatagcactcgcccagtgagtgccgaccgtgcgtcggtgtcctcacagagcaggagcgtttgcacccccaacgaggagccagtctcggcgccgttgccccccgatggtcacgaagaactcgatgagcacgtcggcgaaacctatgataaactattgaataacctcagcagagtccgttcgaacaggtaggatagtcttccgcaggaagttgtataaaggttaacaataaataaagggcgttatgcccggtcgcgctcaccgccagagaagctgctgcaggatccggtggtactgcacgttcatgatcggccgcaccgtgctcagccgccagaggctcaccaggccgaccacgttgatcccgactacgacgttgaacaccttgcgccgcagcgctagcgaccgccatctcaacagctgcaccagcccggtgaacatgtggtacgcgcccacggacactagcccagctagcggcatgatccccagcccccagcgcgtccacgcagaccccgtcccgccgtacaggagccactgcacaaagtcgaagtccacgtccacgcccgcccgcgcaggcagccacttcatcaacgcggcgtggtaagccagcaacggcaccagcaagtaccccgacaccgcgtgcgggttgtgccgcaccgtcttgttcagccccaggaagtacccggacagccccccgatcagcccaatccgtcgcggcgacgtgtcggactccacccgcgtcacgtaccgccgcccccgccgcgtccaccgtcggtaccagctcatcgcccgcagcgccacccccgccgccacatgcacccccaccgtccacaccagcacctggtccgtcgccgccggcagcagttcccgcaccatccgcagcacatcgttcggtgcgtacgtcggctcaatcagcggcacgaacagcgtgttcgtcaggtgcagcggcatgtatccgaacaccatcgcccacaccgagtgcttctgcagccagcccagtgaccgtctaatgttcagcgcgctcagccattccccgctcccgccgctgtagctgtcatcgcccacccctggaggaggcgtgaaagactccgtggggcgcggatccagttctctgagttccatgctggctgcgacgcggtctctatagtctataacttggtctatggcgacctgtggtgagcaacagcgcagcttacattttcatgggatttcgtattagagatgcacattaccatacgctagccgctaaccgttggtcaatagcgatgagcctaccagactggtgtcctccattccaaggtaccaagcaggaccccagcacgggcgaggatgtgtactgcatctgcaagaagccggacggcggcgagctgatggtgcagtgcgacggatgtggcgactggttccatttcacgtgcatccggatccccagcgcgtacaagagcttggtattctcgttctactgcccctattgccaggcaggtatcacgtacagcgggacgggcgcgctgccgaggacggtgtggaagcggcggtgccgcatggagggttgctaccgggcttgcgcgcgcgacagcaagtactgcgggccggagcacggggaggcgtacatgcgggcgctggtggagcgcgcggggccgggtgggcaggcggtggtgcagcagatggtgcgtacggggcagttcgagagcctgggcacgggcgcgctgccgctagcgcggcgcgacgtggacccggcgctgtacgaccgggtggtgggcgcggacgcgcggctcggggagctggaggcggaggcgcgcgaggtgcgcgaggcgcggcggcccgcgctgcgcgcacaactggccgcgctgagcgcgtacctggcgtgggtgcgtgaggtgaatgacgcgctgttccatgacacagaggaggcggctccgcggcgcggcaaggcgcgcgcgcgccgcaagcccaagcgcgcgctctgcggcttccgcgccgactaccaggcgccgctgccggccgcggactttgccgccagctacgcggacgacgcggcgctcctgcacggcgtgtgctgtcgcctgcgctgcccgcgccaccaagactgggccagcatgcggctcggctccgtgcagttcgagctcgaggcgctcgacagcgcggagcagcggctgcagctgctcatcagcatgcgcaaggaacacctgtcgctgcgcttccacgagctccgcgccggcgcacacccgcgcgtggccacgcctgctacgtagtatgtactcgaacgcgcctccgaccgttccctgttacaagtggcatggctagcgatgctggtctgggcatggaacaagcctgttcgcgcaagttgaaaacctatcttgacgctccgctccaccctcgggataggctgacgcgccaggaacagcgcgagaatagcggttggcagctgtatactttcagaatggcagaaggcatgtatggcagaggaccgggaggcgagcagagggaccccggtgcggctacgacagaccactaacgacgtaccagatcccacggtcaacaagataaaaaatgagcaattcaaggtatggaaaaaaaccatcccgtcgctgtaccagtacattacgtcgctgaagccgcgctacgccagccctgcgggcgttgccggcagcgtgcgcaagaccattgcgttcacggatgaggcggagcgccgcatggaaaacggagtgctgcatacctcggtgctcgtgtcgctggggcgcgacgtgtacaggcagggatgcgtgctgccgctcggcgtgcacctggaggaggcggacggcgggggcgcgctgccggacccggagttcgaggacagcatggggctacaggagcagctgcggcctgtgtggacgcatcccagcgcagacgtggcaggcatggcgtacgtggggcgggcggacgtggcggcggttgtggtggctacggacggcagtgtggcgtggttccgcagcggcgcgccgcgcccggtgcagacgctgcccccggtcgctgggagcgttgcggaggtcgaccttgccgtctcggaggacgggcagctggcggttgtggtgcagagcggcatcgacggcgataacgcgcacacggtgctgcgcgtcgtcgacaacggtgacgcgctgggcaaggtgttgcacacggtgcgtctctcggaggccgcggttgtgcacgcggtgaagtttcaagggtcccatatatttgtcacgtgctcgagcgataacaccgtgcgcttctgggacgcgcgcacgcccgctgagccgctctggcacctgcacggcgtgcgcgacggccgctttgtggccgtcgctccctcgccgctggtgggcaccgtcttcgccacgggctccgatactggtgtgatcaagctgtgggacatccgcgcggtgattgccgcaaccgcggacgagcccgcggcggagctgacccgcctggtgcacccggacggcgacgccgtggtcgagctcctcttcagcgccgacacccccacgcagtttgtctccgtcggcgcgcccggcaacgtgtaccactgggacgtcgagcccctgctgcagctgcccggagaggacgacccgaacgagtccgctcgcgactcggacgagctgcagcagcagtgcctgaagttcctgcataccgtcgggggccgtcgcacgctcggcccaatccccaagcgcaagaccgtcgcgtggcaccccaccttcggcgacgtcgtgggctgcatcgacgccgacggcctcatcaccgtgtacaagccttatttcggcagacccgatgatcccgacgctgacgacgacagcctgcagtgatgctggctgcgccaccatacagatctgtgtcctctatatagagtgtggcggcccgtgtatcgggctgccctagcacgttctttatattgtgtcagcgttgactaatgcctgttttcaagattttagttgaatttcagacccgaaatcctttgcacagtggcctgatgcacttacatatattagatactacacatgctcttcctagaggcagccttgccacccacagagtgcgcacgctctacaatcggcgggctagcgccaaccagcccattggcagctgacaaccgaactgcgttacctccggttttgcgatgcctggcagttctcgagtcaacaaaaaaaatgctatggtttgctttgcatagctactaaataacagctaagacacggagacagggcagaaaagctaacataacgacacctgggatctatggcgttcatgttcaagccaccagagcagcggaagcgcaatgagaagtctccgagattgtcgctgccgtcgacgttaattggtagtgctacccctgcgggcgacgaacacgcatcaggagcgatgggcaactcaattgggtcggatctacacagggagcagaaactgcgtggacttgggcaatctgtacagatagcagaacagctatctgctggatctacggatactgcggggtcggacgttctctcgcagcacgcgccatctagcgcatcgtcgcagacctcgaaggtccttccccggcggcctgtgccgccggggatgcctgcgctggcgtttctgtcgaagcacccgtacgcacagcaggtgacggggccgctgcccacgacgagcggagagaaggcgggaagtcactcaggtgcaaccacgctgtccgcggggccaaccaggcctccgctgcccaagttgccgtacctgcacgtggagccgaagctgccctgcgaggagctgccgtactctgcgctgcacgcgggctcgagctcatccagcaacatacattccccgtcgcgcgcattgcaggagatgcggttaatctctgctggcagtactccggttgagccggtgcccccggcggcgactgtaccgccatgcaaagacgtggacgaattggaggaagagatgtggacgcatgtgcacctgaaagaccagatagaagagcttggcgtgctgggcgagggcgcgggcggatcagtcacgaagtgcaaacttaggcacggttccaaaatcttcgcgctcaaaactataaccacgctgaccacggaccaggagagccagaagcagatattccgcgagctgcagttcaacaagagctgcaagtctgactacatcgtgcgctactacggcatgtttaccgacgaggagcactcctcgatatacatcgccatggaatacatgggcgggaggtcgctggacgccatctacaaacacctactaaaacacggcggcagggtcggcgagaaggtgctcggcaagatcgccgaaagcgtgctgcgcggcctgtcgtacctccaccagcgcaaaatcatccaccgcgacatcaagccccaaaacattctcctcaacgaggcaggccaggtgaagctctgcgacttcggcgtgagcggcgaggctgtcaactcgctcgccactacgtttactggcacctcgtactacatggcgccggagcgcatccagggccagccttacagcgtcaccagcgacgtctggtcgctgggcctcaccctgctggaggtagcccaggcccacttccccttcgactccggcaaattcgcagccaacatgccgcccatagaattgcttatgctgatcctcaccttcacgccgcagctcaaagatgaacccgaggcgaacatcgtgtggagcaaggccttcaagtcattcatcagctactgtctcaagaaggagtcgcgcgagcggccctcgcccaggcagatgctgcgccacccctggatacaggggcagatgaaaaagcgtgtcaatatggagaagttcatctacaagtgctggcaggccaggtgatggagccgccgctgtaccgtagctgctcgcagcttctatggaggtcgcaacatacgaatgtagtgcccgctctctgaaattttttcagctcgtcgctgatttcgcctactcgaggcctctggccccagtcatagcgatcctagaccgctctagctaccatgggcccctaccttccagcgattttgagaccgattggcagatacgccaccctctacaacgtgccgcgcgtggcaggccagctgcgctgctacgccgcagacgccaaagacgccgcagacgcgcagggcgagtctgcggccgacccacgtgtcgcggagctggagaagcagcttgccgacaagtccaaggaggccgcggacctcaaggaccgcctgctgcgctccgtcgcggacttccgcaacctgcaggaggtgacgcgccgcgacgtgcagaaggcacgtgacttcgcgctccagcgcttttccaaggacctgctcgagtcgcttgacaacttcggccacgcgctcggcgccgtctcgcccgaggcgctccagcgctcgcccgagattgcagacctgcatgccggcgtccgcctcacccgcgacgtcttcgaaaagaccctgctcaagcacggcatcgcccccatcgacgcgctcggccagcccttcgaccccaacctccacgaggctaccttcgagctgccccagcccgacaagaccccgggtactgtcttccacgtgcagcagcccggctacaccctcaacggccgcgtcatccgccccgccaaggtcggcgtcgtcaaggaccccgacgcctgagtcacgtgcccgcccttacgagtatctaatgccaagtcgtgtacatattacataccccaagcgccgctccgctagcctgacgcaatcccacacggctgcctacgtgtgctcgacggaaaggggaaaagaacgaactgtccggaactcccctccagcaacctggccgtccgccgtccagtgcctgcgtcaaccgggcacagcaggaccctgcgccgcgccgctgctatttttcgcactgccgttagctgggctgcgctggctgacgaatagatccgcgtgttgtctgattgcaccagccaggcattcttaaacgccctgccagcgacgttctcctcgacgtcccgtagtcacgtacatattggccggtcaggtactagaaagattcccgagcgagcaggtaaaacgcgagctaatacttgcaccagatccataccagcccggtttttggagcgactgagcagcgcagaccagcagccccccctggcacagagtatacaacacacgcgaggagcgcgtaggattgcacagaccacaggccaaggcgttcgccggcgagagcgaggcgaaacacgtacagagcggcaggcgatctggcgagcggacaaggcgcaaggccagcgagagagtgtttacggcggcagacaaggcaggatgacgtcgatcccacaccggcacacgtactatgggggcggggcgacgccgccggcggcgacggggccgctgagcgggtcacgtgggcacgcggcaggtcgcagcaagaagaagcaggtgacgttcgggccgtacatcattgggccgacgctgggcgagggcgagttcggtaaggtgaagctggggtggtcgaaggcgcggctggacggggactcgcgcaacgtggcgatcaagctgattcggcgggacacggtgccgaagaactccgagaaggagatcaagatctaccgcgagctgaacgcgctgaagctgctgagccatccgaacatcgtgcggctggaggaggtgctgcagaactcgaagtacatcgggatcgtgctgcagtacgcgtcgggcggcgagttctacaagtacatccagaagaagcggcggctgaaggagccgccggcgtgccgcctgttcgcgcagctgatcagcggcgtgcactacatccactacaagggtctcgcgcaccgggacctgaagctggagaacctgttgttggacgagcacgagaacctgatcatcacggacttcggcttcgtgaacgagttccacaagaacgacctgatgcgcacgtcgtgcgggtcgccatgctacgcggctccggaattggtcgtgtcttccaagccgtactcggcgcagaaggctgacgtatggtcatgcggggtgatcctgtacgcgatgcttgcggggtaccttccatgggacgacgatcccgagaatccggagggcgacgatattgctaagctttaccagtatatcacgcacacctcgctgaaattcccggagtatatcaagccgataccccgcgatctgctcagacggatcctcgtttccaatcctgaggtgcgtctaacggtggctgacatagaacagcacgcgtggttgcagccgcacgcgcagtttttgatgtggtcaccgagcgactgggatgccaaggcgaaagctgaaacaaacaatctattcagacagccgagtgcggtccacgccggggtcctgcgcccccagtccagctgctctatctcatcagcgaactccaaaggcgataaccgcggttcgttaattatggattcgacactaaatccgcaaccggtgcccccgcaagagttccagtctcatattatcatgaaacctacctctccttctaacggtctgcgcaagatgtctccagttagaagacatgccaggagcaattccgctgcgtcgattgctctacaggccgtggtcgatgcggagcgagattatttcaactccccatcaatacattcgctacaccacgactctctgtcacagaatacaacgccgccttcatcggcaggtagagtgccaacgtatgctattacacgttctgctactcatcacaatggcatttcatcttcgctaatgaatcgcaatagtgttatcatcgaggtgagcccacagaagggctccgttccgccggtaatgattcctgggaatagagagtctttaaatgggcaagagagcggcggaattgctatggcagacatgtcccagcggcctaccattgttaaggataaaacttcgagccacatggttccacaggctggccggaagcaaagaccaacctcttatcaaccatgcagtaccactgcttttgcgcagtcacccgatttggtatctggggctggtgcacttgtccctattatgggaaaacaacaacgtgtatcaacggcttccaatcccacatttgtcgatgttggcagatcgggtagcacccgcagattgcctgggcccaataaccagcttttggaaactccgttcgaagctgatagacaaatcgatgacaatccggtagttgatgatgccactattaaatctgatgatatgctaccttcgacgttagaaatagtcgcttacgataatgagtgtggaacgagtcccgggtcaaatggacaacacagacgctatagcgcgatagtgatgagcgaaatttacgagcaggaagagggcgaacgaatatcttgcgagctaagttcgccgaagaagatgggttctgctcggccagattgctccacagcccgtatctctatcaacacccctaatatgggcctccagaaccgcgaatgtatcgtttcctccagctcccctgaatccgacgcttcctcaaaacagaaatcaggcaaaacggacaagaaggataagagattcagcttgctttcattttactccttttataacaactccaagtctagcattgattctagcacagacgctgtacaaccaactgggttggttttagatgttgtgaaacacccgaacatttcaaggacgagctctcagaagaagaatcctgcgccagctggcaatggcacacaggctattcctagaagacacaacaccttaccaagagaggcacaaaggacaccagtggcgttgagttatgtctacgcctccctggatgtcacaccgaacgctggcactcctgagttggccgatgtgcccagtcctataaatcttgtgaagatggcagagcaaccacatgggacgaaacagcatgatccatccactcctacacgctctgccaccgtccacggcaaatcgcagcgattatcgaacaacacgccgaagggtccgatttatgaagatcccaagcccaagcgcaagactaataaggtgtctctgatggtttcctctataaacccgtctcaggcgccgcagcctccacggcagaaagaacccagcactgcaaggaaggtgctcgatttctttaagagaaggagtctgagaatatagtttatctagttgagtatgtatcgtgtagcatgttttcatattggcatagtaaccccctgcttctccgtgagtacagcttgactcattgccgccgcgcacacggacggcaggcaaaagagctcttcacactacctttatagttgcattaataaaagtagatttaactatatttaaagaatcaatgaaatatacttatacagtttcctcaacatgcttagatgttagatgggtacaagaagattctaacagaagcaccgaaagtcttggctggcaaattggatctgaacttggctctgacaacaccagagttaccgtgggttctggcaatcttgccccagatgactctgatcttggagccacggacctccttggagcatctgtacacgtacgcaactctcttacccaagtagaacttcgcgtcttctgggttggtcacaccctcaatcttgatcaaagagacatttgggttgttgacactcttggatctttggtaggacaagtgcttacccttgacgtacactgcgcgcatgttagtatttgctcactcccaccgttcctggttccgatggacctaccgtccctccgcggcccaaagcgctcctgcatcgtcttgcacgccggcagccggcgccagtcccagcccgccgctcgccgggccggtactccctcctagcgcccgtgctgcccaaaaccgcgcgtttcgcccatcatcaccagaaacatcttataccgtccaccgttaacatacatctatgagattcagccatttctatgttgttgttctgctgtatggtatgaacaggacactctctttgagttcgctgaaatttgatgatggttttttgatgccgcagcgcggtgtctttccgcgcggcggagggggctctctgcctagcgccagcctgcgggcgcgatcctccgtctgcccagctctgcctagtgcgtctgttcccccggtgagcccgcgccgcgcgcgtaccggagaatacatggatgtgtgggtgtgtaatgtttgggtgctagtcaaacccccgcgacgtgcgtttgtgctacatggttacgtactactgcttctgagagaaagagcccccggcagcctgccgcagtgtccacagtcgaggtgggcgctgttgtccacgagcgagcgctggggtagggggtgccgagtgagagctggtgcggaccggcgaggagctgaagcgatacttgaggcccggcctttagtgcagcgtgaaacagcagccctaaagcttgtttgcccggcggctagccctaatttgcgctgcgtgcctggttatccgatggccgagtgccctaagttcggatcgcatgtattacccggccagaaaatggatgagatttttccgcgcagcggtgaaccaaaaactataaaagggtaagctgcgaggagatatttttcagctgtaacttagaattcttttttgatatttttaaataatcaccgacgtacttcataggatcatttctataggaatcgtcactctttgactcttcaaaagagccactgaatccaacttggttgatgagcatcagagcctctgcaccccagagtgagaacaaagattgttttagcttggccataatccttagcggtttggccatctgcaacctttgctatgcctttgcaatcagtcgcaaccggcttgccggcggcgcagctaaaaggcgcgatgatcttggcccgctctgtgcacttcttcgtgaagggacagttgcgggtgggagcagatggcagtctgacaagtttttatatattcctagctcgcaacccaaaggcttgggttgcggaataggattggaaactagataatgtctggtattagtagaagatgttcatctcctgggcaacgatcttgagcgctaggcgcttggaatagtatctggccaatgcaaggttgccgcccatgaaccagaagttggggtggccggagttgcgccacatggttttggtctcgccctcctcgtcgaggccccagacagggtctaggcggcccgcgaccttgttgccgaataaccgtcttgcggtctcccgcatgttggtgtagcccgtggcaaggacgacgatgtcgatgttctctaggcggctgccatctgtgaacacgacgccgttcttgaggaagcgttcgatcccgacgccctgcttgagcttgaccttcccgtccgctattagccccgagcagcctacgtcgatgtagtagccggagccctggcggaagtagagcccgaacaagcccgtgccgttgtagccaccgttcaacttgaaaccgacccgctgaagtgaccggagaagctcttcgtcatcccggcatgaaacccggtactgctgctgcatcataccatttagcaagtgtatgggcatggaatggaagatatgatcggctgtctccgtcaccgggccgtcctcgtcgtacaaccctctgttgttgtgtatcgtgccgtgggtagcggtgatgatgcatgtggaggatctctgtagcatcgtgacgtcggcgccctgctcatagaaatcctggcagatgtcgtgcgcggagttgcagccgcctactaccaacgccctcttacccttgtattcggcgccagtgccatgctccgaagagtgcacaatctttccctcgaaaagctcttggtccttgaacttggggagacggggctcgcccgagtgacctgtggcaaggatcaagtggctgggagcgaagtacgtcacacctccggacagattatctgtcacctcgaccctccacctgccagtcaattcgtcaaacgatgcccccgtcacagtagacgcgcagcgggtattcaagtccaagcttttcgcatatgcatcaaaccagtcacccaacttgtctttcggcgtgtacaccggccaggtaggtgggaagcgcaaatatggcatctcatcgtaccagatcggatcgtgcaagaccaagaacttatagcggttccgccagttgtcgcccacgcgcgcattcttctcaatgatgagagaactgataccgaagctcttcaacctggcggctacagccaatccgccctggccgccgccaacgataagcacagttggctggttgttcctgtcgaaggtagtttcctttgcccgtagctctaaccatgattggcgccctacatgctgcccatgattgacaccctccgggcggttacgtaagattttctcggggtacgccttcaagtcctccaatacagtgtaaaaggtaaagcattttaaagtggcttccccggtaagttcatcttcgaccgcggccaacctggcgataccctttccgtagccaattttattctcaaaagaataatatacctggatccattcgatcggagggtgatcccacgtctcctcgtgcactagcactttcccgaacccatatttgtaatgatagtccgctaaatcgtcgagtttcacgttttccaatagcgcgctttctaagaatggcacgagcctatccttcaagtcgtcaagggtattaaatgtgtgaaggtcccaactaacagctaagtggtctctccaggcagcgtgatttgtgaaaacgttgtccatattgctgtgtattatctctcttctggcacctgtgttgatgctttctagcattgcgtttagcttctctaaccactcttccactagaggccttagcgcattctcagagtcgtccaggattagctctggacagggtctctggtcgccgtacaccttcagctgtggcaagtcgtagtcaacaggcccatcgataatgggaggataaatctcagccgcataatactcttcgatctgcttctgtcttagagtctttttggcatgggaggggctggagacggatggatacaatggtgtaggagacattatctagtatctgcaatccactttttgttatttgaacttcaatacgtagcctcgctccgtttggtatggcaaagttcccctggaggccaatgacttcgaaacacgcttttattatatattgcagtatataccgccggttttgtgttgcgcggacggcgcctgctctctgcaccacgtccagtgtcagcccacgcaacaacagctgactttaaagcggcttccccgctctttggtgcgccggagtcgttcttgtcgcacccgctatggtgcccgacgcctcgcgctgacatcctttcccgcgcgtgggccgaagccatcggccctgcgtcaggcagcccgctcacaaatatcctacgacgtcaggtgttcgagcgccttccggataaccgcgagctggtcgccgctgtcgagcatccggcccacgctgctgctcacgctcacataacaggggagcccgaccttcttcaccagcacacggcagaaagtcgacccaaaatcccgtatccggttgtcggctgtatccagcagcacgctcgtcaccacatcagagcccttatatggcacgccatacaccgtagcggccagctcctcattaacgccatcgcaccggcccgacactacgatgctcaccggcaccttcttgctcgccgtcagctccaccggcatggtcaccagtagccgcacatcgtcccccccaagcgtactgacagtatagtctgctgttttggtctgtgtcatcacctgggattttacgctgactgtgccaagactacgcagataacgaagatctcttttcaccgctgtaaaccgccaaacacgagcaagctggcatcacagagagttcgcgtaaccgccttcgaccacgctgtagcgacctagcacatcatgggcatcagcagagttcccgtggtcagcatcgtcgcatgcctgctccctgagtacgggatcggctaccagggccagctaccgtggcgcctggcgcgtgagatgaagtacttccggcaggcgaccaccgcgaccttcgaccctacaaaacgcaacgccgtggtgatgggcaggaagacatgggagtccatccccgcacgctggcggcccctgccggggcggctcaacgtggtcgtgtcgcgcacatacacgtcgccgtgggcacacgacgagaacggtcacgtgatcacaagcaactcgctgcagcagtgcgtgcgccagctgcaggagcaggcccgcgcgctgggcgtcgagcgcatctacatcatgggcggcgctgagatctacaaccagtcctacgacctctgcgatcatctgctggtcaccgagctgcaggtagcaccggacggccccgccgtgcttctggacaccttcctcgcccgcgacgtgctggaacagtcgttcgccaaaaacagtgcggggccgcgcgccctgctgcccccgtctgtcgagttgccagagtgccccgcaacggccctcgaggagggagggtttcaattcaggttcgcgctatacgaccatttaaatcgtgactagtgacatacagcatgctggcgacgggcggtggttacaggcgctagttggtcctagtactgaagaccctgcagaccgtgctcctacgctgccgttccgtgtcacagcgaggggattttttctgtatacgtttattattcctgcggttatttcgattacgtgctcgcaaagtttcaatacctcgttcctttttagacttctttcttcactgtttgccagagtattcagtgacaggtactagtgggcactgttactagcagctgttactgggctacaaactactagagggaacctccaacacattgagatgtcgcagtatgcatcgtcctctggatggacatcatttttgaaatcgattgcctcctttaatggggatttgtcgtcgctgactgcgccgcccttcatcttgtcgcctgtgtcgctggcggaatactcgcagtactggggcgagcatccagacctgtttcttgcgcccaagctcatcacggaagcagacggcaaggtgtctgcggaggagcgcaggatgctggcggtggtaaaatggttcatagcgactttgaaatcgcagtactgctcgcgcagcgaagcattgggctcggagaagaagccgttgaatccctttctgggcgagttgtttgtgggcagctggcagaacaaggggcacccggagctcggcgaagtggtgctgttgtcggagcaggtatcccaccatccgcccgtgaccgcgtacacaatattcaatgataaaaacaaggtccgcctgcagggctataaccaggtgaaggcgtcgctctccaagatgtctctgaatgttaagcagtttgggcacgcgctgctggagttgggcgacttggatgagcagtacctcatcacgctaccgccccttcatttggaaggcctcttagccgcttctccgtacgtggagctggaaggcaaatcatgcatccaggcatccaatggtatgtactgctccattgagtactccggaaagggctacttctcaggcaagaagaactcgttcaaggcccggattttcagatccagtggcgatgccgaggataaggataaggcgctgtacaccatcagcggccaatggtctgggctctcccacataatagaccacaggaattcctcctccaagaagggtgaggaactcttctacgactcgtccaaaacaagtatagagtcgctccacgtgaaacccatcgacgagcaacaccctctagagtccagaaaggcctggcagaaagtcgccgctgcaatcatctccggtgacttcgacactatccaccgggaaaagaccgcattggaacagtcccagagggaacttcgcaaagaagaagaggccaagggcatcaattggcgcaggcggtggttcaaggatgtcgactacagtgccggtacctcggacaatgccttcataaaattggctgctttggcccagctttcgactagaaatgtccccagcggtacgcctgtatccaaagatccaaagagcgacaatgtcccagtcgtacactggcggtttgtccggaaactatgggatgaggaaacggagatcaagttgtagtttaacggcgatggagagcctcacaccgaggctattcttctctcacctgcacgctcttgccccaatacgaaatttgatttgataaatactttagcaataacgtatatatatactcggcaatagcctatgtctaccagtatttctcacgtgacacccttcggctatagggttgcaatatgtaataatttacgaaatggtgatttgggactaaaaaaagaaaggttatctactgaaaaatttgaatttatgcgatgagctgaagagtatagtcgcttgaggtccgttgaacagaagctttctcctaccatttgctgggatttgcttcttgaataggtgcaatgtcaggagatagtcgtcccgcacagtataaacagtcttcgcggaaaggtaagaaggcgtggaggaagaatattgatctgactgagatcgagcagtccatcgattctcggatcgaacatgaaataacccatggtgctgaaaacctggccgatgtgccatcgcagaacctgtttgaggttgatacgactggggacgaactgctgaaggctaaattgatcaagcgcaagcagattaagaagaacatcaagtccaaggaaattcttgactccatcaagagtaactccaaagtgccggcacttctgcatcccaaatctcatgtgaacgagaaggccaaggtccaaggtgtctccaagaaggagcttaaccgcctgatgactcttgcgggccgtaacatggagtcgaaactgaaggcacaggtaaccaaggagggcctcgttaaggcgggaaccaacgacttgtgggggtctgaggagccattgaaaacgccttccggcgacttcgacctgaagctcaaggataaggttccagagccgctattgaagcagtccacaaccagttggtctcgagcaacggttgcgccggagacgctaaagcatgcaccacttcgtgtgaaggacacagaggagctaccccatgccggtaaatcctacaaccccgacaagaagcagtgggaggcattgattgagaaggaatacaagattgagagcgccaatgaggaaagacggcaacaaatggctgaatacaagaagaagattcagcatttaatggagaccttggatgacagggaggaagaatctgatgaagacgctcctcagagtgaggaagaactcgcgagcgtcgatgaagatggtgattttcgcctttcccttaacccagctgtaaaaaataagaagaagacaaagtaccagaggaacaggcagaaaagacaccaagaaaaagtcaagctccagcaggaactcaagacgctgaaggagcagctgcatcagctcgagaagcttgaggccatcgaacaggctgttgctgcaaagacagcacaggaagctagtaccttgatcccggccaaagtcaagaataataaaaaacacaagcttggcactaagcactctgtcatggaggataacttggaggttaaattctcagacgagctatctggctctttgcgtagcttgcggcctgaaggaaacctgttatatgacagtttgcggaagctacaaggaagcggtaaaatcgagactagagtgccaattagaaagggtaggaagtacaaacagaaaatcacagaaaagtggacttataaggattttaaatgatacctgcattgcatctgtatacgtaaacttgtataatcaaaaaagaaaaatcagacctggaatctttgacaattgagttttgacacgctatttgactgttggaactctacaactttcaagtatggtcgatttacggccaaagcagttaatagtcgtgccgtgtcattccatatggcgtcagtctagcgacacagcagaggaaaatctaggccagaagagatcacattggcacttggccgagtttcaacatgagggaaatgaccatttggcctttattaaacacgcactcatagcaattgaaacacttatagcctcgttggatgtatcgatagttatttttagcggtgggaaaaccaaggcagtagcgggtgaagtttccgaagcatccagttacttttaccttaccaagaagctgctacaacgtgtgcaatgcggcaaaagtataagatgggccttcccagatgcagctgagataccggaactgtgccagaaaattattgggaggttacatgaaaaagctggcctatcagtagatgccttgttcgcggaatacgtacatctcgaagagtttgccttagactcgtttgataacttgctatattctatagggcgcttcaaggagataactagtgtttatccttctaacattaccattataggtttcgggttcaagaagaggcgtttcatcgaatatcatgctagagcaattgactttcccacaggtcaaataaattacatagaggtggaacccacaccgagctatgatgatccagtttggctgaaaaactatttcgaaacgcttcgaacgcttgagcatagaaatgcacttgcgctcttccaaaaggactggtatgctactcgggagcctctggcatccaagaaaagcgcaagaaacccttttaatgaaagccatcagtatcctcttccattaccacacttggagagccccgattttcaaattgaaaatgacgcaacatactacaatgcttcaataaagagcaagatgccatggtcacaataaggagtcctggaatttgtaattctgttctaaaccaacgtaatacataaaccaacttatgaatatatttagtgagtaagtttccgcttgagttcctctctctccttctcccaggcatcaagttgtgtgagtttcgactctagagattcgatttcagcctcaatggacgttatagcttcatcagaaccaagcgtctgatattgccactgcgtaccagaagtgatttccaaaaggtaatcatggtacttaatcaaagatggacgttgtgagatggagataaagttgaagcggcacttacgcaacatattgaagaggtaatcctccatgtcaacactgatcgcattggtggcttcatccaggacgaggaacttcggcctatggaacataatccttgcaaagttcattctctgtttttcaccaccgcttaggatatctttccagtctgcgacaaagtctaaatagctcaacccttctgatctcttcaagaggtagtcaagtttaacctctttcagtattctcaccagctcccggtccttatgtcccttttcgtagaaccggtctacggacataggataaattatctgatctctgaaggtacctccttggataaagtaaggccgctgagcaatacacattagatccgactcagctgggatagatacaaggcctgtcttattgtaaattggccaaatttccgcgagaattctctggatagatgatttgccgcaactgttgggtcctaaaatcaaaagactacttccaggtcccaaaagcatgcttgccacactgtgacttgaaaccacgggagcagagctcgctttcatatcactaatcaccacaggaggtatctggaactttaatttactaattagcttggtgccttgtatgcccttaggggatggaatgattacatcgatgttttccaaacgaataccgttgaagttacgctgtaccgtaccacgtatgtctgagggcacgttcttggacaaatccgtggactctgactgtcctgctactggggcaggaatgtcctcaatcaggccgtacttaaagtcagaagagtgaacacggtgaagaacccgcaggagagtgaaaactctaccagtataaccggttagctgtgaaatatccttaatcgagtacatcaatctactccctgcatctgccaatgacagcatgagacgcttgttaacaataaagtcgcgcatgttggtatcctcctttctttggcccgtcttgcccactgcaaatacgatcggaatagacgcaaacgcataaccaagcgcagaccaggtatacttcaagatgtaatcttcaatgacattgtatccaaccttggcacggtcaacctccaacattttttccattaagttctcatatatcttaatcacctttgtgcgttcgacttcagttccttggtagaaagcaatctcctcgttattgttaatcatatttagatgatagttgtagtaggcaccttcggcactcgagcgcttgctgacaagcttgccaagaggaggggtgtatctcctcagcacaattcctgtgaggaaatagttcatgatgatgccggcaacgcccaaagtgcccaagttatcccgcagatagaaggagaagaaaaccaaatcaataactggcttagccatgtttgcgaataggtttgtcacagcgtcgcaaaacttggcaatatcgttggcaatcgagttgtcaacgttcgcaaccacactgcggctggcatcttggtcgtacatcagcttgtaaaacaccagcctgtggtctaggtacatgtcatggacgtagcgcgtcagattggtccggaagttcaagctcagcttccgctgcaggaacttgatcgcgctattcgtgtacgaagccgggaatgctatcagaaaccagcacgcaatgtccatcatgaacctcttcttccgcgccgcgatgatatccttgacaatatggccatcaagccgtgcaatcagcagcgacaaccacgtccgcatcaccagaaagaacacctgtagacagagccatagcgagtttttgtctgcgagcctgggtatcagaatcttccacaggatgccaagctgcgccagaaagcgtgaataaaaaatccgcgactcgctgcccttgtcgaagtacttgaataaaaagcgatcgtgctcgtatcggtccttgtgcgtaggcttgatgatcacgcgctttgtccgctcgctgtccccgtacggcacgtggatctctcgtgcgccgctcttgagcaggatctgcgaccgcgaccgctgcagccccggtcggcgcccatcccgccgcagtcccgatacaaactgatacactgtcagggcagagcccgtgactaccatcgctgctgctgctgccgccagcgcgcgcaggcgccgcccacgccgccctttcgcagcctgcagcagtgtccacatgtgccacataagcactttcaggtagtccctggcagccacgcgccgcacgtccaatccgaacatattccgatttgtctcgataaacagcttctgcacttgcagcagccgttgcgtgccactcgccatgtcgtgatgagctcgtgcacctattcgtacccggctgcagaccctcctgaactgctcagtggcttaagcctccgatcacttggtgccgccgcgcttttgtatgcttctaccgctctccggcccggctgctcgtcagcaacgcgcgcgtttcgggttttattaagggcgccttgctccaaccccgcacacacgtgacaagcacgtgacaagcacgtgataacacccgccggagtcgctcccggtatcatgctcggcatgggcggcaacggggccatgacgcgcggggcggaacagaccgcgccgtgacgcctgactggtcatccgttcagcgtgacacagaaacggggtttgtcgcggggagtgctccaacggtaaatccacgtgatcgtcaaagcgggtcagctgcgcaccagttacccttgtacagtagcagtcgtgtgcaggttggagcgatcagggagttttattgttgtcttttcaggtggcgggaccagcggcattactcggtacgatgcttttatacgagatactgtcacgtgaccgggagtctggccgtctgtcgggcgcttggcggctgggccgctgcagccataacttgcatgcttgttcctcacgaccgaatggttggcaacaagcggcgtgggaccatgcgagtgctgggcatcggcacagaccttgtatacatgccgcgcgttgtggagctgctgcgacggatgcccgcaggatcgggcgcgcatgcgcggttcgcgggcaaattcatgcacgcgcgtgagcgcgccggtgccctcggggccaaagaccaggctcgctacgtggcgggggtgtgggcggccaaggaggcactgtacaaggcggtggcaggcgcagacgcgccgccagccgcgacgctgtaccgcgcgtgctataaggaggccgacgccgttggacgcccgacgctgcaggtggacgcgggagagctgcagcgggcgggtcacatgcgtttctgggaggagcggcttgcgggaacgcgatttctactgagcgtttctcacgatgaggactacttggtggcctttgtctgccacgtcgccgacgaaacttttcgagcgcccgatgaacgccagcggatcacaaagaacagctagctggaggccccagatgtcgactgctggaggccttggaaagcatggcgatggtcgaaaaatttcaagagttgtagaaaattttttttgtttcgttcggccacttcttatatttaaatttaacacttcatgaggggcaggagcacaagtatttcaactgcctactacttgggactacgagtcgagagagacacagagcaatacttgcgatgggtgttgcggatttgatcaaaaagttcgaatccattaccaaggaggatgcggaggaaggagcgaaggaagccggcgaggccggtgccgtgttgaagggcgggtccgccggagcgcttgcaggcacagggactgaggaggctgcaggggaggaaagcaagctgcactgtgggcaggaggagcaggaggaggagcaggaggacgtgctgccggagctacaggagcaggaagacgagcaggagccggagcaggagctggagcaggagccggagcaggagcagaagcaggaacaggctgccgaggctgccgctcaggaggatgtggccgccgctcagaagctaggcgagcaagagacagaacagaaggaggagagggaggacgaggacgaggaggactccagcaagaattccgagagcgaggaagctcaagaggaacagcaggaagacgacggggagggttctttcgccactgaaagttctgctaaccccggcgaggtgcggcgtgtcgagactggccgcaagcgtaacaacaagaagaaaggcaagaagggcaaaaaagggaagggcaagcgtaagcgcggcttgtcttcggctggctcctccgctgggaccttagaggtggtctccggaggggtcagttctcttaggcaagcatgatctgaaggacgaacttgaggtcatgacgactgatgtccaggagcaagccttggacgatgtgcaccacgaggccaataacatcgtggacccatcctctacaacaggggagaactctggagcagagtcggagaacggcgaggatagccagcgcacagtagacactcgtataggcagagatgatccgttccagtttggccagcggaagctggcggacgaggcggacatctgggctcataacgcgtgggataacgtagactggggtgacgaacagatccggctcgcaaaggagaagatagaagagcagaaagaatacccggtgcaggagtttgacaaaaagctgtatcatagcaaccccgcaaggtactgggatatattctataaaaataacaaagaaaacttcttcaaagacaggaagtggttgcagattgagtttccctctctatacgaagctaccaagaaagatgctggttcagtgactatcttcgagattgggtgtggtgcgggcaataccatgttcccgatcttatctgcaaacgaaaacgaacacttacgcgttgtgggtgcggacttctccccgaaggccgtggaattggtaaagacgtcgcaaaactttaaccccgcgaatgcccacgcgacggtatgggacttagccaaccctgatggtcttttgcccgatggtgtcgagccgcattcggtcgacatcgcagtaatgatttttgtttttagtgccttggcgccctcacagtgggcccaggctatggataatttgcacaaagttctaaaaccaggcggtaagatcctctttagagactatggcaggtatgacttggctcagataagattcaagaagcataggttattggaagataacttttacatcagaggcgatggtacccgggtgtatttcttcactgaggaggaactccgggcgatcttcacagaaaagcacttcaaggaggtgaaaattgcttctgacagaaggctgttggtgaaccgtaagagacagctgaaaatgtaccgagtctggctgcaggccatattctctgttcccgagtaagggagtaggctgccggcctccggcaagtgtatatgtttcttgatttatcatctatacattcactaaatgcatcattgtactttacgcaacctaagtagtcggaatgatgagagccactgggctgcagatcgagatgtgcagaaacccgtcaaaactgcaaaagaggtggtacaggtcggcgagctgcgactccggcgagacctcgatcccgtgcactaccggcctcagcaccgagccattcttgaagcactccggcagctctgcccgcagaagctcccccagcgtcccgcccccccactcgccgggcttgaccgtcggctgcagcgtccgcagctcgcgcagcgtcgtctgatgaatccgcacgggcagcgccttaacgccccccttgcgcgccgtgattctcgacgcaatgccgcggaacacgcgctcgtcgcgttgcagcacgcagtcccaaaacgtcttcgagtccgggatcgacagcgacatgatctgcttcgacgacccgtggatgatatagcacgcctgcttccattggtgccgccagaagtcctccacctgctgcatcccccctaccagcggcaccgagccatcccgcgcgtcctcgctgtagttcagcgttagcgtccacatcgtcagcgtgttggcctggaactgggcggctcgttcctgcggccgcagtcccaccagcgagtcgtacagcgtccccactggatggttccagtggaccagcacgtcctccattccgaaccaccacccgtgaaatgcatcttttacttcctgtcggagcacccctcgcagtttgttcagcacaaacggtaggtgcaggaccaggtatgattctctaggtattcgtaggtggcacctgacttgctcatcaggcatgccttgcactaccagcttcgggttcaaaacaacttccacattcaacatgcccgaccatgttcgttgccgcagctcattgaccacgcccatggatatcctagctgcttctatctaagtcttgtgtgtagcactcgcaccttgtgctgcaggggagtatagtactgaaaaaacccagagcatcgctctctcttcccgaacttcagtctccaatgggcgataatccgagggcaaaatgaggttgattggcgccgcggcagagttgaaggagcattggctttggcagccagaggtggatagggtggtggacgtgttcgacgctccggaggcgactgtaatggtattcggtgtgttctatatcgacaagtttgtgatggacgtgcaagacaagattcgcaagatacatgctcagcttgaggaggtgttccggccgtggaatgagcactacccgtggcaggggtacagcggggtgcacctgcgggcggtgcggggcgcgggagggcaggcgatggtgcttggcggagtggaagtcgcggacaacgccgaggaggaggaggcgctggtggcaggggtgctgcagcgattctcccgggctcagggcgcggaggttttcatcaagatgtgcgacacagagggcgactttctgctgatgatgagcagcgaggcgctgccagaggagtacgactacccggtgggcaacaaccgactctggctgagcgcgggggagttcaagctgatcccgcgggatgtgcacgggagtcgcgggctgcgggcgaacgaggcggtggattatcttgagcggagccacttcaagtgcttgacggtacccgcagtcagccgggcgctggaggccaggattgcgcaggggtttcccgcccgccacctcgaggcgcttacgtgggtccacctgaagatgcggcagacggcgcacgcggagctggtgcgggcgaaccccaccgtgttccccctgctgctggcgaactttctcagaaacgatctgtcgctgaccggggctgcgatggagggccaggaagcgaagtgcagcgacgtgcacgtgctagtaccgaaaacacacgccgcgctggcgtctctcctgcttgcacatagtcccgtggcgcggggtggcgatcttggcatcacccttggcgacattttatcgttgtccctgcaggatgcactagacgcgggccagttaacgacagctgaacccaaaggaaagttagagggtgacctagtaagcgctctggtacatacaaaacagctagagcgcccggtggagttctctacgactgaattaactacggaggtaccgactgcggacaaagaggcgtctatggatgccttggccctgtcgctggagactttcctgacagatattaaagatgacgatgaaggtagcaatgagcatgtttctggtcaggggtcttcagctggggatgaagaggctcggacatttttcgagagtgaaggcgtagatattagtgaagacgatttctttgaatatttcctgacggagggtctgaagatgaacaaagaacagcttcaacattacagaaatggcgcctacgaagactgcgcaaacgacgacaacgccggatcagagcacgaggaagaagatatcatgcttgaagagttgcatgccatgttcggcgataaagacggtgcagatgggataaagggcattgaacagctcttcaactccataaatttggatggcgcccccaccgggccgttgcaggccatcctaaaaaatatggcatcccacaaaaagaagtagtcagacaggtacttgtaattgtactcgcgccaattagctaggcttttcctgctgatactcagtcaagctgctactgtcctgatcaaaaagctgatcttcgtggctttctttttttgtggcctggctctgagtgaccgctagggacgagccgttttgtgaccacgcactcacgtcgctaagagatcttccggcgagaaattcacctgattttgagtccgaattaagcgtcagtgggtaaattgcgagctcagcatgtgatgagtttgagctatctgtctgcacgggcacatcttcatctagttctgggttgttgctaatacgtgcatacactacttctgtggcggccaggattggcgcctgctcatcgttgtcgctaaaggagctttcttcttgtatgacggactgcgtacctgtcgaattccctcggattaacttgttccgcttcagggttcgtgtatttactcttcttcgcaaaatggaagtcttgtcgcgctttgtgagccatgctggagttattgctgcgctgtcagctctcgggaaggcagactccaccctagatgtcccattaacggtggcccttatgtccaagtgtgtaggcgacgtagcagttgtaatatcgtaaaaagaatccgtcttggaacttagttcagaggcgcttgaggcgcttgacattatgctaactgaccttttcgcgaaaacttttgatttggaaaacgaacctgagtcgccggtgctaccgccattgatgtttccagaccccgagaccttggcactgctaccagtcggtgccttgtagactgactgcggatcggagtactcagaattaaaagtatcgttggacagcgctgagtgctgtgacagcatggatgacggacgtggcctgcctaaggaggcggcacgagacatcgatgcaacgttgctgtcaccctcagaggtcaacaatgattgctgtatcgagagttccgaggatgactgcgacttgaacttcagcttgggctcttcgatggtcagcgcaccgcgcaagcgatgccgatcccctaaactcgtagggtaatcgccgcctgccgtcgcggatgtttcggccccctgtgattcatgaagtggcttttttaatgtgtcgaatgcaggcttatatcggcgtccatgtcgtgacgtgcttcgcctgtgcccaaaccccctgtcattattgttcagctgcgtcttcttggctcggctgaagaacttggtgactttttggaatatgttggacttcgttttggcgcgggcaggcgagctatgctcgctcggtatatttaagttttgagatgtcgatgcggagcgcgttctccttgccgctgcttccttctccgcctccttgagttggcctcgcgaggaggcttcgctgcgtatactgaatattttccggagcgacgtcgtgttgtcaatgtcgagcacgtcctgggtcgacacgcccgaggccgagtcgaacaccttgcgcaccgagagcatcgatcggctcctccgcgggtattttgaaagctctcgtttcttctccttctccagcaggaggtaccagaggctacacagcgagtcgcagctccgcttgaccaccgccgcgcggatggcgttcgtgtcgaagcccgactgcttgagtttcttcaacaggcgcttctcggtcttcgactggaacttcaaggacgcgcgtctctggcgcttgatcaggcactcgaccgtctccagcaggagcgcaccgtacggctgcagaaacgggtgctgcagcacctcgttgaggttaggccgctgcgcggcgttcttgtccagcagccgcacgatcaggtccttcgcttgcgggctcgtgtactcgtcgagcaccgccggctcctcgtgcatgatcttcagccccgtccgcacggtgtcatcctcgtcgaacggcatgtacccgtgcagcatcgtgtacaggatgatgcccagcgaccacgtatccaccttgtaaccgtcgtacgcctcccgcttgatcagctccggcgccatgtacaccgtcgtcccgcataccgtctccagctgcgtcttcgtcgcgcactcccgtgtgaacccgaagtccgtcagcatcgcgtacccgttcttgtccagcaggatgttctccagcttcaggtcccggtgcacgcactgcagcgagtgcgcgtagaacaccgcgctcacgatctgcgcaaacagccgtcgcgtctcgtccagcgggatccgctgcttcagcagcaggtagtcgtacagctcgttgcccgggcagtactccagcgccatccacacccgcgtctccgtcacaatcacctcgtacagcttcgtgatgaacgggtactcgaactgccggtggtaaaacacctcccgcaccacattcgggtcgctcttcgccccggtcttcagcaccaccttctggtgcgtcagcttgtgcgttgccaggtacaccttcccgaacgagccctcgcccacctgcttcacaatccggtagttgcccacctcccgcagctcgctggccgtgaactgcccatacagcttgttataggacgcccctatcgtcgccttgaggttgttctgcttgacccgagaacctatcatcccgcctcctgcgcctcaaaccgtcgactccgctgtaaccgccggcgctatatagtcccagttccacgccgccccctacctgctgctacgtgaattccccgaaacgaaccgtttgcagaaacccccgaacctgccacagttagtgccagtcgtcccgaatcgtgagatgtgtctctagctctgcccagcagcacattcactatttactcagataagcaccacaccacaacttgcctgttaccaaggcaaatcaacgatcctggagggtgtcttggtacggacgtgtttgggtgtcatgggccagctatggacagcgcgagacagtcgcaggccgtgagcaagcgcgagcgcgagcggtaccgtgcaagagcagtgcgttgcgcaggacggggccgaggacaggcgcgcaggcagcagagatgacgcggatgaccagacggggctaccaggaggccatagggtgcctgaacgggctgcagtcgaactacgcgaacgtgatggcggtgcgggcgtcgggcgagcgacgcaacatgatgaacctgtgggagatggaggagtggtcgcggcggctggggtacgggcccggggcgctggaccggctgaacgtgatccacatcacggggacgaagggcaagggctctacggcggcgttcgtgcagggcattgtgcggcggtaccgggcggccgggcgggtcgggctgtacacgtcgccgcacctgcgcagcgtgcgggagcggatccggatcgacggggagccggtgtcggaggaacagttctcgcgggggttcttcgaggtgtgggaccggctggaggcgacgcggtcggacgaggcgcggtttccgcacatgggcgcgggcgcgaagccggggtactttaagtttctgacgctactgtcgttccacatgttcctggaggcggggtgcgagacgtgcgtgtacgaggtgggggtgggcggggcgttcgacagcacgaacatcgtgcggcggccgtcggtgtgcggggtgacggcgctgggcatcgaccacacgttcatgctgggcgacacgatcgaggagatagcgtggaacaagggcggcatcttcaaggcgggcgcgcgggcgctgacggtcgcggggcagccgccggcggggctggcggtgctgcgcgagcgcgcggcggaggcggggacggcgctggaggaggtgcctgtgctggcggcgctgcgggacgtgaagctgggcatagcgggcgacttccaggcggcgaacgcctcgctggcggtggcgctggcggcggagcacctgcgccgccggggggaggattgcggtctcggcgcgctcacggccgagacgccgttgccgcgcaagttcgtggagggcttggaggccacccgctgggagggccggtgccagacgatcgaagacggcacggtgacgtggtacgtggatggcgcgcacaccaaggagagcattgtggctgcgtcgacgtggttcaccaaggttgccgcgccggacaggcggaaggtgctgctgttcaaccagcagacgcgcgacgccggtgcgcttctccgccatctgcacgaggccacggcccccgcgcttacctttgacgagtgcctcttcactacaaatgtgacatggaagtccggcacctacagtgccgacctggtatcacacaacacaagtaaggaggaggtgagcaagctcgaagtgcagcgtgcgctgcaagaaacgtggtcctccctgccgggcggtgccagcagcagctccgccgtctactccgacattgaaagtgctgtagcagccataaagtctatccaggatccggtcgatgtgtttgtgacgggctcgctgcatctggtgggcggtctgctggtggttatggacggtaagtgaataataaacggttatatgttataagcatttttatatgagttatatacgctttgttattgtatttgtctttattgataaataaattgaaatcattttcattcatacatgaacacaaggtttgtctgtgatatctttaccatatccgatagtccatgactcagcatatttacggttcaatggtgaattggcgtttttgtaggactgtagtgcatccatcgcgctcttgatgtcatagaagttgatttggacgcagagcttccgcgagatcatcggcgagatgtctagaatgttgccgaactggctaaagtctttctttagttcctggacattcaagtcacaaatgtgcgatcttggggatggatagtgacaagtggagtgcttaggattcttacttccctgctttttcaacaataggcagcggctagagggcgcgtacaagttaagtctgtccctttggttggcgtttagcgaggcctcgaaattctcgcttaacgactggattccccaccgcggcctgaggtgcacgccattgatttggaatactgcatgtcttccgtactccataaaatgctgcgcatcttcagggcagagaaattccaactccacagacttcaactggtttgtctccttcttgtactggggtgtaatatgcttcaacgcgccgccttgaacctggttcaacacgcttttcaatccagtacccgtagggaagtcacggagtacaactaaacatttatcttgcaatccagattccaaccattcggagtcttcttcttctgaggatgagtttatcaggagtttgcctaggacagggtcgtagtcgccgtcgtatttcaactgcggtacactggactcatcttcatcggaagcctcgtgggaatggtgctttctgatcaggagcgactctcgtgatttattggtatcaagatagattttagtcccactcttggtatggatttttcctattagcatcttctttgcatatggagcacctgatacttcattgttgtcctggttctcagtcttattcaccggcttttctgccctgttgctggccttcaaataagacctagctagcttccttaagccaaatctttccttctctttgctggaaatagaattcgtagaactgttcccgctcattaacgatgcaattgacaacattttgctccttagtgaatcgttatccttagtggcatagttttctagaaatgttccctgtgaggtcatcttggaatatcaaatcctgaggtttatctggttatattaataaagaagttataatttagcagtagtcctactttgatattcaactttctccgttactcgttgattctgtgccaaaatggtacttcacaggattatatattatcactgagtttcatgttataacgtttggctttaaatagttttctgaacgtctactgcactcctttatatgcgctgggcttttgtgttggcgaagcagacgtcagcgctttttttagcgtcagtcattccaagcttagaaatatgatgaaagttatcataaacgcaacttaaagatgaaaattgatgaaaaattaagaaacttctaccgacattgagaccatcaggagctactattacgttatctcctggcccaaacacacagaaacagacgcagttggccgtagctgacttaagagggaatatgtgaaccccacagaaactcgagaaattatgtaataggcggctagaccgtctccattatttcaccgacagttcgtcggtaactgtttttggaatagtgctacatcaaccctgccgccagcttcattaggaagttctatgctgaacagacgttgaggtttcatgcgaactcagaccgggcaggtatcccgtagggtttcacatttacgatacgcaatatatgctgagtctaatacgaaattcaaacttgaccagaggcagttcgaacgctacataggtcgccgcggcgggaagtttcggctttcattagttcacgcaaggccatggtggcatatgcggacacacctagcttgaacttcagcacgaccgcagtcttgtcgccgcccttgtccgcgcaaatcctgtccagtttatccttcatgtagttacgcccattttccttggcccgcttatttttcaaaatctcaaagtcactgttaatgagctgctgcgtggagtccttgtagtggatgatttggtaagttatgtccttggttttttgaaggatatgcctatatgagccagcaagagagaagtcacgcacttttcttctcatgtcaaaaggatctagaccgtcttttgtcattatctccttgtatagtgctttcagtgtttcattctccggatatgtggtgtcaaatccgggcgtcggaagcactacatcatctatagtccacttacctgaagcaatgtcctcctcggtgagcgctttcgcacgcacaaattgtgcaccacgcagatcctctgaaaattcactgtcatctgcatcttcgctgtcctcagcaatatttaccttggcattttcgtcggattcgacaagtaccaaatccccggcaacagcatgtagtccgaacagagccattcttttacttgtaacggtgttccaaacataactttggtatgcatgtacatacatggtcctcaagttacgtggaatcttcatgatagcagcatagtatgctccgctttcatactcgccctcattcttcttctgggttgctaaggtgtgcaaaatagagttttctgctaagcattggcgtggcattttcctgagagcgctctcagcatctccagtttctgcccatattttcctggcctccttagaggcgggaagaacgttgttctgctctgataggattaagtcaacggcgtttttccaattctccagtaacagttccttcccgacctcatgcgtagagacgctgaaggttccaaaccgttgcattccaaaatagttgatgaagcccctgttctttagtagctcacaaccgcggtccaggatcgactccagaggtgtggctgaatttggatcggtagacacatctctgatgacaatgacgaactcattgccgttgagatcacccaggctcagcggctcgtcctcaaagctgaaaccgcccagaaccacacccttcaacgcattattcaaagcgtttatccgatccaagccgatcctgccgatggacagccgttggcaggtgactgccctacggtctttagtccccgcaaagcggatggcctttgtcggcacacgcaagaacttggcaatgatgttgaccacgtccatggtgtccttattctccttgtacattgtgaagtgcacgcagttcttggaggggccgtacccccagttaatgacaccgttctcgtctcttgtctgctccacatagtcctctttgctgactctggttttacggttggccagggcaatctggaatgtgttggacgccgaagtgaccgattcaagctcattgttgaacgcctttcgtagcagctggtggatcttcgtccgtgcagctttgtcgtcaaagctcctggtggtttccattttcgtgacgttcctgtacacggcctcaatctgctgcatgtcctcctcgcccagtagctctaccagctggttccgcagctctgcctccaccgcgtggttgtggcgccgttcgcgctcttcagcctgctgtgccttcacctggtcggcagacggtttgggtttagcaggcattttgaacccattgtcccgcaagtacaccactgttccatccttctggatctcattgaccatgaagtcggaatagcgctgcttgatctgcccgctaaaccctggtagctctgctgagaggtactctgtgatcccaacgtcgatttccttgagtccatcgtcctcggttttggccttctttgccacgacagcttcgtggtctgcttccacagcccgcttctgtaaattctcctgagacatcttgtaccagtctcgagttccactgatcgcttatcgtcgagcctttgggtaaaccttttctgatacaagacgagatgcgatgagatgagttcaccaactgaaaaatttcagtcttaaagcaggacttttgacgtctacgtccgcagtgacggtcaacttttgaactacacattgagatgctcctctaagatttaaagctacagaagccaccggtaccaaattgcctctgaattatgaatgagcacagcgatgatgtatatgtacgtgcgaggctgcgcaaccagtttggttatatgacatgggtaccagaatatgtcgaagacagaatcagtagcaagaaaggcatactgcaacgatacgaggactaccagcagaagcaagctaaggcgcaggaggtgaagacagacagcttggtaaagtacgagggcgcaaaggacgtccctcgcaatctgctgcgcatctaccggggcgaggcggatacgtctgcgcttgcgcgctacgaggaagtggtgtcacagaagccgcaatggcatgcgccctggaaactgacacgagtgatcaacgggcacacaggctgggttcgctgcgtgtgtgtcgaccctgtcgacaacgcgtggtttgccacggggagcaacgactccaccatccgggtgtgggacctggccactggcaagctcaaggtgacgctgcagggccacatcatgacggtccgggatatatgcatctccgcgcgacacccgtatatgttttctgcgagccaggataagttggtgaagtgctgggacctggagaggaacaccgtggtccgcgacttccatggcacgctctctggcgtccactcagtcgacctgcatccatcgctcgaccttatagtatctgctggccgggactcagttgtgcgggtgtgggatatccggagccggagctgcgtcctgacgcttgcgggccaccgcggccccatcaacaaggtgcgctgtctgcccgtggacccccagatcgtcagctgctccacggacgcgaccgtgaagctctgggacctggtggccggcaaaccaatgaagaccctaacccaccacaaacgcaatgtgcgcgacctcgcgttcaacccaaccgaattttcctttgcgtccgcctgcaccgacgacattcgctcctggaagcttgtggatggtcagctactcaccaacttcaactctgaggcgctcgggatagtgaacacgctcgcctgcaaccaggacggcgtgctcttcgccggcggtgacaccggcgagctctcgttcttcgattacaagactggccataagtttcagaagctggagactacggcgatgccgggttccctggagagcgagaagggggtgctagcgagcacttttgaccgcacagggctacgtctactaacttgtgaacgggataagagcatcaagatatggaaacacatagacggagcgacccaagattcccacccgggccttccatggaaccccagcctggtcagacagcggttctgaagctcaggatggttgttcttcacaatcctgtatatacttttcgagcatggatggatttcaccgcagcagctaattacgtagagcacgaaatttttgtaaagcatcaccagcaggcaggagtactagagcttgggcagactatcagacgaggctgttggctgctgggaagtactatggctcaagaagaggagaaagatgccggcatttccaagtatatctcgactacggatgaaatcatcatcggatgtaaatgttgggtcgaaaaggatggtgagcaaaggctggctgaaattctgtcgataaacaaccgaagacagcctcccaagttctacgtacactacgaggatttcaataaacgtctagatgagtggatactggcatccaggataaatatcgagcgagaggtaacgtttccgaagcccagggaccccgatgagaagaagaagaagaagcagaagaagagcgcaacgccgcaggccaccgacggggagaccctggagtctgccgatatcatggacctcgagaacctcaatgtgcagggcctgcgggacgaaggcataagcagggacgacgaaatcaaaaagctgcggacatctgggtcgatgacgcagaacccccacgaggtttcgcgtgttcggaatctcagcaagataattatggggaaacacgaaatagagccctggtacttctctccgtacccgatcgagctgacggatgaggacgtggtgtacatagacgatttctccctgcagtacttcggttccaagaaacagtacgctaggtaccgccagaaatgtactctgcggcacccgccgggcaacgaaatatacagggacgattacgtctcctttttcgaaatcgacgggcgcaagcagcgaacgtggtgccgcaacctatgccttctgtcaaagctgtttctggatcacaagacgttgtactacgacgtcgacccttttctcttttactgcatgacacagagagatgagcttgggcaccacctggtgggatatttctccaaagaaaaagagtctgcggacgggtacaatgtggcgtgtattctgacgctccctcagtaccagcggatggggtacggcaggctgctgattgagttttcgtatgagctctctaagaaggagaacaaggttgggtcgccggagaagccgctctctgatcttgggctgctctcctacagagcctattggtccgataccctgatcaagctgctagtcgaaaacggcaccgagatcacgatcgatgaaatcagtagcatgacatcgctcacgactacagacatactgcacacagccaaggctcttaacatactgcgatattacaagggccagcacatcttgtacctgaacgaggacgtgctgctaaggtacgagaagctgatagcgaagaaaaggcgatcgatcgaccccgagaagctgatctggaaaccgccaatctttactgcgtcccagctaaggttcgcatggtagctctacttaatggtatatataatttgattcaatcgaatggaagtggtttagaatgcttgcgagtggcctcggaggcggccaccgcgctgggtatcggaatgccgcagcagtcgccccaggtactgtgggcatgctcgctgcagtccgcaagctcttcctcagaggtgcggggcggggacacaccgtccggcacaggcagaaagcgggaaaagaagaaatgttgcatgatcggcagcttccccagcacctctgccttgtacatcttgaccatcccctccgagaccttcgtccaggacctgacgccgctgatgtcatcgagcatcggcgagtgccagcgcagcgaggcagtcgtcttcacgcggttgatgaacgcgatgcagccaaagtagaggtaccggttctcgaacagctccaccacctccgggttgtggatcgatttgggcttcaggtgcttgtgcgtcgcgagctggaaggccccgaacaggaagggcagaaagtggtagtcgtccagaccccacacgccgtgcgaccccgcaggctccagccagtacttggtctccagaacacgcatcacgtccatgtacttcacaaacacccgcagcaccgcgttcgtgaagtcgtgttccgacagcactccgtacttccacagcccgtacaggaagcacacaaagttgagctcgtgccccgagccgtagtcgatccgcttgcagtcgccccacgcgttgcccagatacaccgccagctcctgcgcctgctcgtccgtcagcgacgggtccacctgcagcaccagcgcttccgcgcgggcctgcacctccttgtggaagtcgcggaactccacctttccgaaccgcgatgtcgccgcgtcctgcaacaccgggtggtgcgctgcaatgccttgcatctcctccagcagcgcctccagtgcctcgatggccgggctcacaggctccgcgtgctcgctgttctccctgcccctcacagactgcgccagacttgacacaaaccgcagcagctcctcgaacgtcttcgacgccttccacttgtccaggtcgctgcctgtaagcaggcgtttttgagcggccatcttcaattcggccccatcactcatgctgctggtacgctgtgtcagatgctgatgcgctgctgaaaatcgcttcggggttgcgctggttatgtgacacagatcaccaaggatatttgcggccaggaagctcggttgctcccccaagacactgcatacgttaaactaccatattataaacgagaatgcgcttttaaggactactctactattttaagttccttcccggcgtagccgaacttgtgtttgttcttgtcgaacacattgcgcagctcctgcacgtacaggtcgtggtagtggtcgatttcctccatggtggggttcgttctgcgcttgtctacgtacacaggcttgcccacgacgacgttgatcggattcctgaagggcaggaagccgaagtcatagttgaagacaccgcgcgcaaaaaagaacgggatggtgaagccgtaggtcttcttgatccacagctggaacttgcgtaggtagctctcgttgcccgtgtcgagcacgttgaagcagtctgtctcgccgaaggcgtagataggcaccaggttgacgttgcccgtctccagcgcgagcttgatgaagcccttgcgcttgttcagcacgagctcggtggagcccacacggctgagcagggcttcctgggcgccgcccacgacgatgcagaccgagtagttctgctcgagcaccttgagcacgttcttgcgggccacggaggtgcacccgaggcccagcaggtagtcgcggtagatggggatctggaactggttcaccagcgtgcacaggcaggccgggatgcccgcgaagaccttgctccagttgcagccctcggtcgcgatcgcgccgaaggcgcccagtgcgcccacgccgtgcgggtggtacccgaagatgtagcgcggccctgtcgcaacctgcggccgcgcgcgcgtccactggagcgtcaagttcagcagctccacgcgcgtcggccacagccacagccgcagcttccactcgcgcggctccgccccccgcgggtccggcacgaacgtcggcgccaggtcctcgctcttgtgcagtgagatcgggtagtactcgcagtagtaccgccacagcgccagcgaccgcagccgcggcgagtaccgccgcaccactccgccgttcgccggcgaccggttccacacgtagtacaccatatacggcaccatgaaccaccacatcagcgggttcgccgccagaaacagcaccagcaccgtcatgtagatgaacgagctcgtgtgccacgccaccaccagcgtctgcagccgccgccgcgcggggatccgcagcggcgccacgtggaatcgcccgcccagcagcgccagcccgccgctgccgctgccgctgctgcggccgcttacccccgccgtcttcgcgtcgtacacgctcagctcctccagctcccgccgcagcagtgccgacgccatctggtacttcttgcgcagcttcgccgtcaccccgctgtcctccggggtgctgcttccgagtgtcgtcccgctgctgacctccgagtcgtcctgtctgccctcagcctccctcaagctgtcatccatgctgtcctgcatgcagccgtggtcctctgccgtcctgggccaagtacgatttaccctatataagtagcagttccctgtgctggctgcatcgaacaagaaactccctatgcgaccagttgaaaatcgtcacgatacccccttgtcggcctttaggtacctttattgcttgccaattatcaggttgcgcctggcatccgcaaccgatgttattaggccgcattcgtagcaagacagttctcaagaagtgcgcgtatcgatggatacgaccacgctcattactgctgtttgtgttaggagttgccttgtaccacggtgcagtgtggtacctgggcggagagtcgacgcccgcaggcgacttcatcaggctgcgggtgccttctaaaggcagggctggcggaggagcgccggtgttacgggaagaagaatggctgtcgttgaacgataaagaccgatggagggcgaactacgacgtgttggtgcggtacctggcgggcgagcgcgcgcgggggcagctgcacccggtggttctgtttgcgtgggcggactgggcgccgacgcggtgtccccggcggcggccgcgctgtggggagtttgccgggggcgagtggggcgcgaagacggggccggtggtggagcgggtggtgctggtggcggagggccggaacctggagacgcaggcggcgcaggaggcggcggcggacagcggcgtgttcgggcggggaaggatggctgcgggggcggggcagattggggaggggcaggcggagcaggtgctggcggacaccggcgaggtggtggcgcgcgggcggcgcgtccgcgcgctgcggctgccgcggctggagcagcgggtggcgcgcgcgtaccggggcgcgaacgagcagacggtggagctggaggcggcggacttcgcgctagcgagcgcggcggcgcggcgggcggcggcagcggaggcggtgaacgcggcgcaccccgcgtaccgggcgtacgtggagcggctggcggcggaacatgcgggcgcggcgcgggcgcggcgcggcaagaagtacttcagcgagttgatacagctgcggccggggggccggcgcgggcaagtggacgcgcgcttcggcaaggcggggcgcgggcctcccgcgcatgagaccgcgccgcagatgcggcggctgatgcggtgctgggagcgatttgcgcggaacgagcagctgctgtactggctggcgcacgggacgctgctgggctggtactggcagggcaccgcgctggagtgggactcggaccacgacgtgcagctgccgatgcggcagctggagcacctcgcgctgcacttcaacgcgtcgctgctcctgttcgaggacggcggggaggttggccgctactacctggacatcaacgaccactaccggctggccgagaaggacccggacaacatcatcgacggccgcctgattgacgtcgacacgggcatgtacatcgacctgactggcatccgcgcggagggcggcaagtacacggacggtgcgcatcacgtgtttcacacactggcgtacctggaccccctgcgtatcacgctcttcgatggcctggaggcgcccatcccgcatgccgtcacctctgtgctcatgagcgagtacgagagcggtctgttcatggatacgttccagggctaccacttcgaccacgaagtgcgcggctgggtgtcctcggcgtgcgatgagtgcttcgaccgcgatttggcccttgaatggcgcgcccataccgacgctcgcgctgctttttgtgagcgtcatggcagcccgctttatacggagtgctgcggcctgctccagatcatacctccggaacctgcggagggacacattgccaagctcagcgcctactttaaggagaagggctactaaacgagtgctatgatatctgtctataattattacataagcttctcgagacgtgaggtatgatggcataagcatatttagaaaaagaaacgagacgtgtaaaagtctctcgaaccaaggcgcgcgtggtgaacatatgtttcatgcttgtggcagctctgccgcccgaggcctagtagcgtatttagggtccgaatacttgcgcaggaacgtggatatggattatatcacgcagccaacgcagcagggtacgcaggccacgcagaaatatgtcattgagaagttctcgcaagaacgcatagacgacgacgtcgtgtgcagagtcatatgcaccagcgggcagctcaagatccaagatctgaaggtggacgtacgagaagtggtaaagaagaaagaggcgataaaacaggtatggttgtttggccgcaaccggcagtcctgcgactaccaccttggggacatcagcaggctgtccaacaagcacttccagatcatgctgggggaggacgggaacctgctgctgaaagatttgtccaccaatgggacgtggctcaacgacgtgcgtattgaaaaggggcagaatatgatattggggcagggggacgagataactgtgggcaagggcgtgcagcaggacgttgtcaacatagtggtattcctcaacgataacttccagaagaagctggagacggcgcggctggaggggctgcgcaagcctgccaagcacacaacgctgcgcacgcagtcgccgcgggcgccgctgacaggcatattcaaggatttctctataaacgacgaggtcgtgggccagggagcctttgcgacagtgaagaaagcggttgagcgcaacaccggaaagacatttgccgtcaagatcatcaacaagcggaaggtaatgggcaatgtggatggggtcacgcgtgaactggaggtcctgcggcgcctgaaccacccgcggattgtgtctctgaagggcttctacgaggatgacgaaagctactatctactgatggagtttgtatctggcggcgacctaatggactttgttgctgcccatggctctgtgggagaggatgcaggtagggagataaccaggcaaatcctcgaagcggtccgttacatacacgaacaaggaattagccatcgcgatctaaagccggacaacattctcatagagcaagacgaccctgtcctggtcaaaatcacggattttgggcttgcaaagatacaggataacacgacatttatgaagacattttgtgggactttagcgtatgttgcacctgaagtaattggcgggaagaatccggaaggcaacggggccaatggaaatctctactcatctctagtggacatgtggtcgatcgggtgcctagtatatgttattctgacgggccaccttcctttcagtggaagcacccaagagcaactttataaacagatagccaatggctcgtatcacgaaggtccgctgaaggactacaggatctctgatgaggcacgggactttatagactcgctactccagataaaccccgtcgacaggctcactgcagaaagagccctccaacacccgtggctgcatccttgcacttcgataggcgccgagatagcagtgtccctttcgcaatctctgtcgcaagcaagggcactcgagggaatggacgaagccgagtacctcgttgcgcaatcggaagttgcgtcaaataggaaagcgccgactcacgaaaagcgcgttattcttgcagatcatattgctgaggaaaacgttgggttcagaatgccagttcatccgcctgtccggtatactcagaaggcccagccggtactcggtctcgagcaagataccaggacacacgaggaacctgtggaaacacacaacgaacggcagctggaggataatacagcgctcctagaaggcagtgtagacagtcacaccacgtacagcacatctaatatgcagcagaagcggaagcccacgagggcagcggacggactgtttttgacattgcatcctttggccaacagtagcgtccgaaaaaggatatacgttaaccaaggaattaaccctttctttataggcagatcggatgaatgccactacaagataccggataaccgcttatcacgaatacattgctttttcctcaagaaacgacatcccgtgggtaacagcatctacgaatctcccgcgcagggcctagacgacatctggtactgccataacggaacgaatgttagctatgtcaacgacatgaaattgcttccagggaccaaggttctgctgcaagatggtgaccaggtaaaggtcatctgggacaaggcacaaaatattacaatagccttccgcgtcgagataaatgattccgctggactgttcaatagcgcagcagtaacccagaatgcgcgccacatctctcagcaaactcctgacgagctcgccctggcagtcagcttcatcgagctgatgcgcacgcagatgcacgcaatccacaattccgaaacgccccctgcagacacgggctcctgctccgccgtcgccgccggcaacgacgccgccgcctccagcattttgcggaagatacactactccactctgtcgcaggtcccaatgaagaaggccaaacgtgccaaactcgcacaagctgaccgaaatgaggatagcctccaattcttatagaaattcacgaatcacgacccatcgctctccgcccgtttttagtgggcaatttgtgtgcggctcagcctgtacatagataccggtgagacacgatgccctccggcggagtggcattgtgcttgtcttacgtaacgcagccgatcgcacactgcctaacaactgcgcaccgcagcagcccgggcccttccgcgccgaaccgctcgaccgctgttaaattatgcatgcgctacgttacaccgctactcttccattgtcggcgcccatcctaccgttccgcttgccgcatgcggccgtctcccgtgcgcgacccgctatctttctgcgtaggggtagaaccatgtcagtttccgatgcaatgcacctcataatgcacaggcgcacccggcgcaagagaagggcgcgctcgtccttccacggtacaaaacgctgtgtgcctacggaactctgccgttcgctcgcaaggacaatgttgcgctcctagcgtctactggctaccggccgcgagatacattggggcatccatcgccagattcgactacgctatccgttccgtgcgcgcgggccgctcattgtccgctgtcctcaatggccagaactcgtcgggcagaagaactgtggctgtgtccaacttcgcaagtagcttaccccacatacggttccagcgacctcagcgaccccagcgactcggtgatgcgatacttgacaggggttgctacttctctgccaatgcgttctggtcgcgggtgaccattgcccatcgtacgcggcccacacaagaggcgcaatgtagtggagctgtgcttgccggaacaataccacagactgtgccgcccgagggtgcgtccggagtagtcgcgatgcattccgaggattcaatcacacaatgcctcgcctcgagcgcggaacccgtgtttcgtttttggtaagagttgctccatccgagtattagccgtggacaatcctgctatcaatcgggcatggcctgtgataatgcgcgggcgataagccgcgtgcaactgggccaattccccggcttctcaattgtggaacgcttcggttccgaggtgtgaggaggcggcggcgatctgccattccagtgggtgcgaaatgctcataacagaatccgctcacacagctggccgaggaaagtcacagcgtttgcggacggcggcaagcaatgggctgcttcatgtgtgcgctggtgctggctgggaatgatagcggcgtgtgctggaccaaccgtataaaaggtagccgttggactgggttgatgggaacggtcgtggagcaaccaggcgagcagagatgaagttgcaattgttgtcattgcttgtgttgctggtgccaagcatcagcgccgaaaacggagtattctatgcacaggtgtaccgggacggtgttgacgtcgtcagcaacccggagttgatctcgcggcacgtcgaggccgttgcggccagacacgagctgtcccgccggaccgttgaggacgaggagctccaggtgggcggcggcaagttcagcgccaacgtgtacaacttcgagaactttcagtattcggtggacatcaccctgggcacgcctgctcagaacttccgggtcgcgcttgacaccggatcctcgctcctgtggatcccctcggataggtgcacgtcgcagatctgcagaacgcgcaacagataccgctcgggcgcctcgtcaacgttcaaggcgacggacaagactttgaggctgcagtacgtcaagggcgacgcgaaggcgcgcgtcagctacgacacactctacttcgcgggcgcgaagatcgagaaccagggcttcggcgaggccgaagccatcggcgacgacttctcgggcgcccggttcgacggaatcatcggcatcggctacccctcgatcggctacggcatcaagccgcccatcaacaccttgatcgacagcggcggactcaaagatcctatgttcggaatctatatctcgaacgcccaaaacaggaactcgcccgtgggggagatcgtcctaggaggctataacacccaaaagttcaagggcgacataaagtggctccccgtcttgagaaaggcgttctgggagacagatctgtccgcgttcaaggtcggcaacttcgcgctggacgtccagggcctcactgccgtcttcgacacgggctcctcgttcatcatcatgcccgaggacacctacacggacttcgtgtcgcagttccccggcgcgagccacgacgacggcaccgactatgtggactgctccaccgtcaactccgggcccgacctaaccctagattttggcggcgtggccctgaagctctcggcccgggactacgtcatgcagctgggcaggaacacgtgtatcctcgccgtctcgggcaactcccgcgtgactggagaagtgatcctgggcgacaccttcctcagaagatactacaccatctacaacttcggcgacaacacgatcggggttgcgtctgcagtgtagacgcagtatttgttcccactgcactgcgcgcgcgcggcttgaatatgacccgattaatatatactgcaataaaagtctgtagtgaaccattgtgcgttcgcatttcatggtcggcgacggctaaagcgccacgtgtgctgcgcgttcccggagccaactaaagtggctccacattaatttcgtctgggcaggcagacaatacggagggtgactgacaatctaagtgcgaccaactaacgaaatatcttatcgttcgagcataagcacggctgtaagcactagacaacagtacggagcacagaaaaccagaatgcgaaatattatccaagacaagtggacgcaaggctgccactttaagctctaattgctttacttggcgggattaatatcgcatcgcatcctaaaaattgcgtatcgtaggaaatgttcacggcccgtcgccatagaagcgcggtgcgagtcccgttagacgcccgcatttagcgctctttggacgaaatatgcagttgaatcggattctggaccgatagagtgccgaatcaattacatcgccttatcacctgtacggcaaatgtgcttattcattagaagaatttcctccggccggaaaaatgcccccgaggtggctgctcatgtcttgaagacatcattagatgacgagtgggcggtaccacacggcctgggcggctcctatataatatggtagtatttccagagttgtagtcgagttatggtagctcaacaagagtcacagtatgcgcttccagactctcctaccactagctgctctactcgcaccgtcgtttgccaatgcagagggcggcgtctacaaggcgactttgcacaagcagagtttcgacataactccggaggagctgtcgatgaagcagcgcgccgccagcgtgggccagaagtacctgaacgcgctcagcaaggtcgtcagcgacccaagcatccagaacgagtacaatcttttcgccaagaacaacgatggccacgtttcggagctggccaaccttgcaaacaacatctacgctgcagacgtgaccatcgggacgccgccgcaggacttccgggtcgtcgttgacaccgggtcgtccactctgtgggtgccgggcaaagagtgccgggcgatggcctgcaggctccacaagagatacgaccacgaccgctcgtccacgtataaggagaacggcacgttgacgggcgtgacgtatggttccgggtccatcatgggctacgtgtcagaggacacgttccgcatcagcgacctggagatccccggccagcagttcaccgagacgaccgacgagcccggatctgttttcgtctttgcggcgttcgacggtatcctgggcttggcgtaccccagcctcggctacggggtcaccccgcccttccagcagttgatggaaaagaaactcgtgaaggagcctgtgtttgggatgtacctggacgatatgaagaccggcgaagggaacggccagcttgtgcttggcggctacgacgaaactaagtttaagggcgagatcgcgtggctccccgttcgccgccaggcgtactgggaggtggtgttcgactctgtgacagtgggcgacgacaatatcccattggagaactatggcgccgcgattgacagcggtacgtcattaatcacgttcccatcagagctcttcaaccagttcatctccaagttgtccggcgtcaccaaggaccgccaggggaatgtttacgtggactgcgccaacaagcagacggctcccccactcacatttggcttcggaggtcacaaattctccatttccggagaggattacatcatctcagtacctggccaatctgctcgctgcatgccagcgatcgtccagctcgacatagactctgcgggcaaggtcgccatcatcggagatgtgttcttgcgcagatactactctatctacgactttggcaataacgctgttggcttggcgaccgccgtttgaattccctgcgtgctgttaacagcaacttacagtactcgcataggacgatttaaccgtctgtatatagcgcttatcaaggtaagctaaattcggacaaaagatgcgacctatcaatccccgttgtgattcttacgcttgcttgatataggctactgtgtgtatagttcggtagtgcaaaatgaaaatgtcactatttctgttttgagaatctgtgtcacagattgttgacattttagttaattaggtaacaaaatcgtgacaggccctaaaagagaaaatggcgggctcgagggttaattataccgtttttctggttacaggatacagagtagttgcataaagtaggaatacaatagctaagccgaagggatagccgagacgaagagcttctaaggttcaaaggagaccaatcacaaccaacagttagatacgcttttctgctagacgcttagacctgaggaaacttgggaatcgtgggcagtaggtacggaattaggatatcaggataaagtaggccgctgcctgcaacattggagagctatctaggcgcgcgtataacgtaaaagcaactgaccgagtgaatgatgatggtagcgcgggttgcaacggccgagcatgtcggctcggcgggcgcatcgctgccacaaactcccgggtcgcgatctttcgcattgggtgctcatcctggcccgcaaaagcggattggagggccagcacaggggcagacagcttttataacaccgcttgttacgcccgacgggatatacagcaggccaagcagtccgtatatgcaggcctcacccttgctcaagggctccgaaagtggcgggagtgcaggcagtccgcagtcacccgatgcgccgagcagcgccagtggcgcgagcgttgggaatgcgatcggaagcggatacacgggcaatgtgtcggtggcgatcagaattaagccgtcggagtcttccacgaaggatccgtggtacgcatcgaacgatcggttaatacacaccgagtttggggagtttcagttcgaccatgtatttacgaagggggtgtgcaaccaggaggtatatcaagcccttggggtcccaataatcgacaagttgtttgaggggtataacgccacgatatttgcatacggtatgacaggctctggaaaaacgttcaccatgagtgggaataaacaagaaccaggcttaattccccaatgtgttggaaatatttttgatcggatttcctccgaacatcacggcgcgagcctcgcatacgaggtcaaggtatcgtacttggaaatctacaacgagaagatctacgatttgttaaactacgtcgaccggcaggctggaagtaccggacaacctagcagaaatgccaccggactcaaaatacgcgacgattcgaaatatggcgtgaaggtcgtcgatcttaccgagcagttggtttctagccacgaggacgtgatgaagtggattgcgacaggcgacagaaatcggaagacgggcgaaaccgacttcaacacccgatcctcgcgttcccatgcaattgtgttgcttcggttgacccgatatgacctcaaaaccgggtccgaagccaccagcaccttgtcgctatgtgacttagccggctcagagagagcagtgacacagatagtacgccggaaggagggtgcgttcatcaacaagtcattgctagcgcttggaacggtcatagccaaacttagcatgttgggaagccaggccaatggcctgcagccgtctcccgcagccggccacataccgtaccgtgactcaaagttgacccgcatccttcagccagcattgacaggagacagtatcattacgaccatctgcaccatcgattcgaaagccgagtcctcaaccgaaacgaccaataccgtccgcttcgcgtctcgcgccaagaatatcgccctcaacgtgcgcaagaatgaaatggactcgcacgccgagaaagacaccatcatccagaacttgcgcaagcagcttgacgagcagcacgagaccattgtgatgctccggcgcagtgctgcagcgcctagcggcaacggctcgaccagcccgctggacagccctggcgtcggcggcaccagcttgagcgagcgcacgcacaacatggagaagggcttgctagaggtagaaaacagcatcctcaagacgaagctcgagcattgcgaaaagcttctcgacaaggacatgatggtcctcgaggacccgcatgtccgcgagatcgtcgaaatgctccccttggacatcgcctccgtcctcgagagcaaggttcagggcatggagtcccagctgcgccagtaccgtgtttacgtccagaaactagagtccgacctcctcaaggcccagcgaaacatcattaccacccacagtgtgcagttcaaccgccagagcaccgccaacgtccaggagaagtacggcagtgacgtcgacatcgaattgcttctcgaggagcaggaagcggagctcatggagttgcggaacgctttgaagcgcaaggacaagatgatcgaagccttgcagagcgcccgccgcctccgcgacagcgctctcagtccaaccaccaccgtcctgctccagcgcaaggagtcagttatcgacccacgtgacccacagcccgtatagcagcagttccgccccctcatccccgcacaaatatatattattaagccacaccctcgctcgagcgcagacgtcgctgtgcaccacatgtagcaccttgtgtaaaatgcttcatccctacggcatggacgtatcaggactcccagatttaatcggctgacggacgttttagcaacgatcagcgttgctccgtacgtctgaacgttgctaatggggcatttgcctgaaacggagctgcaccggcagttgcgcaaacgttcgaggactgttgcggcggcgtgtgacaccgcaaaaaagagcagccgatcacatctttgttgcctgctgggcagccaaagggtacctaatgatgccttttgcgcgattcccctctcttgggcgtatgtaacaaagcacaacatgttgatgcacagacgcagccgcggtggcggcttcgggtctcattagcttggattaaacggtcaacaggttagtaggtaatacatatatagtgaggtttgctgcagggcccggcagagcgagacagaagtcgagcaaacagcgcacgaggactaggatgaagccgaaagtgcaatcgcggaagggctttcgcgcgctctggatggcagcgacgctgctgaccgtcgcagtttacctgtgcgttgcacacaatcgtggatggtacgacagcccgcaggtgcgcacgccccagaggataccgacctcaagtggagctgctccggaggtgtgggagccggcgaagccgcgagcgacgcgaccactagtgaacttggacgcggtgcggcgtggaggcggggacttccggcccgcacagaacttccaagaaattatcagcacatcgccatttgtgctctttgtcaagggcacggacgagagctcgcggtacctgcggcacctgctgacaaacgagtacgaggtgacgcccgagatcgcggtcgtggacctgagcaagcaccgatacagcggcgacctgcagaggtacatccgggagcataagctgcacgggccgctgttccagctgacagagaacacgccggacgtgccgtacctgttcgtaaaaggcgaatctgtgatcaacacatctgtggaaaaggacattcgggagccgcatgagcgggggcagctgcaggccgagctgcagcgccacgccggccttgacgctgtgatcaaaaagcgcagcccaccttcaaatagctgatattactacaataagatatgtataattaatgcgctctaatgactattatccgtaaaggtcatgtgcttcctgcagccgggcagccagtcgctctccgctgttcgccggagatgcagcatcgaaattgtagaacgcctcgccccagaaacagagtaggcccttgtcccggccgttctcacgtgcataaagcaccttgcacttagcctccgggccgagaaggctgcgcgtaatctcagacaattgctggaggttggagttcttcggcaagaagaggacgacattggccgaaatgcggaggaaggaggagagtagctgcgacaggccggccggctgaagctgcgtctccaggtcgtacgcctgcgtcttcgtgtagtcgattccgccccacggtggcgatgcaaatacgcagtccacatgcacgcgctcgaagcgtccccgcgctgcgagctgcagccagtccccgtgcttcagccagacacggtcggccacgccgtacgcctccgcgttcctgtatgtgcagtacaagtgctcgagcttcagctccacgccgtagaccttctggaaaaccttcgcgaagtgcaccacgttgccgccgcccccgcagaacacgtccaggatcgtcgttgccccggggaggcacgcctcgatgaacgccgcagtgaacttcgccacgcgctccggcgtcacactgtaccacagctcctctgtgaggtggatgttaccctggtcgattagggagaacagatcatgtcggtatgaccagtattttgcgatgcttttcttgggggcgttgtctcgcgggaggtatcggaagctgtcatctgcaaagtacctccgcagcgtgcgccgctgtttgcggtactttttcttctggagatgcagaaagtgcggcgcagcacttttgaacgccattagttcagcgggttcactcaggaacttgtgcaaccgcagcctgccgctatattctacatgtttcgccatgcgatgagctagcgcaacccaccataaatttcaagtcattatctacgaatattgtgcggcgctagcgttaatgtaatacgggacaaactcctaaccagccatttcatttgattgagtaattgggttgacagatgtcgaagtagcaatattatgatggctgggattagaaacttgcggacaaagaatcagtaggatgatgatcctggaagacgtggaaattgaggagcaagtttctatctgtatccgcgagagaaatggtgcagcgcagagcgtttgcggtcgactgggtctgatagacagtcagggcagatggttgcactgtgtagtttgcggtagcacattgctggtgagggtccggacttgatgtatataactgagaagcgttctggcactcgaatgtactactatttttgaaaccctgctgatggaccatcaaactaatataataagtcagatcccctcgccaccaggagacatacaattttgggttcgacggtgaaactatattaataaattgcatcgagatgcctatcgggaagctgaggaggagtaaagcgatatcgtttcgtggcccggcgtcgccctccttgaagttcaaaagctttgaaactcttcagggcaagcccctaggggagatgggacagaacggacacaagcaggaagaggacatggcggcacagcggccgcattttcctgcggaagcgggcgcagaacaagaaatgaaatgtcatgtcgccgagacacccgcacagaactcgcaagtcccctcgaccaccatggaaaatggtttctattcctttgcaaacatttctgacaacaccacgaataagaacaccaaccggtactcctatttgtcggacaacactgcatgccagctgcttgcgccagcaaccggcaccgactattataagtcgctaacgcccaccatgaagccgatcacggaaagacagaatcatgcaggtactaccatgagcctggacaccataccgacggcagaaaacatttccttccagatcacgctcccgacggtcccgccatctgtcatttcatctcggtcttcgctcatcaatcggcagcgaagcttgtccatgcggtacagtagtccctcttcgatgtcctcgctgggatcgacgcccacaaagctcaccacattgaagaggtccaacgccatccgctgcaaaggtggcctgttgcaattcttttcgcagtatgcagtgaagacaggcaaaaagttggtgaagtggaagattgcacttcgaaagcggctgttcaagttccagaggaggtcgacaaagaacaagaagaacagctcaccgaccacttcgcatttgaagcgtgtgaatggatatgtttcgaatgtgagaagatcgttctccacccagtcaaggctagcccttgtgcctgagatcgtgcgccgaacgccttctcggagacacttgacagcaaacacaggcatgaaggacgcaacacctgcttctccgagcagaacctcgatccggcgcacgccgtcttcaatcaagcgtgcggcctcgacgctgagctccaactacgtataccgcgacggctctgacacctcgtcacaagcacccgaactgaagagtaccggcagctctttggcccccgcaccctcacagatggtgaggtcaactgcattaacatcgctgaattcaatagtaagacaaccttccattgttgtcaacaacaaggtcatacccctttcgaggtttccgggagagaaaatgcaacttcctatccgagaggaggacgaagaggaagaggaaccgagcactaaaactgacgactatgtcattgacacctcgaagagaatgagcacaattggggagatacaagctagcaggatcagctcatcttccggaagcattagcagtcattcatcaagtattcaatcttcgcattttgatgacgccagcaattcctgcccattaaatgattccatcgagtctgattccgatatagaatgcacgaggacagcttggaaccattttttgcggacggtgattgccgagagaattaggatgagattacaactggcaaagctacaggagttggcgcttctgaaggatgactcattagacattttgtatgccgtattaagaaagacactcgatgagccagccgacaaatcgtcgtccacatacgatcctgatattatgccagaaaacaattctgaaactggcctggggaatgggtttagaagtagcgaccagctttcacggttaaaggagggcagtagaaagagaaacacgagcagctccaccatgttagcccttccagaagccttggcaacggtaagaaggtctatcacaatgccggtcggtttgaattatatttgattttggtttgatttttggaatacgaagcctgttatgatggcaaagataaatgatatgcatggccgaatagtgactagaaagacggatacacttaatgaatctagaggctattttttatattacatcacttttaattataatagatatatataattctaataccgtttttacttcaatgtgccggaaggcacatctatgcgagtacagaagactgtacattttaagaggaaccctgccttcccgtatcccactctctcacaagtggattgacgagcctgtctttctcgaatttgtgggggtgaggtaagacgacaccatcaaggtcgggaatcatgttctttttggttatttcgcggtggaaggcgtagaaaaatctgcacaacggatcaacgtaccagcgactgcccttgtaatcaaaccagcctatgtgacctcccttcgacgtttcaagaagcacgacatacggatttatggcgacttcacgacgtgggagggcctctgagccgacaatcgggtcatccaaagcgttgatcgcaagcaagggagttctcacctggggtaaccgatttacgctgctggcatgtctgtagtattcgtaggaggtgttgaagccgaacatcttggccgtgaactcattgtcgaagtcctcaatcgtctgcaaagagtttagtttctcatcgtactgcttcttcatgtacggatccagtctcaactgccgtatgttgctctttagaacctgaacacagttcttgcggagcgctggcgagtacacgtagcgcgatagaaggcccttgcttaggttgtaggccccactcgtcaaatcccacggattgcccaagacggcggcgcactcaatgtccgagctgttttgctcctggcccaagtagttggtggccatggacgccccgagcgaaaccccgacaaggtagaacttccgttgtgggtacatcccgcgtagcaccttgacgcagtgccggatgtcgtccgtccaggcgccgttgtacaaagagggcgtcgtgatcgaactttgtgcgcagcccctactgttcaacacacaggcctcgaagccgtagacgtcgcgcgcgcggttcacgatcgcgcgcacatagccctcgtcagacccgcccgtaaggccgtgcatgacaatgagcatgggctttgcgtcgttcgaggcgagctcgtcgatctccttggcagtcaagtagcggtaccggtcggtcaacgcccggtgctggtgcggcggcacctcgttcggcaagtcctggaagtgctcaagactcgccgccgacgtcgcgaagtccaacgcgcccacgccgccgtcgtggtagctcaacatcatccgctcgtagtacaccacatccaccgtctcaaagttcctcagcgaggcaaatatggtctgcaggtgccccgtcggaagcaccgggtggaagagctgtgtcgcccggtcctggaactcgggcacgtacttctctatgagctcgagcatggtcatggacccctgctgctccttgtcccggaacttcaacggctgctccggcacggtgtgccgcacctcattgcaaaatggcaaccacgcaagcacccccataccctctctgcttcagaatctttggtgccgacccgaaaccacaaattgcggcaatagtacaaatgctccccggcacatctgctctatttaaatgaccgtacttattatctgacggatccaacgttcggacatcccggtcaggtgacgtcgccgaccggccccgaggcagagcacgtgcacgcacccgcgcacagcgccggcgctatatgctggtatcagaacccaatcaattcgtgctggcacacctacgcacgctgggtgcctccaggtaagcaaattccgcggcccgggcgccacgccggccgcatccgccgttgccgccatttcgaaacgccgccgcctacgggcggaaatcgtatttcctcgcatgcagatcgcggccgtgcgcgcccgcatggcctgctgcactgccgccaatcgcgtgcgtccccggcatggctgccaccgagctgccgcgtgcagcccgctccggggcgccccgccatgcagccaccccggctcatcgctgcgaaccccggttcccgccccggtgacggaaacagccacgtgcacacgtgacctccacgtgaccaacaggcaagcgtgccggcagcttcgctgcagcggccccgagagcttccctacctattgccgtcacatcgcttgacgtagcttgcgccacgccaagcaccggaaaagcctcgccgcgacatccgggtacgtcatacactgcgcgcagcggcggggcgctacgtaaggacacggatgaccgctcacagtagaaggacgtagggctcggagaagaaaggagacgcagcgaccaccacggagctaattccgacgtagaatgcgcttgttccggggccaacagcgcgctgagctggctactaaatagtgcatatctactgccgccgccttgctttgcgacacctattcgttcggagtggaggcgtacagtcgggcgtgccaaaggtttaaattgtacacgcagcagcttgcacctacatttttagcagcccgttactttttgagctaaaaaaagcttgcagtggcccacgaacagcgccattagcaggtataaggctaagaccaagcatctagctcgggttccaggagcacggccagactaaacataagcatgctatcgaatacggccgctgcggcggtgctagggctggcgctggggacggcgctggggacctcttcggcgcagtcgcaagccacagattttccaacgctggctatcgggcgggatgagagcctgctgcccgtggtggagctgagagtggggacgccgggacagagagagaggctgcggctcgacatcacgcagccgtacatgtggctcgtgtctgggcggctgtacccggagtgcgaccgcaagaaggggaactgcctgacgggcaacctgtacttccccaaggcgagcgagacgtatcatgccggggacggggagacgtacaacctgacgatggcggacgggattcagatatcggggctgctggggtacgaggaggtgaacttcaaccgcagcgacgtgcgggtgcgcgacggcaacgtgcacctggcgccgcgggagggcgtgaaggtggagcggatggggttcctggaggcgacgacgatgacagacatacacgcggggctggggctgtcggggcgcgtgaacaacccggacccgctgggcgacgcggcgcgcggcagcgagttcttcttcctggacaagatgcgcgacgcagggctgatctcgtcgcggtcgtactcgctgtggttcggcaacgacaacacgtccgcggtggacctgccgacggtgttagaggacatcggcacgctgatgctgggcgcggtggacccccggctgtactacggcaacttctaccagtacgacggggtgcccagcgtggacatcgcgagcggccagcacacgcgcgggggctatccgatcgtgccgctgacgcgcgtgcagctgctgggcaccgagggccggcagctgaacctgaccgacgacacgttcgcggagccggttcttctcaactcgcgcttcatgacgtcgttcctgcccaagagcatcgtccagcagatcgcgcggcagacgaacgccgtgttcaccaagtcctccaaccggctgattgtcgagtgcagcctgctcaaggaggaggcctcgttccgcttccacttcggcgagctggtcgtcgaggtgccgctgagcgacttcatcgggcccaccaacctccgcgcgggcacctccatcctggccccggacaccaacgagacctgctacctgaagctcatgcccagcacgggcatgggcttctccatgctcgggatgccgatcctgcgcaagctgtacatcgccgccgacaccgagtccggcgcggtcggcatggcgctcgccgtccgcccggtcgaccgcaacgtcacctccctgccgcggtccacgggcgaggtcgccgccatccgctccggctccattccgtttgccacgcccgtcaccctgccctgcacatcctccatgacgctgtccatgttctccaagaacatctccgccagcgtgctggacggcttcaccggcaccatccactccaacggctttttcggtccgcgctccggcgagctcaggacgaaaagtacagatttgatatcgcgcagcacatccacgaagaaatcggattcatctcccagcagcgccaacgctgccatacaccaccccagattttcgggccgtacttactttgatgttggttactcgactttctccattactgcattgtgttccctatttctgatagggttcctaatatagggaacaactaccctccgagacgactgtaccggctcgtgcttccacgagccacaataccacgggactcctggcaccatgcatagtgtaatattataaattgaactacataatcacatctcactattactcgagtctaatcgtacaccacgtataacatgactggtgggctggccttatggccagcacgcagatcgcagagcctccaagtgaaaccgaaagatcacggacgtgaaagcagcgaggtctcgtatcgcagtcgatagcttctacaaaacaatgaatagtctggcgcagagcgtttcgagcttgtctttggaccaaggagcaaacaggaagcacaaacggccgcatcgggcgttccacacgttcaatgagccgccggccatggccagcggcgggggtctgcaggcgccgcggtcggcgctgcaggcggagggggcggcgcccctgcgagccgggtcgccggtgatgggggcaggggccgggggcagcagtgcgatggcgccgcccgcgcggtcgacgcacctggtgccgacacagcggctggaggaccagcagcagttcctgacgcggacgttcatgccggacgtggaggcggtgccgccgttttccacgacgcagttctactgcggggtggcgggggcgtgcgacccgcgcgtgctcgcgctttcggcgtacaacatacccaagaccgagcagctgcgggcggtgacggcgctgccgctgggtctgaacgtgcagccgttcgcgccggtggtaccgtcggacacggcggtgccggcggtggacgcgcgcgcaggcgagggcccgctgcgctgcagacggtgccgggtgtatgcgaacccgcgcttccggttcacgtcggactcgcacttcatctgcaacatgtgccaggtacggacgcagctcccccccgaggagtactcgccgctgggtccgagcggcgagcgcatggacttggcttccaaggcggagctgacacacggcacggtggagtttctggcaccggagctgtacaacgtgcacaagggacgcgccgcggtgccgcttcattatgtgttcctagtggacatctcgacgtgggcgaacgagaacaagagctcgctggcggccatcgagggtgtccgcaccgcgatcaactacatctgcgagcagcagccgaattgtaaggtggccatcatagcatatgacaagtggctgcgtttcttcaacctgcgcccggagtcgagccaggcacaggagctgattgtgtccgagctcagagaagtcttcctgccgctgtacagcggcctcttcgtgaggcctgcggaggcaatgcatgtcatacaggacacgttggtcaagctcgagtcgtttatccaggacgacaagctctcgcacggcgccgaggcgtgcttcgggtcggcgctcgaggccgcgctgctggcgctggacactgccaccaatggtaatggcggcaagatcattgcgactctgaacacgctgcccaccgtgggcaacggcaatctgacgctgcggcgcgacgacggcctcaagaagagcctgaagtgcgacaacagcttctacaccgcgctggcggacaggatgctgaaggcgtacgtcggcctggacctcttctgcacaggcagcgccttcatggactttgccacgctcggccaccccgtgctggccacctccgggacgttccgccactactcgaacttccagctcgaccgcgacgagttcccgctggtcaacgacatgctgcacgccgtcagcagcaccgtcggctaccaggcgcagctcaaggtgcgctgctcctcggggctgtccgtcagtcgctactactcgaccgcgtgcggccactccgaccgcgaccccgtcatccccgtcgtcaccgcagaccagagcttcacgctcgcgctgcagtacgacagcccgctgcaggcaggcaccgacgtctacttccaggcctcgctgctctacacagacctcgacggcgtgcgcagagtgcgcaccagcaacacctccgccgccgtcagcgacaacatccacgagatattcaagttcctcaaccaagacgtcgtcaccgcgctgctcgtccaggacacactcaccgccctgggcgacgccaacttcctcggcgtccgcaagtccctcgacacccgcctcgccgccatcctcacgcagtaccgcgcactcgtcgacccctcccatgcctcgcagctcatcctgcccgacgcactcaagtcgctgcccgcgtacctgctcgccttccagaagtcgccactgctgcgcgcgaccggctccgcccgcgccaacgaccgcgccgtcgattacctgcgcttcgcgacctacgacctgcgccgcctcgcataccgcctctacccgcagatcctccccctccacgtcccgctgtccgacgacgactacaccttctacgacgcccacaacctgctgctgcagttcccgtccgccgacgacctcgccgtccgcgccgcccacggcgccctcgccgacggcggctgctacctcatcttccagggcgacaccgtctacctctggctcaacgaccacacccacccgcagctgctgcgcgacctgctcgccgcagacgcaccgccgcagctgctgcccagtgcccggttacccggcctcgacacagacatctccgccagggtccgcagcgtgctcgactactgggccgcgctcgccggccgccgcgcgctgcccgtccagctgctgcgcccccactccgacccactctacgcccgcaccctctccgccctcgtcacagaggacgcctctgtcgacggcctcgacagctacgacgcccacctcgtcgttctgcaccgcgctatccaggacaatctgcgtcacgaccgctacctgcggcccgccgccgcccgcgaccacgacagccttgcccagcgctacatccagttctgactacataactatataccaacgtgcacagtgactgctgctagcgaaaacttttcgacgccccgtgatcaaagcgacagatcagccgaatcgctctcccttcctcccatcaccaccaaacgcggccgggccagcatgcaagcacgccccccaccaatccaccgggccagcagccctgcggccgacgcatccgggagcttgcgacgcatgtctctgaacaatccattccgcgcatccacatccgaactgggtgggcgcctggcacctgaccaggattttcacgcatgggtcacccagaaaggggtcgggtttccttacactagtacgcaacgtacgggttcgcaactgtcgtttgccgagagcatcgccgaggaggagggcgcagcgccggacgccgcggcgcgctacaggtatgtcactttcttttgtcgaaacggggacgcaacgctggcgtacgaaatctttcaggctccccccacaggcgagctacatcgaaaaagtaacagccctagcggatggggctgaaaagcgcagcagtttgccgtctacacgccacgccagagcacgccggtactaacacaagcagtatgagtccgccttcactacggccggcgtcgaacaacccatttctggacgagctggaaggctacgacgaacgggcagggagcccggcgcccggcgcgcgcacacacgaggtcggggcgaccgaggagaaggaacgattgagacagcggtacgcggcggaggacgacctgccccccgcatacgaagaggtggccgggagccgggtgcgcgaggcgtacccgcaggagaaaaaggagcggccgcgccacgagcagcggccgcggcgggaggagcggccgcgggagagtggcaaggcgcggccgcggaccaaggagcgggccaaggagcgcacgcgggagcgcaaggagcggccgcgggagcgcgaggagcgcacgaaggagcgcaagaaggacgagaagaccggggcgcttccgaagaacgtggacacgatcgacaagctcgacgtgacggggctctttgggggcgcgttccaccacgacgggccgttcgacgcgtgcacgccgcaccgcaacctcaacaaaaaggtggcgccggtgctggcgttcccgaaggacgggccgaactcgacgttgtcgggggccaccgcacacaagtctgcgatgaacgaggtgttcggcatcgacgaggacgacgactcgtacctgtattcgcgccgcgacgtcggcgagcgctcgtcgtcgacggtgaacgctatcaagaaccattcggaggtgacgcagttcgacgccaaggtaaccgcggaccttgtgcatgggcccgtgacacaggggcttggctccacgacgttcctcgacggcgcgccggcggcccctgtcgctatagaggcgatgaagcagagcacggtgggcaggaagaagtctctgagccacaggctggcgaaaagccctccgtccgcgtcggcgattggccccgaccccaggaacggcaacctgaagctgactaagacccactctggctatcttgaggacgagaaggaggacgacgaagacgcctacacgggcgcgcgtgacacagacaataagaaggagtcatcaggtaacaagttcttgaggagagtgaagagtttgaaggtaaccaggagataatcactgtcattgctgctcatctctagtcctgctcgcccgatcaagtaaaaatatgtaccccatatgtaaatcagcagcagccaacaactacgattcgggcggcagcggcaacgctcgtcgtaggaacccgttgccttcgggccgttagtgctgagaaactgaatgacaagacatggtttatacggtcaagttccggcgaagcatcgccgtcgggttgtccatttttagcatatatacaggaactactaaatacaggcccactcagatgaaagtctcgctgcgctgctgtggaagtctcgattcgacagcagtccagttggtcgactcccatacgcgatcgagatatgcggctttgccgaaaaccccgtagtcgtgcaaccacgatttcggagaggcgtcaatcgctagaagcggataataccgcgtggtggccttgtactgcaggttctgcacggcctccttcgtgccatccatcggctttggctccgtctcggtcttcaccactcgtttgaagtgctcgacgcggctcacggcgtgcggcgaaccggcgttgtacgtgttaaacacaaagagcttgtcgtacgccagcgcgtcgccggtgtcgccagcacaccgcgcaacgagccatgtgaacccgtcgcctgactgcgcaagactcgagttcagcagcagcgtgcggaactcggcgatcgatccgaacgactgtgtcagcgccgcatgcagccgcgtgcaccccgcctcgagcggctcgttggggccctgcagctccagcgacggcgtctgcagaagcgcggccgccggagcggcggtaggcgcaggctgcgcgcagccctgcagtgtggagaacgcaaaccgcagattatggagcagcgtcgcatacatgtgctcgcgtcgccgcccgccctgcgttgcgagttcctgcaccagcgtggccacaggccgctgttcgccgctgcgagcgactgcagttagcatctgcgcgtagtgctctgcgcggtcaaaccacgcgccctgtagcccatcgctcgaaaacagccctggaacgccttttccgcgcgacagatggtccaggctgggtgcaatgtatgtccgcgcaaacccacggctcagaatctggcgcccaagcatatttaaacggcctgctgcgtctctgctgatctcttcttggagctccagagcttcaccaaaggtcaaaattttcattctccagcgcctttcctaaggccgggtaaccatgaatttgccacggactatcaccagctcggcataagcttacctctagccacgcgtagctgcagcgtgagacccaaggtgctagccagcaagtgtgatgagcacgccgtcgttcaaatgccagaattgccagtgtccgatcgacatggacctgtcgctgatggacctttccatagcacagcgcgacatgattgtcaattcgggcggggagcctacgaaccccagcacgttcaagatccccccggagcggctctcgcggctgcaccaggtgcggcggccgcacgaattgacggtggcggcggccccgggcgcggcggagtcgtacgtgttcctacaggtcaacgaggacgggctcaaccggtccaaacacgcgatagaggaggagagcggggaggaggaggaggacgacagctccaagacgctgtcgtcgaacatccaggtgctgacgaacatcttcaacatcctgtcgtccaaggggaacatcgactacccggtttgccatgtgtgctgcgagctgatgatgcagcgtctgaaggccgagtacgcggacgcgatccgcaagcgggacgcgtacttcgagttcatggaccggttgcagaagcagcacgagaaggagagcgcgcaggagcccaaacccgcatcggcggaggcggacctgctggcgcagaaggacgagctcgtcacgaagctggtggccctggagcacgagaacgacaagctggacaaggagatcgagtcgctggagcagcagctgcgggagaaggaacagcaggagacgcgggccgtcctcaagcagaacctcaaagacctggagcacattgcgttcatgaaagacatgcagtcgctcaagaaccagtacgagctgaccctcaacaacctggacaagctgcgcaagaccaacattttcaacgagacgttccgcatctcccacagcgggccgttcgggaccatcaacgacctgcggcttggtggcttcagccaggtccgcgtgccctggcaggaaatcaacgcggccatgggccagctcattctgctgctggccaccattgcagccaaaatccactacgagctggacggctaccggctcaagccgctgggctcctactcgaaggtcgagcgcttcgatccccacacacagaggtggaatgtttacaacgcttacagcaatgacgacttcaagatcgggaagctgttccacaaggagacttcgctggacaaggcactggaggccatcattgcgattgtggaccagattgccaagaggatttcgaccctctcgagggaccacaacgacggcggcatggagctgccgtactccatgcaaaaggacaagataaacggcatccccataaagctacttggcagtgacccgacgttggaatggaccacttcgtgcaagtttctgctaacgaatgcgaagtggctactagctttttcgtctcaggtgacctgactggtggtttttaactgacgaaaagcaactaataatccgtttcaggaatagtaatgaaatttttacatcaggcatttgtagcgccgcccaaaagttagatccaatcgccatcggggagagcccataatagatattattagccataacgactgacaagaagggcgcctgccgtctccaatatactcagcccaggtgcatacaggaagtatggcggaaccaaagaaaatatttataatatcggatgattcaggtttgacggaagccttcgacgagcgtaagctcctggagtcgttaagaaagctgcagttcggtctaaagataaacgatgcagacatagataaagcggttaagaggattgctgcgggaatagggggcgatataagagatagcgagctggtggcatacattggagaaacccttgcatccatgatcaccagacaccctgatttctcgctgcttgctgccagagtggagatcaaggttctacacaaacgcttgttgggattgggctttactgggaatctggcagtgctgtgtgagtctggagatagccccgagggccatgccacgaagcgtaagagggcgatgagtccatgcacacggggtccggtccggagagagctctatgaccttgctgtccagcatagaaacatcatagatcaagctattgatgatacgctagacttcacgtttacctattttggatggaagactctgtgcaagtcttatctgctgaaacaccagggcagagtacacgaaacgccgcagtacatgttcatgcgggtggcgttggcgctacatgggccctcgggcgatattgaccgtgtgctggagacatatcgtttgatggctaacaagtacttcatccatgcgtcgcccacgttatttaacgcaggaacgacgagtcagttcttgtcatcctgcttccttctcgggatccatgaagattcaattgatggcatttacaacgctctgcataaggcagcactgatatctaaggcctcaggtggtatcggaattcacgtgtccgatattagagccaatggttcatatatttccgggactaatgggacttccaatggtcttgtgccgatgttaagcgtcttcaacagcacagcacggtacgtagaccagggcggaaataagcgccctggagcattctgcatatatctggaaccgtggcacgccgacgtctttgattttttgaggctacgacgcaatcatggtaaggaggagatgcgtgctcgcgatctcttctatggcttgtggattccagatctttttatgaaaagagtcgaaaacaatggtgagtggtctttgttttcgccaaatgaagcagtaggcctttcggactgctatggtgaggcgtttgagcagctctacgtacgttacgagagggaacttgagccttacagacgtgtaaaagctcaggagctctggcgcgaaatactactctcgcaaacggaaacaggtgggcctttcatgctctacaaggatgcttgtaatagcaagtcaaaccagaagaaccttggtaccattaagtcgtctaacctatgctgtgaaattgttgaatacagctcccgtgacgaggttgctgtgtgcaatcttgcttcagttgccctgccaacatttgtgtctgttacgtcagatgcaattacttttgattatgcgcggctgcattctgttgttaaggtaatgacaagaaatctagataaggcaatcgacatcggtgactaccctgttcctgaagccgagcgtagcaataaaaaacacagaccattggcgttaggtgtccaggggcttgcagatgtgttcatgttgatgcggtttccattcaatggcgaggaagccgcacagatgaaccgtgagatattcgaaactatctaccatgcagctgtagaaacatcgattgagcttgctgccgagtacggagtatatgctagctttgttggttctcccgcaagtaagggggagctgcaatttgacctttggggtcgcaataaggacaattatcagtttctgtatgacgactgggatgagctcaaggaaaagatcaagtctggtcccggtctcagaaactcccttttggtcgggcccatgcccactgcttccacctcacagatcctgggcttcacggagtccttcgagccaatgacttcgatgatatataccagaagggtactaagtggcgaatacacgctggtcaacaagtacatggtgcaagacttttgtgacctagggatttggtctgaagagctgaagaaccggataatcaaagacggaggctccattcaagggattgatggtatacctccggatctgaaggatctttacaagaccgtgtgggagctgccccaacggaagcttatcgatctgtcggcagacagagccccctttgtggaccaatcgcagtcgctgaatttgtttctgaaagagcccacgatgggcaagttgactagcatgcacttctacgcgtggaagaagggcctcaagacaggcatgtactacctgcgtacccaggcggccgccaatgccatccaattcacccttacagacgagaatactctatcaggccccgtgaagctccgcgaaggtgctgctgtggcccaatccccaagacatgctcgctatccatcggaagaagctggttcccgcgtaagtccggcccgcatcgagaccgcagtaagcagcatggatccctccgacgacagcgatgcgaacaatgcctttggtatatacgactctacgcctatcgcgtgttcaacggagaatcgtgaatcctgcgatagctgctctggttgaatccacccctgagcattgttccacctgtaaatagtaggatagaggttaggtttgtaatttacctggcactatcaccacattaaactctgtcatcagtttagcctctatcccgcattccaaccatgccactatcgcctgtaatatagtgacccagaacgtgctgaaatgtggatctgcactaccaactcgcctgcagctgcggcccaaaacgcgataacattgcgtgactgtcgcattatcaagattcgccaccaatcatagaatcagcattcattcgctactgctgttcgtgtataaataacgaggtatggtttcaattgagccttctgattcaaatggctaagacagctagcgcgatgttgttcctatacttgctcctatcgcggtgccttctctcacatgcgtttcaagaatttatcaccaagttccccatgccgatgatgtacaacttcccatcctgctcgtcaacgattccttcgacatgtcggaatgagaccgctatcgctgacacatgttgcttcgagtatcccggaggtcttatccttcattcgcaattctggaatgcaccttataggaagcgctcgtatcgcgactttggccctgatgattcttttaccatccatggcctgtggaacgacagatgtgacgggagctgggaccagttctgtcggagaggctcttcaatacggtctgtcgtcgacatattaagcaaggactcattaaaccgcgggggcctgcccattacgggaaaggctctgctgaggcagatgagtatgtactggaagggagaccgcggcgacgaaaacctttgggtgcacgagtacaacaagcatggcctttgtctgaatacactgcgtccggaatgttatcagcggtggggctccgtggcgtcggccgaagatcaagctatctacgactacttccgaatcgcgatgaacttgcacttgaaaattgacgcttaccacgcactctctcgacagggcataaagcccagatgcgacgctccgtacgatgctgtccgcatgcaaaacgccctagccgatgacttcggcagagaggtacaaatgcagtgcactggtaatcggctgaccggtgtcacctactactatctactgaggggcggtatcttgtccgaaaacttccagcccgtcgaccctacgcagagttcttcgtgccgcggtaagatttattggataccgaaaagtgggtgctaggtatctccgtggtgcaattatgcctgattactatttaatacatacgaattttatgatgtatactagtactggtactgtaagccgccatgacgtcggggctcctgtagcgggatctgcacggaggtccggctgcggggcgggtcctcctgctgtagaactgaagataatcgcgtatataagcatgcaaggtatgcattgggcatctctctgggcgacgccgatcggtgtgctaccacttttgtttgccaccggcagacatctgtattagacgcgcggtgctatcatcgagattagagaacgtgcgggtatgctgctgggggggctgggcgtgcttgcccccgtgcgcaagtgtgggctgatcccagccgagcagaactttcgtgtcgtcggcagacgcgtagctgcctacatgaccgttggtgtgcgacgagcttggtgcgctgcttactgagcggaacggtgcgccattggccggcgcgcggttgctgtggcgtacgtagcggacctcctcctccaggcggtccaagcgctcaaaaagcatgctgttgatcgtgcgctgcgtgtctagctcgcgcttgagcgactctatcatcatcttctggctgtcgagctgccgctgcacgcctccgtccgccggccctggcccgggcgcagggtacttcgccggcggcggcatgctgcggcttttgttcgacatgtagtcgcgaagctgctgtcgtagcctgtcgtcctgctcgccctgctgcggcggctctgcctgcccgccaacgtagtgcagcggcggcgcattcccgctcatctcgccggcccccctggcgccctgctggagtcgcgttgggctgctgctgagtaagtcatgcaaattccgtttcgtgttgaggtattccttcctgatgttctgcaacgtatcatccgtgtccggtcggttaagaaaagacgacacgttcatctgctcctgaaaccctccttgcctgccaagcgctcgcgcttgtggcgagtagcagcctttgatctggtgctccggggcagcttttgtaacaaatctcaacggcttgctcacgtgaccacgactttcgcgatcgtcattataaacggttctgatcacgtgcatactcacgtggcaatcacgtgaccgcaagcggctactgtctggaccgcccgcattccagccgttgcaacactaccagccgcacgcattatatatagcccgtcccggtgcgaatgttggcaccagccggtccgacttgttccgcagctcctgcggtgcacggatttggcatcacgtgaccgccgcgctggctattattagtggctgtgacacgtgacaaaggcctggccgcaacgaccgcctccaggctacaacgcagctgccgcgcgcaccaggcacgacccgctgtgatttcgaggtgaagcgccctcgtctcttactggcgaagcgtgtgcacggctgcgaaataaggtcaacgcaacgcggcgtttcgactgttcttgaatgagcttcaagcgtcacacggcagggagcagtgggcaagcaaccattttaagggtctggttctggatacgcatatgttccttttttgtctgcctttcattctgccaataaaagcgaagagcgtctaagtagttttcgcttgtatacagaaacgctacagtagctcaggtgaggttttctagcacgcgataggctagcgcacagagagctcagttacacggtggaagcaggggcagcaaccgaatcaggcagtgcaaggtgcaagaggctctggagcactgatggcaggactggacgtacgaaacatctacaacctgaaggaggttgtgggcccagcgcgggcgcagcagtgcaggacggtgcagccggcggcgtcgccgacttttggcgcgctgaggctgtcggggtcaccggcggcgcagccgctgtcgccgacctctcgtacgatggcgcagcgggccgaggtgggggaggcggagcacctgctgcgcgagcggacgcaggtcttgactgcggccgagtggcgggagcggcaggcgcagctgggggacgcgctggtgcttgatctaagcacacaggggttccagttgaagggcgcgcagcgccgcgtgcacctgtcttttccgagcacgctgctgcggcggccgaacttcccattcagcaagctggtgcggacgttgaacagtgagacgcaggcaagcctgctggagcatctggacactagcaatgcaatagttttgtttgacgatggctcctctttttggaataattgtcttcagacgaccataaccgtgctgcgaaagctgctcacatacctggaggaacagaaggcgcacacgcagcggcaggttccgattttcctcttgcaaggtggggtgaaggccttcgagagccatcattttgtgtcccctgcggtgaagaacggctcttcggcagacaagccgaagcttacgttgaaattatgcatccctgggagaactcaggacagtggttctgacgggactggtgttactgggcgatctgcgctcgacaattcgtctgagcttttcatacaatccatgaagggggacacattgcattactcgcccagttcgttgctgaagtacttcaagtatcacacgccggcaaaactgccgaagcatgtgcctccatggctgagccctttcaatagagcctgtgacagcgtcctctctcagataatgggcaagtttgaactattggagaagctggaagtaatgcggctacaacagtgtttatctgggtctacacctagtagcacatattcgcagcttgcgaagaccagttccaaactatattccctaagggatttgcagaaaaaatacaggtcacctagagtgaatttggaagatggggatgaggcgagagctttccatagcaagatcgacgattcctataatacactgggtcaatgcaagctggaacgtgatatacatgaggaattaaatgataacgagaataaagaaattttgaacaaacttgcttttggacatagctcttcagatgcaatcgaggcggcctccgtggtccgacaagaagatgaggaccactcagatgcgccgaacgagtatgttatcacacaaggactcaactcttttaccaaaaacagatattcaaatatcataccgtatgaacatacacgtgtgaggctagaaccatcccctgtgggaaacaggtcgttagctaaaacctttctccagtctacttcacacttatctccggcggctgcaccttcagatagcaaccctgtcgttgatcacctgaaggttccggccccttcctcatatttcgtcaaaaataccgaaagtgcatttacaccacttgcaggtacaacaccaaatgagccatttaatgattatttcaacgcgaactacctgactttacctgaaatcaattctaaatgcaggtacatagctacccaagcaccattgccatctacagtggatgatttttggaaagttattacaaccaattctgtaaaagttattatttcgttgaattcggatgatgaattaaacttgcgtaagtgggacatatattggggttctgatagtgtgcataaatttaatatcaccattttgcacagctttgagaacgttcgtggtttagatggcaatattgtgcgggttttcaaagtccagaaaaaatcgactgtcgcaggcagcagcgctgaggattcgcaatctaatacgcatatcgtgtatcagattcaatataaaaaatggctggattcgtgtggcattgtaatgtcggatttcctgcagttgtacaatgttaaaaatgctctcctcaatgatccggacagtttcattcgacaacaactagaagatcggaatacactgatagacatagatgaggatccgagtttatttcgccggacagagagccattccccgctgcttgtgcattgcagtgcaggctgcggccgaactggagttttcataactttggacttcttattaactgttctccactctccgttgcaggtttacaataaaattgacgtctggaacatggaggaagacctcgtattcattgtcgtgaatgaatttagaaaacagaggatatcgatggtacagaacttgacgcagtacattacctgctatgaaagtctgttagatttcttctcattgcatgaaaaccgcggcgcagtggctcaatattaaagataccactataaacgaaccacccgggagcatattcagttcccatttaatttatatttattttttgtatatatagaacacatgcgacaaccgtcagtatcctttctttactctaaggattgaggagacactgataaaaatatctgcaggtttgataggatgcttttgtctatagaatccaggaaagctccgtactgtgagcccaactcggattctaaaacggacatcaagtcagctatgaatttccggaggttaacgttgtgaataggatcgtttgttcttgttagttctatctggcgcagctgatcacaagtgacatattcggaatttggttctggatgatacttcaaacagtcgccgtcagcggtttcatttacctcctctaatatttcaacccagattgtagcaattgcattgaaatggttcaatatgcagccgaatcctgtttttaataggcttgaaattcccagaatgtgtattttcttgattttaggatcatagaaacaagaaaagcaagcgagccacctcccaatgaaatagtttactgtcccatcaaagtccgtatcatctctggtaatagcatagcggtctacttctgatagacgcgaattttctgcaaccgttggtaaagacatatgatagttctttaatagctcgacaatactggcggggtttatgcaggcaattctagcaaccggctggagcaattgcccctgctggaaattggatagcttattctggagaaacgccgcgtcgaatatcgctttcaggataccgcatttgtagaaataatctattagattcaactccgaatctgtctcatctgccaaggtaagaatatccaaaatggacaagaaaatttcaaacgaatcatctcttaacttcaacaaatacgaagagagttgttcaaacgccgaactgaatacggagatggaaaaaaactgctccttcggtagaagtaggctatagcttttaactatctccagcagagttggcagtatttctgtttgatttgctatcgcatattgcaaaaatggcagcgaatcagtaagtctggggtccagttgcgctttcgttggatcgaaattctgcaacagagcgctccacagctcgaatccgtcttcatataagaggctataatgcagggaacttgggttgcacactgtctcgacaattgggattgctgcgccccatgcattgtaagaatatgcacccaacgagatagacaagtaccttaacaatctcaatagagcgtttgcgagaattgactgcgtttggtcgctactggcaaggtcccataagcctggaacaatttgcaggacctccatcaataacggattacttatggagtccttattttgaattattatgtcgctgagtgtattcaaaacgtatagcctggtttcggtatactgtactgaggaaagcactttcctcagaagtactacgacaaaatcatttaggtagggagcaaaactctctttctgaaagtcccagtcaccaaccatggtccgcagggcctggatcactgacagttggaccactttgtcatcatcctcattcaaaagctgtaaaaataacttatagcaattatctttgctttcggcagagcacttcacagtgcaccactcattcacgatcaaactgactctcctcctgattatccttagtctctctgctgaggtcgcgcctgtgccgacagcctccggaatgaaaacatttatcaataaatggtcaaagtccaccatatccgcgacagttaccgagctgagctggaacgcagcaaaaatagcatctttcttcaagaagtcatccaacgaggatgtcagctgggacccttcttgctctagcttcttcagcaaatatgtagcgagaaagtcgggtaggcagttcatgagatcctggaagaagttttccgcacagggtctaatctggtattcatagttgcttgtcatctgctcattcatccaatcctcagggtccaaggaccaatgatccagctccgctggcctgagtttcaagtaccagtctactaaaaggtccactagttgtgtgacaagcgcctcatttaagaactgggtattgatctttgctatagctgcattgacctcggctctgttggcctgcatcctgagtgagacagcacccttttgtcggatgaagttaattgtccgttttagaatcccaaatccgcgaatggagagctgctcccaaaaatcgccgttgacttcagcgttttcctggtatacatcggccgcccgatcagataggagttttgtaaacttggagaggacggtgcaacagcagggcagcaggataaagctcgacggagaagccgtgatgaagttgtagtatagttttccataacccttcacaaacttctcgtaggtgtcaaacatcttcagcgtgtcgtggttagagagcagcagatcaaagtgccggacagaaatatccataaattccacgacagactggtccctgtgggggatctcgtacacatcagaaatggcgcgccgcagtatcttcagcgccaggtacgacacctgcagactcgaaagctccgtgtcctcgaagctcgtcgaagaggtccactggttgaagttggtcatgtaaacgcgtacgagcagcgggaagagcaggggcatcttgctctgcatcgcgggcctgcaccgcgcgacgcgggccgaggccagcagcttcaccacctggttcaggcacaccaggacgttgtacgtgcgcacgttgttttgcagcgcgtcgtagtcgccaagcgccttctcaaagtactcgaacagatcgggccagtcgtgcgggtagtccgagcgcgcgatccgcgcgcacgcgtgcgcgttctggatgcacagctggttgttctgctcatccaccatctcaaacagccgcgcccgtatcgactgcttctcatccttcgagatcgcgttcacccgcgttgcccgccagtacttgtccagcccgttcttgaactggatgatcgccagccacctgatctgcagcgagcacgagaggtccaggtagatggactgcaaaaagaagtggtacccagcctgcacctcccatatcttcaattgctgctccgcttgcttctgtatctcgggctgcgcgccgcgcggggtgctggcacgctccagcgtctccactagcttctccttggtaagttcgagtgacatctgcccgactaaaactgcaaactatcgctcacgctcacgacaaatccttatctcttgaaggctcctcacacgcactagcaagcaacagcctcgcaagggctagtaattgataaacaatggtattcgccagctctgttttcccacgtaacagtggatagagatgcctagggctgttttttggttacaaatatatggtgtatggatgttatacaaccactgccggatggtatcgagcgatgggggagcactccaggtggctagtctttccacctatgcgcctcatcgctgccctcccacgttctttctatatagcctagctctctttttacctcttcgaccttttccgggtcgcccatggtcttcccaagatcatcagagatcttgatggcggggcgtccgttgacagtaagcagcttgaagacgatatttagtggctcgctcttggcgtcgggcgcagaatgtctgcggaagtcgtttgtaaagtttgtgccgattccaaaggaggctctcatgccgtgtgcgcgtgcgacctcggcgtactgcagggccttctccgggtttagggagtccgagtagcagatgaccttcgaaaagcggggatagtgcaggacgttgaggtagtggtgggcgaccttctcggtgaaaacggccgggtcgccagagtcctggcgcacgccgtcgtagacgtcggagtagggcgggcggaacatgggcaggaaggtatcggtgccgaaggtgtcggtgaggaccaggcccgcctgttcggagccgaaggtgttgagccagaagtccatggcgtttttgttggcgttgcggtagtcgtctgtcagggcggcaatgcccatgtaccactcgtgcgcgacggtgccgacgggcttgacgccgtactttttggcgaagtagacgttggaggtgccgatgaactgcgtgtcgccggtaccgctatctgccacggcctcggcgatgccctggagcacgaggtcctggacgagcagcgagcggcgccggcgcgtgccgaactccgagaagaccaggccgttgtccaacagcagccgcgttttgcgatacgcctgctcgacctggccgtcgagcacccagtctgtgtcgacaaacttgaagtacgcctccgagatgagcgccagcatgtgtatctcgtagaggatcgtgtctttccagagaccggtgacggtgatgttcaggtcatagcgctcctcgccctctcgctgctcgtgcaggagctgcacctgagtggcagggtccatgcggcactctggcgacgagatgtaatcgatgtactgcgcaggcaggaaaggcaaggtctctttaaggtatgccacctcctccgccgtgaagcgcagtgttgccagcttgctcacctggtcctcgagccacacaatagcagccttgttgaagctcaggccggcggatctattggtgtacttgtagacgacctcggtgtctgggaaattcacgtaaaccgccgcatgcattgtcagtttgtacatgtctgtgtccaacagcgacttaatcgcagcttcctcgctcgtcatgtctggatggtgtgcagtatattgaatagcgtatgatatatctagtagcgtctagaactggcctagccgcttgatcttgaggacgtacgttgaggtagcgatggtctcagcgttgtcagaccgaataagaaagaaattgtaaatttcggtgttacccggactaacgccagatggtcctgataaggagttgtcaggcgacgtggcgatgggcagtcgcgttggtaaaggagaccatgatcactgtacgtaggatggtggctctgtgaagttcgtagagtggatacattacatatatacgcttggcgctaattaatcgctataataacaaaaatccgtctggtcggcattcgataaattatctcgttgtcggatatgtgaatgtcgggcagtcagtcgtcaacgacgctgtacgcagctgaaaagctctcacagttgttgaagaagctgggacttcgaaaatcggctccgtcggcagtattggatccgctgctgtaggggttgccattgcgagagtcgaagagatagtgtgcatcgttgtacgcagcggcccgcgccgcggggggctcgtcatcaagcatgtctgtggatgcaatggacaaggtggagtcccagctgtatgacgagcggcactcctggaataatttctggggctcttcgtggtcgtttttcggcaggtacagggtccgcgccgagtcgaggcccactgggctgggcattagcggtatgtcatcttcttgaatgtcttgcagcttagcgtagcctgcttctctgccgtctgcttctcgtttgctccgcagcgtatcgtttgatggtcgcgaccgtctgaagccgccgaaaaaggtcgaaaatagtggaatcgccacttcgttgtagctaaagtacatcatttgccttgtcgtattgtcgaaataagattagagttctggtcgcagtaggttgtcgcccgacacccggatcacctcttgcgtccgtcgcgccatacttttatatttttacctgagcgagtttccgtcaccgccgggggaaaagcacatagtttcaatttaagtatttcctagatagttctttctaacgctagaggaacgcctgatttgtgatattcaacttctagaagaggtataaggctggtgaacaatacagttcgatacttactgtgcgattggaggcacgatgaaacggggtaaccaggatggaccgaacctggaaaaatttcttgtccgaagggctggttgcgacagtcgaatgctggacggctgacatccgtcgctgctctcagctatggctatgcattgttttcgaagacgtcgatccaataatagcagtgcattatatctatacaaacaggcggagcaccacgccctttatggatttctatgatataaccttcataacacgatcaaataaggtatctagtttaatgttatcaatgttttcaaacatgcttgtgaagctgttcatattgatgagcctgttaatctgctggccattaataaattccagcttgaggtcggcttcattctcatcaggagatggggtattttcagtgtgcttggacagatcgcgcaattgtttctcgaaatccgtcgaagaagctgataaagcatcgaacccgctgtccacgttcacctcctccatcatttcggagctagtcgtcgtgctaacgattcccagcttgcaatttgtgtcaatgaaaatgaaatcggtatcgttgttccaagaaatgcaggagatgtactcgtcgtgttcaaaagtacctagcctttctgaaaggtctggattgaaaatcaaaacgcgcgagcggtaagatgatgtgggatttccgtttgaatccttctcctgttgattcacaacaaatgctaccctgcctgttttttcatcgcatgataccaacctatgaaggtggcctggcttgtaggtgccgttgacgtacgggtaaacgtcaaagctgcctttgtattgcccggtcagaagattgaaaaactgcaacgttatttttgttacgacgatgagcgttacgtcgttaacaaagctcaaatattgtataggagcgtctaacgaaatcgttgataatcctctgctaccggcgctttcaaagaccttgaatagattaaaatcgatgatagagactttatcgtcaaaagcgtggaatagaagtgagccatcgcgtgaccaggcgaccgcaacgttgttactgaaatggttaaagttcgggagtaacatttttagcaggcaccagttgttctccttcttgtcgaagcaccagtacttcaggccgccgttgttatcagctgttatgcatccttgagagtcattgacggtaaatggggcgaccacaatgtctgtgactgggacactcatcccatgcggatttattattttagtctttagttgccattctccatcggattcacagctccaaaactttagaatgtggtgcacatctttagacgacagcaagccctcgggctgcgattcaacctcgtaggtcaccatccacaggccatccctggtgaactgaaccctatgtaccaccggatcctgtaggttcagctcatccctgaccttacccatagcattgttgataccagaggatatatattggtaagagacctgttcgtttttgtagaagtcgtaaatttgaactgccgagttgtgtgggaaatagagatgctttgtcaagggattaacagagaacgagcaagtaaaatcttgtcttttgctctttagaagcttcctcaaatgcttctttttggagctgtggatcttggagctcgaaatagaggtcttcgtgcttagcgcagacagtggctggacgacatcgctcaccgcagagtggaaaacgggaagaggaccgttgattgccagcctggagttaagatctgtaaagctcaaaatcagaaactggtagtccgtattagatgtgttctctgtcatctggagcgccaaggagaagtacttctcatctagagcgcaacagtccaaaattacaccattcagacgtggcaagaactgctggaggttggtagatagctgccagaaactcaccaccttttcccagccccccgatattagatacgtatcatccacactgaaagacatggccaatacggcgtcgatatgccacttcagcagtctcgagctaccgtcagagacgtttatcaaggttatcacgcccgaggcaaagcccacggcaacctgctggcctgcgttgtcgagagccatcgacgtcacaaaactggcattcgacgaagcagccaagttcgatacaggcagcggcagcgagtgctgcgcaccctcctccgtaagaggctcgaccaccagccgtttctttccctcggagtcccgcacaagcacagccaggtgtgcatcgttgctcgaccacgtggaaagcagcacctcctcaaacacccgcagctgctccagctggccggactggtaggcatatagcctgtatgtgtgtgtccccgaagaggcctcggcgatcgtcaggaccctgcacaccgcaccctgcgcgttctcgaagaccttcagcaccgcctcgccgtcgctgacaccgagcgtccactgcttgggctcgtccaccagcttgccccggtagttcaccaccaccgcgtgcccccggctcgagaacagcgtcagcttgtcgtcgtcgtgctccgcctccccggacgcgtcgcccagcgcgatgtgcaccaccgatgtcccatcgtcccgcccgaacacttcgcccagcacagcgctgttcccgtacttcactgtcttcacgcactgtcgcgtctcgatcgcatatatcttcagctggttgttgaacggtatgatgtagttctccctgtcatgcgtcagcctggtcaccgtcttctgcgaactggagcggttgctgaccctaggaatctgcggtctcccccccgaaacaactgagagcttgtacttagggtgaacagtattgctgaccatatttagcacctccaattgacgcactgagctatgcctcgcctctttcactgacagctggtccactactatgtatcgctacagcccgtaactagagctcatcgcacctaaaatttttcaagcaaaaaagaaacgacgctgcttctgtacggaattttccaagtgctgttgtacgaagggcgtaaaattttaagagtttgagccttaggccatcgccacgcctctaccaacgttcacgctaaagtgcactgagaagagtgagcagcaagccatgatcgtgcctgttcggtgtttctcttgtggaaaggttgtgggtgacaaatgggaggcgtacctgaacatgcttcaggaagaggagcttgacgagggtacggctctgtcccggttgggcctgaagagatactgctgcagaagaatgatcctgacgcatgttgacctgatcgagaagttcctgcggtacaacccacttgaaaagcgggattgagtgcggatatgaagcattgtgtactatgtacttcgctgcagctgcagcgcgagcctgtatattaataaacgcgaacaataaaacgctgggaagaagggctggcggggcggtatgtacagagacgagctaagggtggctcttgccggccaggtttttgtagctctttctaaatacaaggatggagtcgatcttctcgagggcgagctccagcagctccttccgcttctgcagctcgatgtgcctcgagatgcgcgggtcttccttggcgaacatctcgacctgctcctcgctgagggcggaaagcttcttatcgagctcgatggggaagttgtagaagaagtcgctgagaagctccacgttgaggaacagaacagccgtcgaggtgagcttgtcgctgacagcgttcaggaagacctccgggcacttgtccttctcggcagtagagttgcatttgttcttgagcattttaagtctgaaggagaggagcgacgctctgtcctggagcgagagggcctccgagccacgttcaagcagcatggtggagaatcccagagactccttgcgcgtcgggtctgtctttatgtactgcatcacttgctgcagtttgcgtgtccccacagagttctttatcatctggtaacgttcgttacactgtctgagctcttcctggacgagggcgacggagtggtcgcgcgcgatggaccaatcgcggtcctccaggtcaatttcatacttgaacggcttgatgcagttttccacctggtcggcagtagagtagtacttagcattcagcacgttcaccgcagtgttcgtgatcagttcttttattagttcgtgggctttcaggggggtcattgcaaggacgttttccagctccttcagaattgcgttagtaactagggtagttgagagccgaccaattcccaatttggttaggctagaagaagccaactcgagttttttatgccaatataacgccgacgattcgtcgtcgaggttcttggagagctcctggagattatcgtccttccagtaccgcgaggctagcaaatcgagcacgcgttgatccaaatctgcactgagcatcgacttcaattctgacctgcggaacttctcctggaactcctttattgccaacttcagaacatccacgttgcttagcaagtacgacttgggagtaagctgtctgtcgttaaattccaccttgaataggtaagaggtgtcatcgagctcctgctgtattacgcgcgatgtaggctccagcgcattgctcatcgagacttccaagatcttgatcaacttctctcttaacttcttagtcgtaacttggcaggatgcaaactcttgtctgtgctccctgaagtagtttttctcaaactgaatggtctcgagcctttcagtctcttgatccttcgccttcgaaccctttcctccaaaaattacacctttcccagcggactggtcgaatagtctatgagtctttaccggtcccttggtgatcacgccgacgtaacccatcttcaaggggtattttttgttcattaaaagatcacgggctgctgatggttccacaaggtcaagctttgtgataacgccaatggtcctcaatccctggggatcggccagtttactggccctgagcgcagcactgttcgcaaggtccacatcagcagcagaaatcgcaagtatgatgttcggctctgccaagtacttctggcacacattacgaatcttggacttcaactccataggctggtccgccgcctcgacctgaatgtaacccggtaggtcaaccaacgataggtctggcacacgaggagacttgatggtcagctggatcggatcctccgaaatggcttcgtgtgtaggcaccgctaagttcagttccatcaggattcgcttcacctctctaaaatctttcaagttgtagatccggtgagtcgggaaatcggcggtcgtctcacttccactcggagtattcaccagggtcagctcaattggacgtctagtcaccatgttggagcccttaggcagaaagtcccgcccaacaatagactccaggacggacgatttaccactggattgcgatcccacaacaacaatcgagggcaaggtgacaccgggggtattggtatccacgcgattcagaatcgaacgaatctctatcatctgtttcgtcaggttcaaaatttcatcgccagtgtgatcttcgtcctcttcttcttcgtcgtcctcgtcctctgcagcggcctgctcctcttccgaaagcgtcgcaagcagggtcgctgcggccacgctgtcgcccaccgggccaccgtcgcggcctccctgcccaccatctccgttttcactgccacctgcgtccagccactcgcccaagcggtctctgactccgctgctaaagtcgcgcaactgcgagagcttgtccgacgtgaagctgctggcctcctcaaccttgtatgcgatgtagctcccgactgccgccgcgccgccgccaatgtacgctggcactttgatcatgcgtacagccagcttcggaatgaaagaaatgcctctttgcgacatcaccatccctgggaatcccccgctccggagcatcggacggctgcctgctggaaggggaacataaaatcgcagctgcgcccctcccacgcgccctgctggccgcagcaaaccgccatgcagagcacggcccgcgcagaaacacaaatgcgcctgtcctgtccgtaccatcggttgctgtctggcgctggtgatgcttccggtggcgtgtgttgcgctaagtaccctttttacacgcacgtgactataaagcacgtgaccgacgtacgcagcgatctgcgcaactacggcgctgcgccgacccgggcaagacaagacgtccaggccccgacgcgatgctagcctgacctcagccctcgtacccgacgtcgagacaatgggatcctgcccgccaactccggcattgcttaatcaacgacagatcaatgcgcagccgtgcgggaaacggcggaaccgtgcggctactactccaacaccgcaccacgtagttaagtgcagtagcgtgtggcagcgggagttaagcgtccgccgttgccgatctgcgcatccgttgagccgtgccggccggccagggcacacggtcggctgctgaaatgaattatgcatttccccctgccattactgaacgatgtgagcctgggcacagacgcgccacagacgccgcatgtgtaccctgtgaacggcgcaggcctcggccctgtggcaggaatgcgaaattcaacgtagatgaggggcgtgatctcccacgtgactacgagctcagccccggtggtcacgtgatgagtcatacgttacccggatggtttttctttttgcagctgcggcctattggcagatacggtcgtgttatccaacagaaggtgcggtagtgcatgataatgccaccgtgctctagccattggtaagaggtatccaaggttttagttacgcgtatcaccactccagtatctttggcggcgagatgatagcggttgatgctaagcaggagcctactaggaagcttgacggacagggagatgcggtcgaggcgcaactgctcaacgacatactgttttcaacgttgggctgcacagctgaagggggaaaggaaaacgatccggacatgacgggctacaaggatgccggggggttccgtgtgggcgatctagaggagcctcggggcatggagagcgaggatgagctcttcaatgcgttcatcaacacgtgcgactttcctaaggagccctcggggtctcactcagggtcacagtcagggcccagcggtgggccgaacaccctcaacaagcataacattatgctggccgagatggcgctcgagggcagcacgctgcgccagccgcccttcgggacacacatggcgctctccagcagtggggaggcggacgccttgagtgtttcgccgtctgcggggaccaaagactggtcagccttgtctgtttccgcaaaggaggttgcggggccatcttcggagtcgtactatcagtactgcgagcggctcttgaaccaggcgctcagttttgggcgcacggagccgatcaggacgacatacctcaacccggcggacttcattgacgttgatccgagcgcattgccgtaccgtttgaccgtttcggatataccgaccagatcgcgtgttgagacgcaaataaagcttgatctctcgatctccccgcctcccagacagtttctcattcacctgcccagcgactgcataacgaaacagaagctgtatttgagccaggacgaacatacgtatccgccggaggtgcgcagtgaactgctatatctggaggcgtttttactctgctcctccaacaatcgcgcaacatatgtctgcagtcgctgcgtgaaaagagagcagaggcgggccgcaagacggaagtctggtttgagtgataatctgatctggtgtaacaatggaaataggagagctgttgtcttcaatagtaagcaagtgttcttactcaaacaaagcgagaactctctgacatcaaaatcattttcactttccaccagaattgtctgctactgcagacaccacaaggagccagagggtttcaagatgatgttcattctgcgggatgcctgtggcaacgtattggggaaggatgtgactacacctattatgatcatggacaagaaatcaaacaagagggggggagagccattgaaggaaggtgctgaatcaacctcagcgactgacctgtcatctctcatgaagactgctggggagtgtagcacggaaccaacgagtgacttcagtggagcagactcgcagccttgtagcgtggggcagggaaacattaacatgcagctgatgaatcatgcacctatactgtctccaacctcacttcctgatgatggtgccgaggctcaccatattttggaccccaaagcccagcaaccatcacagcaacagcaatatatccagggcttaccattctcgagttcatctgccgcggctgctcagaggaccagcggctataaacgaaagcggacgtggcatgaaagcccctttcccattttggatgctggaccaaggccgtcacttggaactggggaccgcaagtattcctaccctagcgcttcgtccgtcacccctcttcagagtatgccaaccattcagaattcgttagttgtccctcaccagacagcaccaaaaatcaacaaaccgttcatccatcgtgtgataccaaaccaagggccaattaaaggtggtgtagagattactttgctgggatcgaacttcaaacccggtgacatagtaaaattcggcgctaacagagccctctccactcaatgttggagcgactcgacgattgttacctatctgcctcctgcacctactgctggtaaagttctggtcactgtcacaagccaagatgatgtagaaggcgaattactagcatcgatgccgcaaagttctgccttcttcacttacgttgatgacactgacagacagctaatcgaattagcgctgcaaatagtcgggctaaaaatgaacggcaagttggaggatgcgagaaacattgcaaagcggattgtcggtaatgatgggaactcttcagctggatcttcccctggcaatctgtcttcaaacggaccagcaaatcagtttagcaatcaactctactactctgacgaagccttgctgataaaggttattaaactactgactccgagctccaacatatccatgtgtacggaggagggacataccttgcttcatctggcctgcctaaagggttactaccagctagtatccctattggtcaagaaaggcgctcacgttgaagtaactgacaggttcggctttaccccactacattttgcatgcgtcaacggcgataccaggataacgcgccttctaatccagtgcaaagcgcaagtaagcgcactcgcattgaatggcgtgactccatctgatgtctttacaacaaatcatcgtcgggatgacaggatgtacaagctctatttcgatgagatgatggacgtgctggatgcagcggtcaacagttcatacgcagacgttcagcggaagatgtcggtgtcaagtttacagtcaagtgaatttgaagaggagttcgatatcctagataatgggtttcgagtccatgtatccaaattggcttatgatacatgtttgtccgcttcagaactggagtcaagcaattacgaggaggatggcgacgatagcctcctgttcaatgacgaagcctcagaacatgcagatgcgtctgtggaatctggggaagccaaaatctacgaaaatcagaaacaaagtatggacggtctcgttcccgaggcagatgctcagccagaaccgcgcgcagagtctctgagccgccataggtccgaaactgatgccagcagctcgactcagcaggagggctccctctggaatagggtgtttagtgcgttcaacgacagccctcccaagtacgaggacctattcccctgcggtagcgacccaagtgccacagactcgaaactacggactcacatttcatccgaggaagaccctagcagagtgtccgccacactgtccatggatgaatcccagatctcatcagaggatgaagaagaagcgttgcaggcgcggttcaaccgtttcttccaacaacgcaagaacttcaggaatgataaaatgctactgatattctggattccgttaatgatcgtgctcttatcgtgcttcctcatcaaccgcttcggccaagatggcaactctgtccatcatttgtcggaaaaggcctcgatgtttgtgaggatgggccttgttaagctcatgctcgggaacgagcgcatgaagaccatttttagggaatccttaaacaacttccagagtagaagaatgcttggggatgttgtagcaatctgataccttatcgtgatttttacactttgctctttacaaccacctttgcttatgcttcaatgtatatatacaaatgacaatttatgttgaatacaactttatctgcttttgcctcactactctcactctaatatgtaatgaatgtatgtgctcttcggacgaggaatcactcactttctttttttctgactgtacagaaaattttcctgcgatgagctttgcacagtatcgactgtaatctacagcttgaatctaagctcgaacgttctacaattgcaccattctagatggcgggtaatcagtttagaattgttgtgggatcatatgaacacaatctactctgtctgtcgcttaacttggagctggagacaccgttgttcaccccaatttttcactttcaggctcatgcgctaagtgtcaagacgttggacatctcgaggaggtatcttgtttctgggtccaacgatgagcacatcagaatctacgatcttcagaaacggaaggagctgggtacgttgctgaaccataatgggtcgatcacaagcttgaggttctccagggctactacagacaaggacggtaagcagcaaggcaacaagtggctcctatctgcatctgaggaccacacaataatcatctggagagtgaaggattgggaaaactttggcaagctcaagggtcataacgcgagaatcaacgacctggacattcatccgtcgaacagggtggctgtgagcgtcagcgaggaccacagcatccgcctctggaatctgatgactgccaagaaggcggctgtcttgaagctgaagaagtacaatcaaaacgggaagtacgtgagatggtgcgggaaggatgctggcttttttgcggtcgggttggtgacgaaggtgttgatatacaacgccgcaactgccaaggtacaccatgagatcagcacgggaaacaagacgatcatgcatatggaggttgagcatatcgatgaaaaggagtacatctgtgttggactcagcactggtagcattcagttctacgatgccgagaagctatacgaggagagcgaagatcagaaggcggcggagcctgcattttccctgcagggccataccaatcgtgtgaaggactttagattctacaaaaacagtatggggcactaccttgtgagcgctggatctgacggaaagattgttgtatgggacattgtgaagcaggagcagcttgctgtgtacgactgcggcgaaaggctcaactgcctggcagtgtgcgacgagagcgtggagaaatatgacaccgtcctgaagagaaccgctgctacagcggacatcgaggaccagagcgaggtggaggaggacgcagaagaactgaagcagataatgctcgggaagcagaagcagaagcagaagaagaagaaggccaagaaggccaagaagacgtcccgggtctcggtagaactagagtaggcatttagtatgtaggtatatttccaaatcatatgtagccatgggcgcccgtttataacctcgcctcttttgacagccgctcgcagtgctgttggaagagctccttggccctgagccatacaggcgccgtgtccctctctggcagctgcaacagcgatggcagcaggtcagacgcaaacgcctccgaggcttcccgaggcaggagcgagggcaggtggtctatggaaatgacggacagcttgggaccctgcgaggtcggaacaaccacggtggggctgctgaaaacagtggcaacgttatacaccggcacggggttgtgtggattcgtggtgtctgccgacacgtcgacaatcgtcctcagtttgcggtcgggccggtccagcagctccatgttaataaacggcgcaatgggctgcgacagatagatacagttgatgaatatgtccgcagctgcaatctccggaaacggccccccgcgtgcggtttccgcgatgtcccagcgtatgatatgcttgtcgtgcagcccacactggcgcagcagctccaccgcgccgctgccgcagcgacccagcgcgccaatcaccagcacgcgcggcttgcgcgcgcccttcttgtacgcctcctcgcacgccgccgccacctcgctcacgagcgcctgctcgttctcgtacggcgccacggccggcaggtcctctgcatccgtgtgcgtctgcttccacgcccagtcgcgcagcccgagcgccgcgccggcaaaccccgcgtagtacccgaacgcggccacccgccgtccccggtcgtcctgcaggaactccaagtcgtacagcagtccgccgccgctctggaaccgccccagaacctcccgccacccggattggttcttgtagcagtgcgcaaactggatgtgcgtgtgctccagcggaaacgtgtcctcttcaggcagctccttgagccccacgatgatgcgctcgcgcggcgccccgcgccagctccccgtcgccacgacctccgcgccggccgccgcgtactccgcagcctcgaacaccgactgcgcgctctcctccacatatatcttgaacccgtgggacaccagtgtgcgcacagtcgtcggcgtcagcgctgcccgcgcttccatgggcttggtctccgctcgtaggtgcaatattgctgacatcgtctctgctcgcttcttgaagttcctccagcctatacctgtgccgtcagacccgcaatttatatgctctctgagtccgcaatgtctatagctgccacttgtcaagactcacttgactcatcttgcgcgctgacaccctaaatccctatggaattattccgccggcctcgagaacttgatgcaattttatacgaaggttcagtggccgggtaacgttttggtgatgtttcgaatctctggagctttaaaacgtttgtggaagacagaagtgtggcggaagcacaaacattgagtcgcagatagaagggttattccagtgaggtctcgaggagagctaggagatgtctacaggtaatactccatcgcaacatgaatcgactttggcgatatcgccgtttgtgacgaaccggggcagatcgcagcaggagcagcgtcgagtgatgatgcctagcacgggcgaagacagtctggggccatcagggatggcagacagtgggacacacacgccgcgcaacagcgtcgtgcacagcccgctggtgcagaagacgcagctgggtacgccgtacatggcggagggtgcggcgacgggcgggctactggggtcgatgtccaaaaccgcgctgttcgggccggcggtgccgtcgacgctgcgcaaggtgagcaacgtgcgggagtaccggcggccgggggacagcgacggcgagggcggggaggggtacggcgtggacttggcggagctgtccgcggcggagaagctccggctttggcggcacgacgcgcttatgcagcaccactaccgtacggccgagtatatcggcgacaaggtgtactcgatgacgcgggaccccaacgacgcgttctggcttgcgcaggtgtactacaacatggggcagtacatccgcgcggtggagttgctttcgcgcgacgggctagacgcatccagcgtgatgtgtcgatacctcacggcgctgtgtcttgtgaagatggagaagtacgacgacgcgctagacattgtcggcgaggtgaatccgttcaaggacgactctgcggagcatgtgcgcaacctcgacggcggaatcaagttggagtcgtcgctttgctacttgcggggcgagatctattcggcacagaacaaccttgatctggcaaaggaatgcttcaaggaggctgtgtgtgtggacgtgaagaatttcgaagccttcgaccgcctaatatccaacaatatgctcacgcccgatgaggagacggagtttatcgccaggttggacttcaccgacttggacgacaaccaggagttgatacggtgtctctacagcacgaagctatcgaagtacggcgatctcacgaagttgaaggcggcgcatcggttcttgctggacgaatatcatttggaggacaacaaggacgtccaaaccacggaaatcgagctactcatattccagggcaagtacctggagtgcttggagctctgcgaaaaggtgttggagcaggacgagttcaactttgacgtccttccgacgtacgtgcagtgtctatacgaactcggaggcaaaaataagctcttcttggtgtcacacaagttggcagagagttttccaaaaagctcggttacatggtttgcggtaggcacctactacttctccatcaacaacatcaccgaagcccggaagtatttttcaaaagcatccgtcctagatccaaacttcggttacgcatggttggggtttgcccacacctacgctgtagagggcgagcatgagcaggccttatccgcgtactctacggctgcacgtttcttcccgggaacgcacttaccgcatttgtacttggggatgcagtactctcgtatggacacgttgaccctcgctgaggagtactttatgatggcgtacgatatatgtccgaccgacccgctcctcttgaacgaacttggtgttgtctatttcaagaagatggactatccgagggcgaagaagttcttcaagcgtgcctgcgaggcaatcaatatgcagcaatcggacgcctcgtctgttgcaatatcgacgtacctaaatctagggcacacataccgaaaacttgacgaggatgagcgggctttgcattgctttaaaacagttttagagcgctggaaaccgtctgccaacgtgtggtgcgctctggcgacggtttatttaaaaatgaaaaaactacagaaggccattgacgccttgcattcggtgctggctatggagcccaaccaccagacgggtcagcagttgctaaaaatagcattggacgttaacgttcacctgccgttggacaacggtcatccgttgatggttagcgccaaaattagcgaaaatatgaagatgagctccaacgataaaaagcgctccctggggaacatcgatccagtggtaatagcaaagcgcttgaagcagggcagtacgtcatctgatgagggtgattccatggatatagagtagttggatatggtgcagctagagcatttaggttacgttaatagaagccacatacataattgaaacatatggttctgtctgctatgtgcagatgatgcaaatacgcgttggcccgcgcggttacggccactacttcggcgcgccggcctctgtgctggcctgcccgccgctgtcgccagcacgcttggacgcagtccgcttgcgcggcatgcgcgggcgcgggcgcttgcgcccggcagcttcgggtgcggctttgggggtggtttgggggagctcgggggcgcttttgtccttcttgctggcgcccttctgcttggatttctttcgtttcgaagaaggaccactggggtgccccgcatcacccccattcacttcggcaccgctggacgggcggggctttctcaccggctcgaccggcgacttgcccaccttcaacgtgcccacgttcgacgtgcccctcagcaatatgatggattccaggtcctttttgatgtattcgtcgtttctggtgtccttcctgggtgtcttcaggttttgtatgcgcaaagacgagagccgcttcggcggcctggaatagctactggggacttgttgcctcgcccgcagcaccttgtgacccttgtcggggctgccacaggcctcgtcggttaacaagaactcgagtagtcttgaattttcgatatccatggtatcgggcgagttactggcagtgctaaacaaaatcggcacgctctatcttttaagtacaactacacacgtccaatggaacaaccttctagtgaggcccgagtctctccttgacggcagcctccacctgcttgtagacctcctcaacaggctggtcgcagctgagccggacgaccttgtcctgctgggcgaagtgctccaccaccggcatgctcgtctcgacgtaggtgcggaagcgcttcttgatggactcgatgttgtcgtcgctgcggccgctcgtctggccgcgcgtcagcaggcgctccagcatcacgcgctccgggcagtcgaagaacagcacgaacttgctgggcaccacggttttctcgaaggtgaaggcctgatccatcttgcgcgggaagccgtcgaccaggaacttgcgccggccagcgcggtagtgctcctcgatcgcgcggcgcagcagcgccacggtcacctcctgcggcacgatcagtccctccttgatgtgatgcttgatcagctcgccgtactgcgagcccggccggttctgctcgtcgcgcagcaggtcgcccgcgccgacgtgcacaaattgcatgcgttcgaccaggcgcgagcactgcgtgcccttgccggagcccggcccgcctagcacgaacactacggacgcgtccgcgggcagcggccgcgcggactcgtcctcggcctcccgcagctcccgcggcggcgccttctggtacataatcgagtacagcgtggtccccgccgccagcgcgccgagcagcacgaccagcttgccgcgcccgccacgcggcttcggcgatccgccggccgcgggcgccgagtaaggcctacagctcgcagatctcgccagcgctggcatccgcagcgccgcaggcgccgcgcgcgcgcgcgcggccgcggccactgcgccacaatgctgtcccatagccctcaacatcccaactagctagtcaccttgtgcaatcggtctaccgatggtgtgtgcggcggggacaaagccgtggtgaaacggacacttttcaaaatgggctgatctgcagcagtacacgaccgatgagctgcgcgcacggcgacagcagtcgcggttcggcgcctggctgcgcatagggaacttacgtagagtatagaagggccgtctacttggcgtaggcagcgaggatgtcgtcgttgtagcggaggtatttgccgttcgcgcagtccgggatgcctctcagcgccaggttggcgaagatggtggccgggatctgcgggtccagcagctcgctgttcttcttgagctccgtgaagcggcgcagtgcctccggcgccatgcgatggccgaacttgtcgcggatgtcgttctgcatctgcgtgtcgaccacgcccggcgccacggcgaccgcgcgcaccgcaggctcttccgcggccagcgtcatcgcaaagtggttcagcgcggccttcgacgagccgtacgcgccccacgcggactgtctccgagttagtagctgcccctgccctgctctgcgtcgtacatacatatgccttcgtgctcgcgcccgagctcacgaacaccacactgccgcccgccttcttgagcaacggcagcgcccggcccaccaggcccaccacgctgaagaagttcacctcgtacagccgccgccacgccgccacgtcgatgtggttgacgtcctgcacgggctccagcacccctgcgttcgccaccaccgcgtctatgcgcccgtacgccgtcgctcgcgccaccagcgcgtcctgcgcgtcctcggacgccacgtcccccaccacgtactcgaactgctcgccgtacgttgctctcagctcctgcagcgccgcctcggaccgcgccacacccagcaccacagtgtccggctgcctgcacaccttctccaccactgagcgccctatcccccgagataccccggtcacaataatcaatctaggcatcttacgttccggaaaccgctgctacgagtgctggacgtccccctgcgacagttggtgaatctcgagcgattagcgttttcaccaacatcgcacgagaagcaaaaagcagggcacagacagctaccggcaagacggagagcgcaagagaccacgaggcgtaaggtccgcgcataggctccatgatgatgaacaagtccaagaccgactgggccaaagacacgccctgcaaaaacatcacgatatatgggtactgcaagtacgaaaacgatggctgcatcttcaaccacgggaagccgttgtcgacgtcgtcgaacaccgggggcgcggcggcggggtctgcggaggactccgcggcgtccgggggcgtgacggtaggcaacacgggcaagtcgacgttcaatgccaagacggcgacgagcttcacgccgtcggtggccatccccgacttcaacaacatcccgagcttcacgccggagcgcatagtgtcgtcaccggcgggagacggggcgacggcgttcacaccgagcttcaacccctacgggtcggacagcttcaatccgtcggcgaatgtgtcggggccggggtctgcggtgttcgccgcggcgtccggcaacgcgggcgcgtcggcgacagcggcgccgcggtcgcagtcggtgcacgtcgggacgggcggctacctgccgctggctggcacggcgttccccacggtgtacccgccttcgcactcgatcctgcagtaccacctgtacgcgccggacccgccgccgcacctgcaggtgccgttgaaggcgaacgagcggacgcctgaaacgctgttcatcccgaacaacctgcgggagcacctgctgaagcggaacctgtctgcgctgcaggtgtttccgtcggacgggaacctgcccgacatcgtgggcgactacttcgggctggtgccgctggagttccacaaccggcagaccgggaagggccgctacctggggcaccaaaactctctgtacaaggtgttctctaacttcgacgggaaggtgtacatcatccggcgcatccacgatgtgaagacgaccgacgttgggcagatttcgctgccgttccgcaagtggcagaaggtgagctgtcccaacgtcgtgaaggtgaaggacgccttcaccacgctcgcgttcggcgactcgtcgctctgcgtggtgcacgactactacccccagtcgaactctctgtacgagacacacgttgccaattatactgtcgtgccggttacccagaagtacttgtggagctatctcgtgcagctctcgaacgcgcttaacgaggtccaccgccacggcttgtcgatgaacaacataagcctggacaaggtcatagtcaccggcgaccccgggcgcatcaaggtcggggactccgccgtgcacgacatcctggcgttcgacgagggccgggacatcgccaaggaacagcaggccgactacagcgctgtcggcgcgctgctcatggacctagcccagcgcatgctgggcacgagggaccagccgctggatagcatggacatcgacccgctgttcaagcgggtgctggcgtaccttttgtcggacgagaagaagacgattgcggagttcaccgccctgttcagccacaagatgctagacataatcagttcgtcgcagacctactcggagtacatcgagcagcacttgtcgcgggagttagagaatggcaggctcttcaggctcatgtgcaagctaaatttcatctttggtaggatggaatccagcatggacatccactggtctgaggcgggggacaagttccccatcattctgttctacgattacgtgttccaccaggtggacgagaacggcaaatccgtgatggacctcacccacgtactccggtgcctgaacaaactcgacaccggcgtatctgaaaagataatcttggtgacaccggacgagatgaactgcattatcattagctacaaggagctgaaggattctatcgactcgacatttagatcaatgacacaatagttacaatatgcttgtaaattatagacaaaaatgacgatgctcgtagtggactccgtctcgatagccacacagtgtgtgcatgttgtgaaaaatatgcgcaagcccggaatcgaaccgggggcccatcgatggcaacgatggattttaccactaaaccacttgcgcttgttgttgagaatcttgcatgttgtcacatcacattcgatacgtagcaatatgtcgttgtatacgtagcggatcatgctggggcatatctgaatgctcttgaacaacggactagattaatggagccttgcactcagaggcttgggcaggatgcagcttatgcgggagcggctgttggagctttacaataccaagcaatatgtggtgctgcccccagatgagacagtaaaactgcagcgagaggtgacggcgagcctgaactcagcagatccaggactcaacgacgttgaccgcatggccctaatggagatgaacttctatttgttggtgtacattggcgaagaaatagaagcagacgtgctctaccgcacacttgttggacgtataggtgagaactcgccccggatgcacctcatgaaggctacgttactgcaggttacagaaggtgatcccgctgccgcgaagtacctgaagaacctgcttgaaaagcagcttgaatacgatacagattccgtggattacctgcaggtgggcaagaagctaattgcgctggaacggcccgcgttgtccaccgagctgtggatgaaaaagctgctgtcgctgctagagaagtttccactggacgccgaactatggtggacccttgccatggaatactacaagctggggcagtttgaccaggccatttactgctttgaagaagttttgttaatctcgccgttggcgtactctgcgtttgcacaactggcggaggtgctttactgtaaagctatgcgcgaaaagcccgtgtctacggatgtgctgcaagaggcccttgaaaatgcgctgcgggcggtcgaactctcctcgaactgcctgaaggggtggtcctttgtcgggaagatcagctcggtactggagaaaccaaggctactgtcccttgccttgacgaagttacgcgaaatcgaaagcagcagcaacaagcaacatagcaagaccgctaaatacattctcaagtcattggaataagctctaaaactaccgatacgtatatttactgcgttaacgtttatatacatatatctaggcgtgcgtatgggtgttgtacgtgtacatctaaccaaataactccactatagctgtagtacatggcattcccttgtaagcaacttcaggttctggactacccaattgctgtcccgcatcccagccttggggtcgtggccctgtgttgacctcaatttagcgaagaccgacttgtagtcgctctcatactgcttgaattcgcgaatgacgcggttagagtcgaactcaacatacacgcgcgtatcgactatcctgaagaggacatcgtccacacgcaggaagaaacgactcaaaatcagcatacactcgttcatcactctcaccttaacattcagaatgctaatgccattgtccgctagttcgtcctcaaataaaatcatgtcgtcgtagaaaagaatggggtccggcctcgaaagcttcgccagaggcagctccacgctgtcgtctctgaccatcgccctgccatctatggtgccctggtagagcgtcgtgtacgtccagtcgtactggtgggatatgtttagggaggtatcctccagctcctggctttccttctgcttctctcgtttgctgtggatccatttgtgcgcatacgagactcgaatcccgcaatccgtcagctccacctgcctgagagcatccagcgcgttgaactcgagagcccagttttgtttcttattctcgacgcgtacaaaactgttgccgaatatcatctcgggcagcgttaacccggccagaagcgcgtcccactcgtccaattcctgcgaattcaggatcggcttcttgcgcgtagacaccgtccagtctaggatggagatcgagggcgtgtcctcgagcggcagcgtcgccttgggtgccgggattatgacagacccgcactgcgcgcacggcgggttgttgggattgttgcacctgtgtcgaccatccactactgctgcctcgtgcctttccacctctggccttctcgccgtgcttgccgtgcttgccgtgcttgccgtgcttgccgtgcttgccgtgcttctcgcatcctttggtaacgcaaaagacggcattgaagggccctcagtcgcggtctttgtcacagtctccctcgccgacggtgggcgccgcgcctgtaccgtcttgtagtgcaactcacgtgcaccattgacctcaatagcgcgtatacctcggccctgatcggtacgtttcattcctattgcgcgccctgctagattatctgcaggggtgtacaactcatcaaggctcagctgagcaagaattaagatttgagcgagtaaaacgtcggaagggataataaagaaatagcagatgcccaaccagcaagagttggctcaaactacacaggaagcaggagaatgaagctacatagacaaaaggtgctaagtattgtggccgctgctgccattgttggcctgtggtacatgttttttggtcagcagctctcgaaccgagaaacatacgacccagatgtcgtcccgcagcaggagggtaggaccccggcagccgtgagggctgcagcggacaagaatcaggcgcccatgataaagggtagcatcatgccaggaatgccagaccccaccgcgaagcaggagctgggcagggcgacgtggaagctgttccacacgatgcttgcgcggttcccagatgagccatcggagcaggagcgggaaaaattgcataccttcctacacctgttggcagagctgtacccatgtggcgagtgctctgtgcattttgtgagctggttgaagaagctgcctccgcagacgtccagcaggtctgccgcggccacgtgggggtgctcgattcacaacaaggtaaacctgtacctaggtaagcccgcatacgattgctcgaagatactcgaggactacgactgcggctgcggcgacgacgcggcggcgggcagtctgaaggtctccgtgcacacagagcggccgcagggcggatagaggctgtagtgcggtcttcggcgttccctcctaaagtatattgacactagcctatgcaagtctacataatgcagcaacaggaaccttcgtggccacctcggggtcgcgcctgcttggcagacgcacggaaatggttctcgcccggcttcatatatccccagacctctggcacggcgtagtctttgttcgtggacgtgtagtctatgatgctcaggcatgcattggatgcggtaatcctctcgcgggccagctccttcttcagcttgttattcagttcctcggtccgcttcagcttcaagtactgtatcttgggggggagccgctgctccgccatcgttctgaatcgctttgtttgagcgaatgtctcgagcaccttctgagcgccccgtcgtctatataaatgctgcgtgcagcccgtggccatgtagccatgttaatctttacatcaagcccgcaggcaccaggacaatgcacgattagcggttcctcggtccgcccctgtccgggctgccggccacgggcgccggcccggacatgtgttacccggcctataatgcactatagatgcacatcgtcttcggcaaaacagttttccccacagcaccacccaccaccaccgcaatggaacatccctctttcactctcgccgcgctcaccgtcatcggtggctcgatgggctactggcgtaaagggtctgtgccctcgctggctgcaggtctcgtttttggtagcacctacgctgtagcagggtacttgctccggaagaacgcagagggcggcctcgagctcgcccttggcgcgagctccgtgatgctgttgaccggcctcatcagaggcgtgccatcgcgtttcgccaaacccgtcccgctggtgctcaccgccctcggcggcttcggcacagcctactactacgggaagtaccgcgagttctacccatagtttagctatctcgtttatctaaatagcaacaagcaaaatacagccccccgtaggccgcgcaagcaaaaaataacgacatcagcaggattcgaacctgcgcgggcagagcccaagagatccctcaatttagttcgagtctcacgccttaacctctcggccataatgtcatataccacgtagctgggcgccagtggatgaagtcgccatgtcgcaggcacgtgatctgcgcgggaacgaaaccactgatgagctgcgtgtgcagttgcacgatacccgaactcagcagtgattgtaattaataaaaggataccgacataatactagcttagttagaataatccgattacagcatgtcccatgggtcacaataaaaatgaggctataccttatttttgatagtgttttggcgtcgcattaatgtatctggttgcgaaaatatataaagggtcttggtcccccctatagtcagctgcggcggtctcggaaccatcgactcaaaatcacgatttagaacaaacaaaaatgtcagaagaacatgcgaaagaggtgggagagcctggcgtttgcaaatgctgcgaaggagctgctgctccggattgcaactgcaaatgcgacagctgtggatgtttgtgctgcaaggacaaatgatccgcggcacgcaatttatgagtaagtagagctacgtatcacaaccaaatagcagcaatgctatccaggtaagtaacgagagctacatactatgttacaaatacatttccggttacacgactgaattgtaatgaaccgttaccagttttcagtaggaacgtgctggcggtatctactggggttgcggcatcacgctttagtagcaaccgatgcgcgtctccagcgggctcaaaaacggttgcggctaccaacagatagcggaaccaaggcgcaaagttcttggcatggcctatattgtctggtcacccgatagacggtggatcggacatgtgcatgaggtgaaatagggtattcatttataaatataaatcatgtggcaatctacataacacctgacaggcgggctgccgtactcaataccaagggctcaaatgggattcaatctggatggagcccttgttcagagcatattatgcgatgccgggacgccatcgccatcgatatcatgagactaggcgaacagctcgatgacacaaccagcatgtgaaacagcagatgcgtacggcaaacatgcctgactcgaagacacaaatcacgacagatccccgggcggcctccaaccactgcggctggccagtgacgttcatgtgacagagccagccaacgtctgtagagacggcattcccaccgcactggcatgtgccatccgtttgcacccgtgcaccaggcacggagcagccacaccacgtgcggacttattggcccacgtgatcgactgactccacgtgccggccatagcccgcatcgtcatagtcgttgctgaatacagtacaaatcataactcatccattcgctatacagtcattatatagccgctacgcccggcgctggcgacagcagccgtggcggcagaggctcgcttacgctgccggtgcgcgaggtgggcgaaagcgagggaatcacaaacggttccgttgcatctgaggttaaaactaggaaagccatggtcggtctctccaaaagctggccgtgttgtagagcctgcccgtgcttatataccatcactgctgctcgcagtcatgcacgagcgtgatctgtgtcccctgggcggccggcggtcaggcaggggcggcggtgttcaaaggccgcctcatgccgcggtttcgctacgcacgagtctagggaatggttctgtcctgcttacgacaagtacccggttcccgtgtgacaaatatcccttcacatagcccctcgcgatgagattggccagaaggcactccgtatgatccagtaggcgctcgcccccagcgtccggcgtggctgacgttgagtatgccagcgccgcagcgataatgcggatcgggagctgtgatgagcccccggacaggcgccaaacggccttgaccagccgcagcagtatgtacgggcgcagatggcttagcggtaggtacagcccacgtctcagcagcggcagctgcatgcgcacgagctcgcggtcgtacagcccgaggtcgccagagcgcagcgcagcgaccagggcggcgtagtggatcgccgcggggtcctggggcggcggccaggcggcgatcacgtgatgcttggggtaccagcggcgcgccaggaaggccaccggcaccaggtaggtcaggatgagctggtggtggcgcgtgtggtcgcggtggcacgtgagcagcgcggtgttgagccagcggaagcccttctcgtagtcggcgcggcgacaggcatggtagcggccgaggtagtagcagtacgtgacggtgagcgcgcggcgctcgccgaaggcgcgctccaccggcggcaggtcctgggcgcgcgactccagcaccttgaccatgttggtcacaaggctgtgcgcgccgaggcgcgcgtaggtgcggaagagcagcagcgcgaagtaataggcgccgtgccgcttgttggacgctgccgggtcgcggtccttgaggcacagattcagcgacatgtgcacggcgcggccgcactgcgtcaggtggtcctccgtcgcgaggtcaccacactgagcggcctcggcggcgcgctccgtgcgcgcgtccagggcggccgccatctgcaccagctgccgcgcgcacgtgtacagcgggtacacgacccagccggactcccactccgcaatgcggttgagcgcccgcagctgtgccagcgccaattcaaacaccctcggcgacgggccctgcgcgcagcgatactcgatcttcagtgccgcggttgtgcgcacgaagtgcgccagcttctcatctgatggatccgcgagtgcgtcgcccaccatgggcttgtccgctgcaatgaactccagcagatgcgtcgtgcagcgtttgaactggaagcaggaagttacggcctgtatcatcttgcgttgtgtacgttggcggctgctcgtggtcttcgagcaggtgcgagcagtttttcaatcgtgtcttggacagcaggcgaaatggctggtgatcaactctctggcccaagagcaccacagggacattcggtgttattgaagccacggggtgtttctattgtatccaataccgccactatgatagcatccggggtttccgacgtgggcacggataagggcaaggagccggacagaaagacagacgatgcacccgacagcttgcggtaccagatctcggcgaaggagcggcacatcgcagagctggaattccagctgcagcaagcgcggaaggagctgcgggaactgcagacgagggcatccggtaagaaagagggcacgccggcggccaatgagttcacgaggctgctgcacaagaagatgcaggaggtaaaccagagcccagcggtgcggcggagcaaggagtccatcgagaacttcctgcaggaggtgcagagcggctcgggccccttcgtgggcggcgcggcgctgaagacgcggctgcagtccctgaagccgggcggggcgtccgagcattcgctgcgcggatctacggcggagaccgcaggggcagcgggcttcttcgggatgctgaaggggaagctgcaggaactagcgctggacgaggaggaggagagcgagtttgaccgggagatgaacaactctgagactttctatctaaaggacaagctggactacgactccgaagaggaagtgctatcagaggaagtcgacaacaacttcaccggcaacaagtacccgcaaaagttgaccaacaagcatacgtaggctgggcagtaaggtgatccacccgcatggcgccagcagcttatatacagagcagcgccgtgtgcactttataggtaattacgtctctacatgcttttcacttgaacgtgttagccacgaatgcctgcgtggtctttagcgcctcgtacttcaccttggagttggggtggtttagcaattccatgattatgaccttcgcattgagctttccaaggatatccacgcactcgggctgtagctccacgatgtgggtgatgtcgttgaggactacctgcagtgcgacgttgtcgctgctatcgtgcgatgtgctgagctccttcaacacgtttatcagctgcttgaacagcttccagttctcctccttgaacttgtgcgcgttctccgaccagaacgtgttgtcggtgtggggtggcgaccataccaacagcttggagtccagttccgcaacgtactcatccaaggacgtcaactcatggtactccgattcgaggataccgtgtagttgggacagatcctcgcgcaattcgtcgtcgctgtatttgcgctcgctcagttgctggagtataggcaagccggagcccagcaacagcaggttttttatggtggccttgcggcccttgacctgcgcggcgacgcagttcagaagaatggcaatggacaagcgggtaaccttttccttgattgtgaccttcaccagcttgaacagcttgagaagctccgacagatacgtgtgggacaggtcggcggcaatttgcggctcaaagctgaggagccaaagtgtcagcagcgcgtagtactgtgcctggatgccaaggttgttgctgttcgtggggactacccgcgtggaagacctcccgtccagcgcccagtcgatgatctggaatattaccggcacaaacttggcgctgtgcttccacaccagcctccggtaccgcttcacggccaccagctcctgcagcaagcgaatgcacacgtatgccagctccatgcgctccagattagtcagaacccgcaggtagttggggttcgacaccagcgcctccaccagctcctcgctctgcagcccctcctggatcagcagcgagacaacgttgaagcacgacagcagcacgaactggtcgtccgccgcgctgtccgtcagtgtcgactcgtacagcttgcgcacaagctccgggcccttcttgaagtaccgcagcacctcgtgcacgtacttgtcgctcgtgaacagctccgacagcaggttcagcaccgcccgcttcgcatccaggttgttcgacgtcgccagcaggtgcaccagcgcctgcacgccctgttccagcggcagatccagcgcgccgccgcgcgcgtgtttcaacaacgtcgactcgagcttcttggcaatccccgcgtcaaactcgctcagctcggccgaccgcaccagcgcgtcccacgccacatgcctcgagctgatcgtattgcggatatcgttgaagtgcgtgctatcaagcagaatcttttgaaccccctgagccacggccatcgtcacagctaagatctacgcttccacgccaccgtactgcccactttgaaacccgtgggactagtcaatatctggcgtggtctggcggactcccctttacacagcggaaattttcgctggctggctgcgccaagtgcgggtaacgatgtgagaacggctggggtcatgaacttatatgagtacatacagttacacaagcgtcggcgacggtgctcggccagcggccactacgcatcgcctcgcccgcccggatagtggtggctgttgtaatagaacgcgaaaaccttgcgcaccgcacgggggggtcaggcgaaggcatgttttataatacacaaaatcttttacatttaacctcaagaagattcacgctcgaactccttggacatatctgcattctcaatggcaccgcagatggtctcgcatattatgccggtaaccaagtaagggtcgatgttggaggcgggccggcgatcctcgaagtagccgaagccctccttgctgacggagcgcggaatgcggatggacgcgccgcggttggccacgccggacgagaaggtggccatggaggcggtctcgtggcggccggtgaggcggagctcgttgtcggagccgtagagcttgatgtgctccttgtggcgcttggacaacttgtcgatggcctcctcgatgtagcgcatgccgccgggctggcgcatctccctcgtggacacgttggtgtggcagcccgcgccgttccaatcgcccttcaagggcttggggtggaaggagaccttcacgccgaactcctcggcgacgcggtggagcaagtagcgccccacccagagctcgtcgcccatggtgatgcccgtgcacggcccgacctggaactcccactgcgagggcatcacctcggcgttgatgcccgagatgcgaaggcccgcgtagaggcacgcgcggtagtgcgcctcgaccacgtcgcgcgcgtacaccttgcccgcgcccacgccgcagtagtaggggccctgcggcgcggggaagccgcccttgggccacccgtacacgttgtcgttgtggtcgaacaacgtgtactcctgctcgagcccaaaccagatgtccgccgccctgtgcgcctcaaagagcttcgccgcctcgtgccggtggttgtacttgttcggcgtgccgtcgttgttccagcactccgccaacacgatgatgttgtccccgcgccggaacgggtccgggtagaaggccaccggcttcaagtacacgtccgagtcgtgcccaggcgcctgccccgtcgacgacccgtcgaagttccactccggcaactcgtccacgctctccacgcgccgctgcaacgtgcgccccttcgaccgcaagtgcccggccgagtcgacccagatgtactccgcgatcaccgccccgcgctggtccaaatcgaggtatttcagcaacgtcgatgtcttctctactagctcgctcatcttttgtgtcccgctgcctcgctcctgcttttgtgatgcccgcgcccgctatatatacgaatgcgatccactggcctctgattatgtgcaataccgcactgcagacaaaggatgaggtgacgggaaaacgccttctttctttttgccttgctctgactcagaagcctggccgcagagcttgtgatgcccgccgcggccgcctgggcgcttatcgcgggctctgcctggccctccgattggcccctagcggtccggacaccgggacaaaaaatatcttcgccgataagggtgattacgaatgtcccggcgcctgtttccatgtcccgcgcatgtttacatgtccataaaaactgatagcttatctcttgtatgtgtgggtgctattcactgagtgcgacaagctgctcccatgccgcgtccgggggcgtggcagagtcaatcgcgggggcgagcacgccgttgaccgcgacggagggcgtcacgtggacgccgttctggcggtggtagcgcacgtagtgcttgaggtcgcgcacgacggcgttgccgtcgttgccgcggacggcgagcaggtcgtagacggcgtcagctgggaggccggcggcgtcgcgcgcgaagtccgcgagctcgcggtacacggcgtggcgcgacttgtcggcggtgcgcgtgtcgaaccagcggtcctggtggaggaagagctcgcgcgagaagggcaggaaggcggcggggtcgaggcgggcgacggcgagggcggcctcgtgcatgtactgggaggcggggtgccagggctggatgacgtggttgaagacgatctggaagcgcgagtcggcgcgcgcgcgggggaaaagggcgtcgtgccaggcgaggaagaggcggcgcgagaaggggcagcagtagtccaggtagagctcgacggtgtcgcgggcgggcgcggcgggcgccagcgcgtgggaggcggcgaagcgggcggggggcgtcatgggggtgggggagcgggaaagaaaccgcagggtcgcggcatacggttacatactacacagctacttgtcgagggactccaggtactcctgcttggtgacccaggagccgagcttccagtccgggaggtggcacatgttgacgccgccctgccagctctgcagctggcggtcgacgtgggcgggcgtggcgtaggtagagagcttgtactgcgggaactgcaggctgaggtcgttgacgaggcgctgctccaggccctggagcagggaggtcccgccgatgatgacgacgttggtcagcagcgcggcgtggatctgctcgggggtcgcggagggcaggccggcggcggcgggctgcgcggcggagccgttgctggaggtgatgctggcggcgcacttcttgatggccttgccgacgaggtccgacaggccgtccgcgctgtcgaactcgggcgacacggaactggggtcgaacagcgactcggggatgcggtagcactgcttgaggtcccacgtgacggtcttctgccgcttgaacaggaagtgcttgcggccctcgagcgggatggggatgaagctgatggactgcttctgcagctgcttctcgacctcgctgagccgcatcagcgacacctgcagcatcgtgttcttgaagtcgcgcatccacgtgcgcgactgctgccagtggtacagcgacgtgccgtccggccggtcgtccagcgccttcatcagctggaagtccaggaagtcgcccgcgtagcgcgagcgcaggatcccggtcttgaccacgctgccgtccacgatgggcgtcaccgtcaccttcgacgcgcccacgtccaccaccagcgccgtgctgcgccccagcgacagcgtcaccgcgagcggctcgctgatcagctgcagcaccggcgcgcgcagcttgcacagcaccagctcgtggaactggctgcgcaccgtcgccgacaggtccgggggcaccgtgatgcacaccggcagctcctccgggcccacgcgcagctgcgtcgcgtatatccaccggcagaaccgctccagcatttcccagtccgtgggcaccccgcggttgtcgaagagcgtgtatatgtcgtgttccttcgcctgcatcagctcgtacagcccgtacacgggctccccgccgtccggcatcaggtacgccgacggcagcatgcactgcggcaggtcccggttgctgaaccccgccacggtcgagtgctttccaaagtgcagcactactgccttctctagcgccatgttctcgctcttgtcctccagcttgatcttgcggtgggcgcgtcgctcaattttcagcgctgaaatttcgccctgtctgctccacgatgaccaacactccgctacaccgccaggccggacgctgcactgcttctgccaggtatagtcgtctgcccaccgtcggaaattgtagagctcgggctgcgccgcgggatggagaaacagaggaaggagtacgaggagctgaagcagaagctgaagcaggccctgcacgagaagaaggtgcaggagcaggagtgggaccagatacagcaggagatcttcgacaaggagaccgagtacctgtccggcaacgcgtcgagcaagtacggcacgatcgtgaaggggttcgacgggttcggcaagcacgcgtcgcaggacagccaccacttccaggaccaggaccgcatcttctcgctcagcagcgcgctgttcgtcaagcagcaggagggcgtgcaggacgaggagtagcgggccgcgcctgtttttgtccgtggggtgtgctgcacgcgggagcgtgctttcgctgccgaacgtcgatgcgacgctcgaacacaggggtgggctacatagcaatgggggacggcgtgcagcggccggcgccagctggggaagcacgcggccggcggcgccggcggcgcgttacccgcatcggctttctgctggggtcttcattggtcgagcaacaggcctgccttaaaaaaaaatggatctcagcgttgaacaaaggcctcgcgcgcgccacgtactgcctgtccccgctcatgtctagcgtttctaggagatatatatcgcttgtgaagcctgggtcgtcgagcgttccgcccattgcgcgcctgctggcgcctaatgcagcagcgaaggcgctgttcccgtcggaggatctcggcagcacgcagttcgagctgctgggcgagtccgggacactggcgcgggcggccgtgccggccgggacgtcgctctacgtgcggcgcggctgcatggtgtcgctgtacaaccggtccgggctgcgcgacatcgcgatgtcgcaccagtggctccagcccgcggcgcggatgctccggtaccgctcgctgaaggcgtcgatctactaccggttgtcgagccccgcgcacctcaactgtctgctggcgcccaacttcatgtcgcagcagctgtggcgggcgcggcccgtcgcgggccgcacgctctgcccgctgacactcgacggtacgtccgactggttcgtcttcggccgagacgccgtcgtggcctacgagtccaactcgtcgctcgtcatacaggaaggcccgttccggtggcccttgcggcgcgcccacccgctgggctccaagctgcagctggcgcagggccgcggcagcctgctacttagcggctacggcaccgtgtaccgcgtcgacctcaaggacgcggcggacgagctcatcctgcagcgccggcacctgctggcgatcaacggcgcggcgccagcagacatccacgcctgcgccacgccatacgacatgcttccgccggcgcgcgcggcccgcgtggtcccaccactcgtgtcgctcagcgcggatcgccgagtgcacgtggagtggtccaacctctgccgctggttctccgcacaagcctcgcacgcccgcagcctggcgcagcgcctatacgcccgctacctccacgggccttccgacttcgtcaagattcgggggccccgcacgctcatggtccagagtatgtacagcggtagcgctcctcttcccagcgtgccagcccgcgctgcgccccagccactctacaccacagatatggactcgctgcctgagctgaaggtttcagacgcgaagaactacctcagctatgcgtcggtcgggccagacggcaatgtttcgttccgcagcacccctgacttcaaggattccgtgaagcaaatcgaattggccaagaacaggaggtaaggcgcctatgtaggattcatagcagacactgccgtaactctcatccccttcatctcgagtctcgtattaagttattttcgttaatcgcctatttgggtcttcgaattgttcgaggttgaaaaaattcagagcatcaccaaggctattcgagtgggcgttgcatagtccagtcgacttggtggatttgtagcactagtggatgcgtaatttgcctagaatcaacttaaaatcaacttttacaacattcagtcggataatgtcacagcaaaaggaagtttccgcaggcgttatggcttctagtggggccaagaaagaaaacgtcaagaagagtaagctgcaggtgtcgctgaaaactccgaagggcaccaaggactgggcggacaaagatatggtgatccgtgaagctattttccagcgcctttcagggatgttccggcgccacggcggtgtcaccatcgatacgcctgtgttcgagctgcgggagatcctggccggcaaatacggcgaggattcgaagctgatatacgacctgaaggatcagggcggagaactgtgctcgctgcgctacgatctgactgtgccgtttgcgcggtttgtggccatgaacaacatccaaaacatcaagcgctaccacattgccaaggtctaccggcgggaccagccagcaatgacaaagggacggatgcgggagttctaccagtgcgactttgacattgcgggctcctacgagtccatggttccggacgccgagtgtctgtcgattttggtcgaaggtctaactgggctgggcatccaggacttcaagataaagttgaaccaccgcaagatccttgatggtatttttgaaattgctggtgtgaaggaagaggacgtccggaagatttcttcagcggtggacaagctggacaagtctccatgggaagttgttcggaaggaaataaccgttgagaaagggcaatccgaagctaccgcagacaaaattggtgagtatgtcaaactcagcggctcgctagaggaagtgtacgagaagttggccgctgacgctgcggttacgtccaacgagaaggcaaaacagggtttggaggaaatggctacgttgacaaagtacacgagagcatttggcatcaatgagttcatctcttttgatctctccctagcaagagggcttgactactacaccggtgtcatttacgaggcggtgactggcgcttctgctcctccttcgaacgcccaagaattgaaggcgaaggctaaggatgccgaagatgcctccgaatacgttggtgtcggctccattgccgccggtggccgttacgacaaccttgtcggcatgtttgcagaggcctctggcaagaagtccgtttccattccttgcgtcgggttgtcttttggtgttgagagaattttctctctgatcaagcagcgttctgaaagagcctcctctatcagacccacaagtactcaggtcttcgtcatggccttcggaggagggaaggactggactggctacttgcctgaaagaatgcaggtgacaaaacaactctgggatgctggcattgacaccgaatacgtttacaagtcaaaggccaaccccagaagacagtttgaggccgcagaaaagtctggctgcccactggcagtgattctaggcaaggaggagtatttggagggcaaattacgtgtcaagcggttgggccccgaatttgcggacgacgacggcgagctgattgacgctgcggacgtcgttaaagtcgtcaagaacaagctagccgaaatccgggtcgatggtatggacgaggttgaacgtctattacggagtttgtgagtgatacttctaatatataaccgactcccagtacatatataattttatagtcatatttcaactgggcagcggcaggcagcctttttggcaccatgaagattgcctaacgtccaacaagacgggcggtgttaccaatgacctggaagatgattttcctgctccgaataactattcacaagctcatctgaacgcgaagcaacgacagggactcccttctttggcagatcgagtatggagttatccttcactcgcagcacaccatggtataaaatacgcttgccccatgcgctggccgcggcactgcccgtttcatctcggcactgtttgaggaacggaatcaacgaggtaccgccagtcccacgttgctccatagtgccagagtgcttagacagcccgctcctgagcgtcgcgtgcggcttggtagatggctcttttttcttagcctgcaggacgatataacgagtcacaagctggatatgcctgtcgcggaagcttttcatcatcgagacacatgcatcgtaggcaaggaccagctctgcgtcaaaattatgcgacaacacgtagtctctaatgttggccacctgctggaggtgtgccagaaatagccgatgcccttcaggcatgtagtttctcatatcgttaatataaccgtttccattacttcccgctgaaatactccttcccgctgttttactgacgcccgtctgaaaatgttccactccgagcagtatatcgagcatctggatcaaggagctctgcgcatttgacccgccgacataggttcgatattcgccacgatcaccgtacctgaccccattcggtagaccgagatctgccatgttcttccagcccgcaagatatggcctgatgcgatagtagaatacatatggatcacacatctcctccatacgccccagtagcgcccctagcgaatctatcccctccgccagtgcctgcagatgggcaaccacacccgcacggtcccctgacctgaccgcgcggatggcgttgagcccatcgttcatgctctgtgcgccacgcttttcaaaaaatacagagatcaggtagaaccagctttcgtccatcgaacccgtgaatgtgttgatcgtccgcaggttcgacaggtcccacacggagcccccagccagcgcctcatcctcaaagatcggacagaaattccacagcaccagccccgcatacgtcgccagcggcggcagcccaagggcctcgctcaccttgagcagcggcgccgccacactctccggaatcgtgtcgcacgcatcgtcgtagccccacacatacgcattggcgatgaagcccaacaccgaatatgcgcgccgaagctgccgcatatcctcgaacagctccttcttcacctccagcaccttcagctggtccaccacatcccgcagctgtcgcgccaacaatagcgccggtagattactcacaatcgtttcccaaggtcgatagtattcatcttgcaattctttcactgggaattcatctggcaggaaggcattagctgcggacacaaaataatcctccagcaccggcaacggcaattcagtcgacattagcccagctacactactagcaccagctaacttctagtcagcgagtttgagggaatgccaaatcctcattattaaataaaaattgtataaaaatgtcgtcgtataaaatggacgttcgatggatcctcgaacatggccacattcattatcacctgccgcattaaattaatatgtttatgatcaatagaatgggtaatctcgggcatgtgcattttgaaacagcggtctgaaaggaacggggaccaaaatggttacggaatagagcacaaatctcgccaagtagtggagtaagagccccttcctgtcaattattgcgccgatcggtcagcgcttgaacctgactcgcaaattcgtccagctggccgcagacggagttgactcgagcgagagttgtgcgctgcagtatgcgctcgatctcgcgttggttagctacccaattctccattttcatcacatcgcccaggcgggcgcggtgacgctcctgctcctccacagtgacataggggtttacagttgggtcgaccgccgctggcacgtgggactcgtctccaccaagctggagactcgctcggatctgggacgcttgtgtggcgcagaagtctatgacctgacctcgtatgtgccaggcaggtagcagcgtgctaccgacgtagtccacgcagcgcgccccgagttcctgcgcaggtgcattctgtaggtcattggtacgttgattgacgacattgtcggtagtacgccgtagttcgcggagaaacgactctattagcgatggattaacacagccgtctctattgatagttatacgtctattagcggcaccgtgggcgccactggggccactgccagtatccgcccggggtgcagggacttccactgtgagctgtcctccgggcatcgactagtctcctcgtagcaataccgaatgtgagtacaggaagtcaatttccgcatagaacatccagaaccagagcattagctacggtgatcctaaactatcggctgagtctggcggatgtgctgacagtaggtttaactagtagcaaccgaaaacgtctgttatatgtttaaataccagctctcggaaccagctctaaatacgcgctcgaggacgggacagtcctgcggtattagatgcccattttactcttgaaagcgcccttcacaatatctttgcgggtttgctcgagagcgtcattcatgctcttgttggcagctgcggcatagtcgttcacagaatcttcgagatagtctatgccgttttgcacagatttggtaaaggacctccaggaggcgttgcccctctgagaatgcttcatgggagcctggtactgtgtctcttgatctgcctccgatgaggggctggcggaggacgcagagtgagctaccgaagagagcttgctctccgggtacttgggaggggggcgattacctccggatagaagctcagcgagctcgtcgcactttacaagcatgctgccgcgagcccactgtagcgcccccacatgtggtctggcggggaagtgtagcttcggattgtagagaacgtctgtctccgcatctgcagcagaggtgttatcctgagattggcccggaagaatagaaaataggatagcttcagccggcccgactcgcagcatcaggtcgccattgtgaagcacagaggagttccggagatactgagcctggggagtggtggggggcacaagagttttgagctcctttagatcaggaagactaagcagcttaatttccgagttaatctgcagtgcaatcagaataattccagtgagcagctggtcttttgcgcccttgtaaggaacgaacgcgcagcctgtcgtagccagcggaacagaaaaagacttacaggtgggtttaacggcccagtcagtaattaactgaatgccagatccactagttagtacgacacacccacgaataatagttcctgtttttagctcctgcatttttccaatgctcgcttgacagctggaagcatgttctatggacagggtctcaaccttcaagataggtgattggtcatggagtgataagttatcgacaaaattcaccacaaatcggccagacagctctggaagtactttaaagattagtaattcaccggcgtcggtcccacaaaataatagaatgctggaatagccgtcatcccggaatgccatgatggagaattcaatgctttttacataagcacttttaagcttcaaccgtctaagattctccatgtaaatcactgcaggtttccgtctatcgataaccaatagggagccgtcttcgtatgcaacagccacaaagccaatattgctgttggttacagcgctgaccttgcctagattagctctcacagcggaaagggggcaaaatcccactttcatatgagaaggggccctgtccgatacatctaccaacaattccgacatattgccaatccctaaccgagcaaaacttccatcaagttcaccagccactccatttggattaaacattggattgtcctggaatttgtagagtagcacgtcccctgacgacacggacacggctaattctgctgtttcagccgcgaacgagacatgctctacggcaacgttatccgtagtacccagagcctgagcaacgttaatgttaaatacggaagtttcttccagttcacgatgcgacgcatcccaaatcctgaccgatccattcgagtgacccgtaataaaggccgttctgccgtaatggcgtcttgcagttttacgcacctgcgcaccacctttcagaaaatgatccttgttgtaggtacaggacatcatgcccagccattgtttggtcgggatatttgccgcagtagctacggtaactgttggcctaacccaggacaggctctgcgggaataacgaagcgcgatgtgtgacattaccggaaggatacaagagcgtatcaagttcaccgtttgccagcagtactaggataagtgatggatcgtgattccccgcaaagtagggtgattttctgggaagcggaaggaaatcgactatggacgattcactggggagcataaaagacttctggcgcacaggattactgtaatagtggctcattttttcatatgaggtaactgagtatttcggggtggtgccgaaatctaacatggtcaatccaaatgtctctgtaccgtgcggcgctgtgcctcctgcaataaggagagaggtcttttccggatccgcgtcgcatatccacgccactttcttgattctgtcgtttctcattccattgagattctcataagaaccgggcacatgcacatccatatcgaagagtgtccgagcttgtatcagttccccgttgtttgcatcccagaagactaaactgttatctgcatgcaccgtcaggatatgtagtccattcggatgatagagcgcctgcacaacaaagggcgcacgtggcttgtttatgtctgcgccaggatcacctccaggtgcacccggcgggagctcgtagacaaattgctgcttgatgcagttctcgaccaacgaatacgtcaccacaacacgctcatacgctatcagtagcgtccccagttctctgggatgccactggatcgaaacaacaggagacgagcgctcccgaggaaacaccgtggacttttgtaggttctcaatcatatatggcgagagcacgtcccggtcgacgtcgtatacgatcacggacccgttctgcaggcccagcagcatccaatccaccgaagggtccacttccaccgccgttattttacccggggcatatatcgacgctaaaatgcactttctatgcagagatatcaccgtcaaaccgtcagacctatccacaaccaccaagtaaacccccttgacaaaccgcatggccttagctgcctttattttcagcgtgaaaaccacctccacctgctgcttcccgtacacatgcacctcccccgtctcagtggccactgctagcaggctctgcacagggtcgaacgccatagcgaccacatttcctcctacgccagaccggcatacctctgttaactcaaaaagtttgccatttagatgtccagagtccccgcctcgaacggacttcagcgcattggtaacattcttcaatcgacggcttttgaacattgcgttaactggtcagccctcttacgcctggccctgtcttcaggataggtgttgctgcgcagctaacattggcacatggctcaggaagccatactggcttgacatcatgtccgggtgaccccttagcttagctaagttggtgacggacgatgcagatacattattcaatggataaattagtgtccgtattaattgtcagtcatcgaaaatacatattctaaacaacacaaagataacaatcagatgtgaaactagataacaaattaaaatagtgtcatttgtagtgttgggttatagcacaagatcatcaggcataaaggaaaagccacggaactcttcttgcagattagaactcaaaatggaaggtaatggagtcaaagtcggaggagcggcagtaaactccttctcgaagtaggaagtgtcatctgcagctttgatggtggggatataggggggttccacccgcaagttcaaaatgtcatcgaaattgatgttgcggaaaaacggttcctccatcacctcgagcgcgtcacgggagccggcgcccaaacgcttctcggggtccttcgttagtagaccctggaatatctggacgatatcgccagccatgtctattgggtacaagggctcgtctgtcaagatagcgttgaaaacttcgtcctcgtcgtcacctgaaaacggagactggcatagcaacatctggtagagtaggacaccaaatgcccaccagtcgaccgccttggtgtaggcttgctcgcgcaagatctctggtgccatgaattccggggtaccacagaacgtggaagttcggttaccgaaccacatctcgtccttgcagagaccgtagtctgcgattttgatatgtccctccaaggttagcaagatattctccaacttcaagtcacggtaaataatgccattatcatggaagtatttcaacgcaagtagcacttcagctgcataaaacttggcccgcctaacggagagcctttggttctgcacatgccacatgagatcgccgcccccaatgaattccatagcaaaataaatgcggttctctgtctggaaagaacagtacaaattagtcaagaatggatgcttcgctttggttgctaacaagaagaccttcttctctgctctagcactttcaatgtcgtggttttgaattatatgatccttttttaataccttaattgcacagagcctatctgtgttttttgaacgtgccaatagaactttcccaaaattccctttccccaaaactttcaacaaaatgaagtcatccagacttactttgcgccgttttggtgttttgcgtttatgcctaccacttgccggctgtaccggctgcgcttttggtggggaaagtggtgcaggtggatgctggggtattgattccatttcctccgagggaagttccaaattagaggcacaattaacgtagttgtcatagttggctgatgacaaagattttggagcttctgaaagctgcactgaggtttctgcttcggcggccaaggtacgctgtgttatactttccgagggatccgaattaaatgggttttgttgtggatcccattgtgaaggcgcctcctgatttatctgcttgctgatttctttcttcttctgctccaataaccacctctgttcctcctcttctttcatagtttgccacatcaatgcagtggttgggtgatcatcaagtaattcatcattgagcaagtagaccgaaccaggatccaaagtagcagattctgcttgagcttccttctgaccagtcatttcagaaaacctgtaataagcactatcttcagtcgtatcatcgtcatcatatattaggcgcgtttgtcttttagaatgtttatcttgtggctctgaggacgaggtagctgatggtagattagatatatctggatatggctggacagagtggtcctcggccaagagctgtgaagttggcgatgtctctgtagaagcagtcggtctcttggagaatgctgcacctccccgagcttcaattgagctacccgtggtattataaggtatcatcttgcttgcatcctctagcatctgtccagcaggtgacgacttttggcgctgctgttgattccgctttgtgtcttggatagtagtcaaaatcttattggccatctccatagtcatcccgcagaaatcaggtaccaaatgagcgcattgcgtatggcacatgattgagcattcgctacatttccggacgtttttcttaccccatggtagaatataaccacagtgacagcaccatttagtcccacggttagacacaggctcaaatctgtgtggaatgtggtgattcaatttagcctcctcagggtcaccatccgtgctagtcttcgcgatacacttagtaacaacattattgtaacattttttgtgacataagaacttgcagtcttggcattggaatcctgagtaacgcaaaaagtcaccacaataagcacagcacattatattatagaaagacttctgcacaaaatggtgaccgtgcttctcgtagacatcatctttcctattcactatagcaccatggcggcgaagcccgcccggtatatcttttctcacgttctggttggatttgctgaaccctaaagtcaacattatttgacctgcaggttcgaggacaaaccacgcgctcgttgtaatgggctgagcgtgtgccgtatcaggagcagattcaggcggtggctggtcgagagttgccaaaggcaacccccccaacggaagatgagcagtggaagtattcaaatatggatccgaagcatcgggaagctggctggcagcttcgagccacgttggggagcccacctgtcctacctttttcttacggatttcctcagcaacatccgatagtaataaccacatgacggcaacaggaacaatccgatcattaatcctatcatatacagtaatctccagttcattacccttgtccacgtgtatggtaaactcttcatgccatctatcagttctggttggcttggtcttagcccgaacaacatcgtcaactttgacagtaataatggtttcgggatttttcgaaaacagcggtgattgtatgtgatctatatcgcggatagcagtaagtccaatagtgaactcgccggttagttgtttgcgtctaaacttctgctgagagtttagtgcgtcatcagcttgctctttaagctgttccatgtcgacattgagcgcctgatatttcttcaaagccttcgtcaatagctgtatccgctgttttgactcctgggcacctccctgtgctgccgagctgctacgctggtcgccgtcaatctggtacaacttggtcaacttgtcattcgcttcttggtattgacgttcaacgcgaagcttgaattcgagctgctggagcatgtactgtatgcgctgtgaaagtgatggacagtcgtacttcgacaaatcgagacgcgagaaacggtgctcgtgcggtgccatcgtgctgagctgcctgtagcccggatagacctgtgacaccgccaccgcctggctttcgaggtgtagcttcttgagcgtgtcctcaaggtattggatattctgctgtgcctcgcggatgttcgtgttgcacttctggatcaccatcacattgtccgtccgcttcttcaagtttgacgcgccctggatgatgttccgctcgcgctcgattttgcgcaggatgtcctgttcaacgttgttcatcatcgctgctcccatgtactgccgcgtaccgtcccggacctcagacgcctttaaaggcgtgtgtgactctccctgccgttccgcgtgtcccgggcgaaactgactcagcagaaacccactatacacaaaacaaagctgaggccgccactaacgaaacacccaatctactaagcttccgcaccgaacctgcctagtatttcttctacttagccgctggcaagcaaatccacaactaacggcgtcctggaacttctcagcgatacttggttcccagtaatatatcgtaaaatcgatatgtgaccttttgatacctttccgcgcaaagcaaccttgatattgggccaaagcaaaaaaaaaaatcgacacaagcctttaagtcccaaaacctattgacctactggtagctctacctggtcgtgttgtttgcacaaacctttttgtttaccagacaaaggaattgccactgatagcttcgcctaacggcttaattaccttccaaatcctgaagaagaaaagcgaccttgcaacatcgtctacagtgacagtgccgggccgtggagggctcaagatgactgagaggctctatatggtattgcttagctagtgacgggtgttgcggaggctctgtaatgcgctggcgcggcggagagcagggtggcagtttctagtcgttgcagttgcatgtgcagcccgggacggggcagatgaagtgcttctcaaaccaatcttcggcatggccagcatgcatgccgtggttgcagctgaggcagaagctgaaccactcgttgagcttgaggcggcggctctcgtagagcgcggggtcttggccctctggaatatggcgggtgacggcatggtctgcagagccgctgatgacgatgggcagcgagcccgagccgagggggagcaggcagatcgcgcagcggggatacggcgagccgcagtgcggacagaggtacttctgggacggcgcgccgtgggtgttcgggttgctgctgttccaggcgtactttttggcggggatgcccttgatgccgctgccctggcgcgggagcagcgggtttgcgtccgcgggcttgttgatgttcttgttgcacttgaggcattggatgtacatctggcggggccgcacggtgcacttgacgatgccctggctgttgcgtgacagcttggtgcgcaggccgtcgaacttggcgcgcatggtgaacagattccaggagttgagcatgttgtggtagatgtagatccactcgtcgacacgggtgtcacagaaataacgggggcagccgaatatggacaacagggcggcagtctgcacgtcgcttgtcttgctaacgtaggactggaggaggttgatgccgttgggggtgattccggtgaggatgaggccctccagctcgccgttttcgatcacgttggtgactgtgcggtgcaggaagcgggtcaagtctccgtcattgaggaagcgcagcgcgacgcccagcctttcccggagggatatagcgctttcataaaggatgtcccaccagtcattgtccgcgatgaacgagaaaataatcctcaggtaggggtcgtccagctccgaggacaggcgcctgcactgctgcctccaggcgttgttgccaggctggtccttatatgccaggtacccagcgatggccgtagcgatcagccgcaggcgctccttcttagcggagctgagtatctcaatggctcgctgaacgtcgccgaaaaacacagcccagcccgctgctttctcgtagttatttagcgatatgaggttcatgtatttttcctcaatttcggtaggggtgagatcccaaccggaaataatcatacagagtttgcgctggatcggtttcgacgtgtttaccagggacccgatatgtcgtgccgtttccaggcgtagtctcgtctttcccctcatcaggatgatcttctcaagttcacggttaagttgtttttctgtgaacgcactaccttctttgtatctagcttggtttgacagaccatctaacccgttccaaataccataaataccctcatagcccaggtccaattcaccagaaaccatcgtgccgtcgtccacggaagatttcgctatagctatccagcgccaagtgtttctaatgtaagcgttgttttgcaatgactttgattggtctatcagttccacagtggtcatcggatctagaccgtagcctaacgctgctcgttttctcataattgtgctaatatcattctgaagtaatttttctggcttgacaaggtaccgatgctcacaagcggatgctgcatcgtcattttcttcgctctcatcgtctgtttcaaaatctgaattgttaaactccttatccaaggagttcgattcttcggaatctgaatcagggttattcgtgttctcgctcagatctaaatcttcgaacgttagatttttcattcccgccctcaagtttttggatagagactgctgggttctacacgaaatgcgaagctctttggtttcacctttgttgttatcagtcgccatgaaactgttcatgttgtcaaatgcgactttgcatacaccccctggcgtgctcatacggtaaatagtccctgattgacgcatgcagataaagttcgagtcgttgttactcttaggtatatagtcaaaagtcacaacgcggtcgtaggttgtgggaatatcattaactgtagacacaaagagttcctccatctgtggtccaggtgtcgtatctccagattccgagctactcgcgttagaggataacggtatacttcccaatctccatctccgtatgacttcaccgttgtgtaacgtgcagaattccaatcctcggaccgctgaccagcggaaacaggaattcatatacttcctggaggcagcgccatgccccactagcttttcgaactgcaataagggcttggcttccaaatagtcagaggagcttgtgtttgatacaagcttcctcctatcccatattgccaaagtcccatcgtcaccgtaggaggaaaactgccaactgttgtatggattgatttttatgtcatacgaaagccgggagggatgctggtacactggtgtcgaagcccgtagatcaacctcttttattaggttcgtgctagctgctataatattggtttcatttagaaatttcaaagataccgtgctttcattctgacagtacgagaacgccgggttcacaatattgctgctcgtattctggtagttaacgtcccatatctgtagtgatggatcacttcggcttcggtctagtcccatggcgaccaacccattgttattaattccaacgctattgatcggcctttgctgctttgcacgcacctttatatcgaacgcgttgctgctcgtaccacccaccatgccgtctgtcaccacttcaaatacattgaaaagtcttaggtatccgtttttctcggcgacccccacaaggcctacttcagactgtgaataatccaaacacgttatgctactgaagtctttgaatgtgctggatttcaagatagagccatctgattcgtcattgggatctaccctgtaatgcgttacttcgtctcttgtcgggttcaccgacaaataatcgtgccattcgtcattcgtccagttcgttacttgttttatgaagcccatcacccttctgaggactagagttgaagtcctttgttgcttgtttagcgaagatgttttattcaactgatactaccattattcagctgcaaatatgtctggtgttaccctgcccactatcggtacatttctcccgccagtaatttctatttgattaaacatcaggaatactacataaaagagctagtatctcagaaacgacttaaggattcgttcctgtgcaggagtcagttcgtcctcttcgacctcactgagctcctcctctttcattagaattgggccatgccagtcaacttctcttattttctttccttcgaaaataaagtcgcgtgacatcagtttgtgcacatctagaccttcaatcttggctatctgcttgctaaactgcctctgacataccgttattgtagatacaagttcaactgggatatccttttccttcgcgatctgatcgaatagtgttctcacttcacgtgaaaatgaagcgatgctgtcgtactgatcagagtcaactttggcgagcactccagcaaatgcaggctcaaaattcataagagctatgaattctttagtactccaatgtgtcgtgacattcttctgcacaagatgcctcacgggatgaaaacctaaatcgtttataatatcgacagcgtctaggcgggcttgcgccgcctgctggcgtctcaccagcagagtgctcagttcatcgagcttcgcaaggtcatttagaagtacgtctgcaaatgccacccgtttcaagatatccgccgaatccattgagttgaacgaggtggggtcgaatattctgaccagtggtgctccccttttcaattctcgcttcatcgaccagtacttacatatatcaatagctgtctgctctgcctctgctataccaaacttatccagcagttgttttaaaatcgtagcaaagagttgcggtgcaattggcgtcccgcggttcgtcttccacctgttccgcgttggcggttgttgtgcctccgagctcgtggccctctgatttccgcgcatgaccatctccttaatattctcaaagtaacgtctagtttttagtattccaacttgacaatcgccccacccggaaggagagtgcttatcgcagaaactttctagcttcacgccgggtctgaagtttttcgaagcagcttctggcaccgtgcatccaccgaatgtcataaacaaaccagctcttttggcgcaagtaacatgataggccacaaaacagtttttattactgcattgtatacaagcgccacatttctgcttgcagatataacagttgagtttccaccgacttctcgggaccatatcgataccttcaatgggctccatatagtgctgattggcaaagaaaagttcagggatccagattccacatattacatggccccaagagcctgtgtcagtctgcttgaatgcaccagtattgctggggcagaagaggcagttgattttcctgttctttgatatcatgcatctacgacacaaccactggccttcaggtataaatacaactccataacattcctgatgcaccgctacatcgcaaccgtcgcagaaaacgattgcgttcgaattgtcagaatctgttccattgcatatggcacaggactggtccgcagaactgccactgccatcatccgagccgtatagctcgtaatgcgctattgcggcttcagattcgtgcgtgctggactgctggttcgtggggtgccgctgcggaatcttgcgttccaaatagaaccactctatctccaatgccgttatcagaatttcaaaaagttcagcggaaagagcgtttgcggatccacgcgccttaccgctgtttaaatactgtagatacaaatcatcttgctcatccatatcatactgtaccttaaaatccctcaaatatcgcgatacatcaacaaagaactcgttctcattccgtagtaagtcgtctgttttcttcatatacgcacggcgggcaagatccacgttgagcgtctgcacgttactgcggtacccgtacctgtggaatacagcaggtacgtgatacttgccattcagctgagtcaccttcaccttacagggtttgaaacatgttttcttcaactgcggtcccagccgttccacggtcaccttgttcttgtagatgatctgcttgagcgagccgctggcacggctgagctgccgcagcgcattgatgcgtgccttgtattcaatatcttgaagcgccgtttcttcgccgctggccgtgaatacaggtagtagtacggagtgatttagatctgggtagaagtctcgataatgtttctcttcccttagttttggcccttcttcctgggcccgcacaggcgtctgaccactagacattataaagacatagaacgcgagaaccggaactccgttttccttccctcacctgtccatattaattggtaaccgatggtttgtatgtgtctcgaaaagtgaccgaatttttcaaattggtaatggcgccatatggccgaagaatcacactatagtcacgtgtacttataaaatgtatataaatactaccagcattctgagtgttaataccagattactgggcgcgtcgtcgcatctattataatccaaaatgtgtctttcttctctctcgccagggcgtaaacggttcatttggcgtcggtgccagaagacatacagggaccataaaatcttattcctgaggagcgtcagtgaacaagaaaaccttgccactgttattccctccaacaatccagttttgcattggatgccagctgaccacggcgggcaccgtcgatgtctccaggtgggatagctgctcaccgcgactggtgtatatgtcgatggcacgcttcatgtttgcaatggcaaagacatccatgttcagcttgaagcgagccttgagtacgctgacccagcgtcccgatttacaattgtgctgtatggtgaagtctggctgcaattcagaaggtaagtcggctcttgcgttgaaaagacggaccgtgttgtcatatccgttgcagacaagcgtatggtcgatgggcgcatacgatacagcggaaacggacagccttgaattgtatgtcgagacaacctcgtgactggcgtagtcctcgtactgggaccagtcaggtttggccacggtcttgcgcaagtcccatatacgcagcgttctgtccagggaggctgtcgccacactgtagggcctgctggggtcaatggccatgcatccgattttcttgtccgatagacgcataatattcattgtatcgggcttggtacggaggtctcgttgagcaaattcgcctcctagggtggtgagcatgaccacgttcggactgtcatagctgaactggcagtcgctgatcccgagcgtgtcaccatgttcattttgaaagtggagcagctcgtcgctttttagcgactgcatgtcaatagaccgcaatgcgccgtcgtaggaggcagctagaatcttgctagagtctgtggggaacacctctattttgctgacattcctggaaaaaagcttgaagcgggtgatatctgggacggagtccggatgctctgggtccgggttttcgtccgcaacgttccacagccccaccgtgcccgctgtgtcaccgccgactatcagcttcttctcctgggaaggatggaagcagagtgccgtaacccgctcgtgcacaatggccaactccttcgggtcaaaaacgtcatactgctgcagccgcatctcctctcgcagccgctgcacctctggattcggcttctgatgccgctgcagctcctcgaagaagtcaccgccggaaaagctcttatcggcataccgccgaaacttctccaggagctcgccatcgtcctccgacttgatgaggtcgctaagctttatgtcaccgaccacgcgcgcctccttcagctctttccactcctcttcctgtttcacattctgtgctgtgtcgctccccgcgccggcctcgccttccacatcagcggcctcccctcgcagacgcctggaacgcctagtcggaataggtgctggtttcgcctccctcttaacaggggccttgccctgttttttcttaactgccccgcccgatgccttccgatggtcttcgatgcctgcctcgcttcttatcctggcagggatacctgcaaggttgagtttcttcagcaattcattattgcgcttaatattctccaggcgccgcttattaaactcgctattggccgtcatttcacgatgcgataccgagctttttggtgcagaatgggctgcgcgtcgttgcagggaatcatccagtttggcagtttcacatactaaacgtacatgaaaaattcagatagcgaacccatcaccagacccaaagggaacgtccgcacactggaattcagtatatactaggctaacgaaatggttagcaacattctatcagtatttaaccctccaccatcgcgcgacctaacagaggaggaaaccaaggactgccttccatgccagcttatgagttctgcgtttgcactaggctttggttcctatctgctcagcgggcgtgcgttccgctataacgagaaagacaaggccaaaggaattactttggaagagttcaacagatacaatccagcatggtggagaaactctctgcggacggtgggcggcgcgctggtgctgttgggggtggttcgcggcaccgaaggctggctgtggaactcagacaaatataccaaggagaagaacagcaggtaaaaagacattgctctatgaatacatgcatatacgtgatacatagatgttatacgtcgggagaggggcgcgggcggcgcggcgcgctacctgccgctcctagcggccatggcagcctgggcggagcgctcgagctgcctgttgacgagccttgcgcgctccatttcctcgcgctggatcatcttatccgctttgatgcgctttttaatctttttacaccaatgtctgaatgtcctttgataatcgtcgctgtcgttgtacttggttatgtagcggtgagtcataagctcctgcagggaagagcgcttacgctcgtccttcacacaacagcagttaacgaagtccataatatccgccgaaaagtcgccgcttgccggaagcgagggcggctcttcgttgactatcctctgcagtagatctaaaatgccttcgggagtatcgttgtggccgccaagtgggaactcgcctgtcactagttctataatcattaatcctagggaccagacgtcccccttggtattataacaactaccctgtatgcgttctggcgacatatatgtggaggtgcccacgaaggtgtcagcaatggaatcgatcattttctttgagacaccgaagtcgcatattttgacaaagcctttggagtttataaggatgttcgatggcttgatatcacggtggatgatcttgtagtcctgatataaatatgatagcccgtttagaactgcgtaagagatcttggagagtgacagttcggtgaaccacgaggtagaagcgttcataggaaccttgtttctgctgcagtaccgcctgtaggtactggagatcttgtccaacgagccacagtccatgtactccatcaagatgatgatttcgtggttttttatcgcggtgtagtaggcaccatagaaaccaactatgttcttctgctccttcacattcttcatgatcgtgagctcacgcatcaattggtttttgacgagctcgctgttttcaacagggatggatttcttggcgatgattcgagagtctggcacgtggagggtcttaaccacagtcccagaattgccggccccaatcttgcctagctgcacgagatcttccagctggatgtcgttgttatcatcctggaatatagatagccgggagaacttggtcgacaatcggttgtcgcgtttattgctcgtgatcttgctgggcacaatggggcttacgctagtcgatgagtccgagtttgttggactgggctgcgcgatgacaactttcgacttcacgccctctggttcaatgttcaagttgaggggcttctgcatgcgcttcatgcgcagcgtcatgcacggcttccccccgcgtagctggttgtccggcgttccgttgtgaaacagacccggccgctgggtggccggttccgcagcgcgctggctactagccatgtccaggacaccctgtactgatgcaggacccggtacgctccccaggccccagaccggctctgggctccgcatgggcctggccccggccttgagcagcgtcggcgcccccgaaagcctgtcctccgtcgcgcgcagtatgtcaccccttgctgcgccctccagctcctcactgcctccggcctcgagcgtcaatttcttgaggttcttacgtttcaggctcttggtttgaaagatgtgttgactcatctgcttctattattggccatctgcacgcaaatacgcacttagttcgctgctcgtgataagaaccccagtaatgcaaagataaacgctgcaacaggtaccgtctagtcctggtgaagcgattcttgtcgcttcgaagatccgttaatatattctgcgagcccactgcctgaaatattgcgggcctgcttttttacacgtccaaatagacacacagagcgcatcgccagtcgcaccgctttggctaatgtactcataacgcgcagactgccgcgcctggttcctagctggtcatctgcgctggccgagatgagcccctgtgggtcacgtgatacaaacagtgcaacatcgataaaacaccgatccgggtgtgtgggtgtgttggaaactgtcacgtgattggaattcaagcgtgcgagacccgctatctcttggggtggttcgctcggctgacggcatcattgaatccatcagacagggaccgttcacgagcgtcggcgcactcgtagagctcaccattatctctagtagtgtcccattacttactcatcgctgtcgtccttggtgtccggcgtgtgagctcgcagatcattgcttacgacaccgcaggtgccacgccggtcgtcacgtgactagcgtagatcgctggctctaatatgtcggttcatcgacagatgccaagcatcaaacgggccgtcactatcccgcataccagcgtggtggacagtacaaccgccatataagcgcggtatggcctctttatggctctctccgttcacctggcgcgcgattgaggagagagaaggagcctgcgtttctggtcgcgcgatcgggcaataacgatagcacctaatgaagcattaatgtccctcatttatttgtgcggggtgcccctatacctagacaggaattttctagctaagcgcgtcctaacagtcagtccttatctctgtgccatatcgctatcgtggtatgccttcccgtaccagtacgcggcacccacacacatccagtttcttctacatcaccatgaacgtgcatcgcggttgcacgtgcgtagatcatttacataataaagcgtggagccgctcagctggctgcggaccggcggtgggcgtcgggagcctcaccagtgctcgacgcaaagggcgcacgttgctgaagcaccaatgctgccctggtcttcgcacgaccaccagcggagcctccgccggtaaggcacgtgacgtggcacatgactatgcattataatcacgcgggacgaatgtttgggaccgagctttcacgaaaaattttctggaacccagctcttgcacagttcgggtggcaaacaacagaaggataatataacaacgacacataccatccgagcagcagtgccgacgatttactgctatctttgatcacgtaccaggactcccgcaaacgaacttaagggctagagtgatctcagatagatatagaccaccaaagcgagtacacataatatagacgatgagcgaggattggaaaaaaaagctgaacatccccaagaaggatacaaggccgcagacggatgacgtgttgaacaccaaggggaatacgttcgaagatttctacttgcggcgcgagctcttgatgggaatctttgaggcgggattcgaaaggccatcgccgatccaggaggaggcgattccaatcgcgttggcacggcgggacatcctagcgcgcgcgaaaaacggcacggggaagacggcggcatttgtgattccgacgctggagatcgtcaagccgaaggttaataagattcaggcgttgataatggttcccacgcgagagctggcactgcagacatcgcaggtggtgcgcactctgggcaagcactgcgggatatcatgtatggtcacgaccggcgggacgaacctgcgggacgatataatgaggttgaacgagcctgtacatgttctggttggtactcctggtagagtattggatttagcgtcacggaaggtggcggacttgagcgagtgctccctcttcgtgatggacgaggccgacaaaatgctgagtcgcgatttcaagtcgctggtcgaacagatcctatctttcttaccgcagaatcaccagtcgctgctctttagtgcgacctttcctctcactgttaaagaattcatggtaaaacaccttaataagccgtacgagattaacctgatggacgaactaacgttgaagggtattacgcagtactacgcatttgtggaggaacggcaaaagttgcattgcttgaatacgttgttcagcaaactacagattaaccaagctataatattttgtaactctaccaaccgggtcgagttactagccaagaaaatcaccgatctaggctattcatgctactattctcatgcgaggatgaaacagcaggaaagaaacaaggtgtttcacgagtttcgccaaggcaaagtcagaaccttggtgtgctctgacctactaacccgtggtatagatatacaggccgtcaatgttgtcatcaactttgacttcccaaaaactgcagagacctatctccatcgtattggccggtccggaagatttggtcaccttggtttggcaatcaatctcattaactggaacgaccgtttcaacttgtacaaaatcgaacaggaattgggaacagagattgcagctatcccggcgcaaatagacaaatctctctacgtggcagaggacactagcgctgtcccagtcccctttcctctagacacaatgcaaggcaatgctagagctgctcagcaaatgccacatcctcagcagcaagcgcaactcggaggtatgccgcagcccatcccccagcagatacagccccccctcgcccaccaacaagcccagcctcctccacaggtatatcctcctcaaatgtatcaccagggcatcccaccccaacagtttgctaaccccccgcaattttaactgtcgcctacctaggttgctagattttcacctgtgacctatgttcattttctttacctttttgttacaaaaccagcgagcctctatacattaaaaccaccagttccaacaatttaaaccgttaaatatgagcctatgaagtcaagagataaaggaccattatacaactaccggttaatatccatgtgggttattgttatccatttgaccccacctgtagtgccacagttgccataccgtgagccgtactgtaattacatgcttgcatcatccaactaataccattgtgaaatcattgtgtggtcaggggtttagacccgcgacgaatttaatgattgatgatccgttaaactttctaaaattgcattaaacagacgttggtgtcggacaatgtttgccagactatattccgtttctatcaccgatattatggccaggcgctagaagtcaacggaaccactaattccattatggattatgtatatataatctaccgttcgaaataaaaaaacccaaaaaaaacccaaaataaaaaaaaaaattaaaaaaaaaattaaaaagcgtgccaaaaagacgctccatctcacccaaaaggtatactgtgccatattccgataggcctgtttcctggtctactacaccaagtggctgtgtatcttgacttacgctggaataccatcgttcggccagaccggccttactgcactgaacgagtgttcttatcatatgcggcagctctcatagagctacacagaactctcaatatatatgtacttactacactcatatagatgataagaacttgttctccagcttgatcacctgagctgccctgcaattgcagatatcagctcggctcatccgcatgatcttcgtcattgcaaatctactataaagggtagttttacgggatcattttttgtgccatcccacccgcgcgcagctatattatagcttgaagcaaagatcctcatggcctcattcgatatcaaccaggaacgtgctgtgatccaggatgctgctgaattcttgaatggtgagatcactgcgcacttcggtgcaacgtgcgaatttaagccaagggtcctgatcatctgcggatcaggattgggcggcatctctcatgtgatttccagtaatcctcagcctctatccgttccatactctgccattccagggttcaaggccagtacgattgtagggcatgctggagacttgttatttggtttcatgaacaagactcctgttgttctcatgaagggtcggctgcatggttatgaaggtaatacagcgcaggaaattacccgtccaatccgtattctcaacgaattggggtcaattggtgtattggtcgtgacaaacgcagcgggggcggtgaaccccgagttcagcgcttgtgagctcatgtgtatcaacgaccatatcagtttcccagggctatgtggatttcatcccctccgcggcccgaacttcgatgaaactgggccgcgattccttgctacgagtgatgcctacgaccttaaattgcgccagctactattttccaaacacaaggagcttggaattgctcggcgtctacatgaaggtgtgtacgcacacgtatcgggccctacgtttgagagtagggcggaatcacgtttgattaggcttgtgggggcagactgcgttggaatgagcacagttcctgaagtggttgtcgcgcgccattgcggctggcgggttctcgcgctatcgcttattaccaactgtgtcgtactatctcctgctgccagcgctttggatacgaaccctgtacctttggatttgggcaaggcagaacactcagaggttattgtaaacgccgcagctgcgtccgctgacgtagagcagttggtcgaagcggtggttggtgcactttaggctggtttcggaaactgcatttgcgtttccgctgtgtaagtacaaactacaattttacgctctatacgtattataacaagataacacatactatttctgagtacaaaaatgtgcgggggtgatcattgctctatttcggccgcggattcccacttgccctcgaggttttccttccatagtgtaaccttgttgtccccaccagataatgctagaatgtttcccgatagtgaccagctagctctccataaaacgtctgggaacttgtcttcttttaggagggtctttgtccatggaccctggttgttttcctgggtccaaataatacatgtgcggtcctgtgaaacggtggcgaggtatgcgcgtgggagaactgacggagaccaggccacatcccgtacccagtccgcgtgggcggctagcgtgtcctctaacaggtaggtattcgcctccgggttgtacttccagatcttcacgaggttgtcggccccgccggtcgcaatccggcgtaggtgctgtgactgctgtccgtcgtcttcgatcgtggcgggcgcccagcatgcggcgttgacaccaatggcatgtgcgtcgatgatgatcggcgacgtcgtgccgttctctttgaactcaaccaccgagaacttgccgtcgctggaggagcacagcaaaagaggcccgtactcgtgtggcgcccacttgaccgaattgacggacgcagagtgcacctcataggccgcgatttgcgaccagcgcccgttttcctccttccatatcaacaccttgccatcgtaggagcacgacgccaaaataaccccgaatttggggtgtgcccagtcaacctgccacactggaccctcatggccgtgcagcgagtctactagcttgtgtgaatccccatcgacttcgaagatctggattgtcttgtccgaagaacatgttgccaggcgctttccgtagtaatcgagaaccgcatcgtggattagctcggtatgtgcattcgtaatcgtcaccatattgacaatcggacctagctggtggaattgtggtaggtattcgaggcggcgaggaccaccttcaagagtgtcaaggatagagacacgaagcacttggtatgggtggcaatagccatgtgcgggtaacactttgtgccgtcgccggtgatgtgaataaggctcatcgccagcagatgaggcaggtagcgccacttcacctgagcggcgaggatccaaaaaccctcagggccatttactagtccatcggaggcaggcagtgaccgcggtgtttgtcgatgtacgagcctgtatcgaattacgtgctggaggagctgcgggagcagataccgaagatcagtgttcggggcgagccggagagcatactgctgtcatgtctataccaggagctgctctcgcgggtcattgaggagtccaagcgttttgcagacagggacagcaccaagcacatcacagccgagcacctagatgaggcggtggaggcgttgctgggagatgtagaccgaggcgcggacggggcatggccttgatgtaagtctatgtacaggatattagctttcaaaatgcatggttggggtacttcagcgtttccaccatggaaagggcgctggcggcgtcgtttttgttgagcacgaagaggccctggagctgcgcggtcgacactgggacgcctagcgcgacggccttggcgacaaactccgcgcagagcgccgagtcgtccgggtagaagcgcaggaacatctgctcgatctggtgcggcgttgcgttccccacaaggaccttgtagtcgatgcggcccgggcgcagcacggcggggtcgaggacctcgggatggttggtggtcataaaggtgatcatctcctcactggaggcgacgccgtccagggcgttgagcagcccgctgaacgtgacgccgttggtgtaaccgtcgtcgttcttcttgcgcttgacaaaggcggcgtcgatgtcctcgagcagcatgatactgcgctcgggcaggttgttcatgaggtagttcaggcggtcgtccgtgagattgctgtctgcaaggttcatgatgcagatgttgtagtcgagctcgccggccagtgcctggatgaagctggttttcccgctgcccggggggccgtatagcaggtagccgcggcggtacggtatgccgcgctcgtggtaccagctgccgttcttcaggaactcctgcacgtcgccgaggatcgcctccttgacgccccggtcgaagatcacgctcgacagcatgcgcttcgccttgggctgcccgaagggccgccattcgttcgcccacgatgtgtagaccaccgtcttgcccgtctgcgccttcacggccagccgcttcgcgtcctgcagcaggtccgtgaatagcccgcggtcgcggtacagcgtggtcagcttcacggtctcgaacggcgtcccgttcgaaaagttggcaatctggcccgagcgctcgcgcttcaccagcatgaacgcgcccttgtaccggatcaggtgtgtccccgggcccggcacaaagctgatgttcgtggtcaccgacccattgttgtgctgcatgtagtttgtctccacagagaggtgccgcgatgacctgctcgggtgctgcgccatccactgcaaaaaccacaggtacgacttgtccttcgacgggatctccaggtccaccagcatctggtggtacgcgaggctgctcagccggatcacgcccttgcgcagaaccgcgattgtagtccccagcaccatcagcccaccgcctgcagcgaagtaaggattgccctccaccacttgtctgaacaaccccttcgccatgccgcccatggatccgtcagactcattccggactttctccagatcaatctgcggtaccccactaacgcctgacatgattcttgcggcctgtgtgctatgtatagctttttattacgattctacatagagcgcagacccgcagcgctcagaatttttcaccatgcgatgaggcatcgcaccacttctagtcaaaatcaactacaccccttcataggttcgagccatcgggcgcaacgtcgcgccagttgggaaagcggaagggcacgttgtccggcgagagctcggggaaggtgcggtcgattaccgccatcagctccttgtagaacacctcgtagcctctgccggaatagtggatgccgtcaactagcaggtcggaccatctctcgccgcccgcctcgctgaacgcgcggtgcaggtccacgaagcccgtgcgctgctcgcgtgccacgccggccagcgcgtcgctgtagagcttgttgttcgcgttgttgcgcgagcccggcgtgacgctgcccgactcgtcgcgcagccacttgtgggcgtcgtgcagcgccggccccacgagcacgaccttgatgttggcggcgtgcagcatctgcaccatctccgtcatattccgtacgtactctacaaggggcaccgtctggaccgagtccatcgccgcatcgttggtcccgaagaacacatacgcaatcacgatgtcgcgctctgtcgcgaggatctgcggaagcagcttgagagcccaccgagagttgtagccgctgaatccgcgctgggtcacctgtagcttgcgcgtgtacgcgttggtcagcgccgcgccgacgcagaactcgtctcgcccgctttctggcgagattctggtattgaacgcgaactccgtgatggagtcgccgaacatcaaaaacttcttgaagtccatttggccgccgtctagcttcctttggggtctctgatccgccgcaaatgatggattaggtggctccaacgatgctttgtagacttttttcgttgccgagcgtggaaagtcagtgccactgcagcggatagcgatggggctcgctacgatcatagccaggagagcatatggccagtgcggccgggcgcgaaagcgcgtgtcgatagtggggtccggcccatcggggttctacactgcggtgcacctgctgactcgtgctactgagccgctgcatgtaacgttgtgggagagtctgccgacgccgtttggactgtcacgctacggggtggcgccggaccacccggaggtcaagaattgcgaggaccggtttacggagctggcgaaccggtaccacgtggcggcgcagcccggggagcactcttttgaattcgtggggaacatcaccgtgggccgggacgtcgcactgcgagagctgctggcggcggaggacgccgtggtgctgagctacggctgcagcggggaccgccgactggggattgagggcgaggcggacacggcgggggtgttcacgtcacggcagtttgtgaactggtacaacgggcacccgcggcacgcgcaggacgccgcgctgagcgggttcgactgggcgcgcgtgcggcgcgtgggtatcatcggcaacgggaacgttgcgctggacatcgcgcgcctgctgctgacggcgcgcgaggaggcgctgtggggccagaccgacatcaacccgcacgcgctgcaggcgctgcggcgcgcgccgctcgaggaggtgcgtctcatcgggcgccgggacttcctcggcagcaagttcacgaacaaggagttgcgcgagatgtgggagctcgagcgctgcggcgtgcgcggccacatcgcgcccgagcacttcacgcccgaggcgtgggcggcgctgccgctcgaccgcgcgacgaaacgccgcattgacatgtgccagcagtacctgctgccgtacgccgcccgcggcagcaagtccgcgagtaaataccctcctccggcggaaggctactccaaggcctgggtgtccgactatctcaagacgccgctctacatccgcagggacggcgccggcgcgatatctgcgctgaccgtctgcaaaaactccctgacccctgaaaacaaggttgtacgtcacctggacgagcaattggattacgaattggacgtgcttatcacgtcactgggctaccgcggccagcccctcccggagtttggcgcgctcggcgtggcctttgacgcggaccgcgtatccaactcgcgcggccgcgtgctgcgccaagacggcagtttgatcccgggcctcttcgcgagcggctggatcgctaatggcagcagaggcgtcatcatgacgacgatgatgaactcttttgccgttggcgacgaggtcctgcagtacctcgcgcagagccctccgaaggaccactcccatggcattgacctgcgcgacagcacgcacaccacctgggccgactggatacagatagataagaccgagaagcagcgtgccgcccggggccagccgcggcagaagctgctatccgtggcccagatgctcgaggccgcgcgcgcacgtgatacataatatgacataagcacaccagctggccaatgatcttcttgtatttggatcgctatgcacgaatcaaaacgaaaatcttgtcgagatatcacgaccgctgcgctcccggcgggactcagaagccacgggaagagctcacacggacctttgccaagatgattgccaagcgcgctttgtctactttgatcccaccaaagattgtttcgcctaaggtatgttgaaccggcgctcctgcgcacgcgcaccgtgccctactaacccccgcagaacctgacctccgccggcagcgccaaacggatcgcgaacgtcgtggagctctacaaggcgttgccccagggcccggcgccggtccgccaagccactggcatgatcggcaagtaccgcgccaagtacttcgacggcgacaacgcctccggcaagccgatcgtgcacttcgccatcttcgtgctctgcctgggctactccatggactactacttccacctcagacaccacaagggcgagggccactgagctgccgctccagtcatatattccttctagctacgtatatacgaaagcctatatcctacagctcgctgatgtacatcacctgcgttccgcgcaggaacacgtccgactcgtaccggtggatcaccgggttctgctcgctctcgtagtactcgctcgcgtccaccagcgccacgttcatgaacccgtcgatcgactcgagcgtgccctggtacagcatcccggagtgcagcttcacgttgaccggcttgccaatgatattcgacagaaacgtcgacgacgacgtcaccgctgggccttgcatcgcggaactcatcgctgctgtgtgtctggcaccgcgctgcggcctccgctcttaacgtaacgctcgctcgtctccctgccgggtaacgcacgtgacccgcagtcgcccgcccgggtaacctcgcccgccgggtaaccgtgcacgcgtcgggccgggtagtgccgtcccagatctccagaatgcgctgccaggtccgcgacgcatggaagtgcgcccgccgcccggccgcgccgagccccggccccgccacagatagtgtatttacactatccctatccggcgcgtggcatacagccaaagctgcgcagcttgatcgcacacgtccactttgtgtactgccacgcgtaaacggacactataacaccgatctgcaggctatagtgaaggtcgcgacgacgatcttcgacggattccgcctatacacgcagcttcgcctttctgcgtacccctgaaacactactattaatataccaagaggcgtgcttttctcacagttgtagcctccctacagtactccaacagtgcggaacgcggcttggccagtgagacacggtcgtatatacagcaagcggagcgggagccttcggtagtctgcgggcatatacaggggcagaacgccaggtggcaacagctggaaacggacagcgcacgagcaagagccatacgtcaggcacagttggcggcagagcgcgaggagcgactattctggcaggaagggcttactttttccgccggtggagagtggaaagtttttcgatctggcacagctaagtaggccagtcgaggctaggagagcagcgaatgtcggtgtcgcatagggggagcatagtctctacggcgacggggggctcgagcagccgggcgggcgtggtgccgtcgtgcacgcggtgcacgctggcgatcacgacggggcacgcatacgagctgggcggtgacaggtggcacacacactgcttcacgtgctacaagtgcgacaaggagctgacgtgcgactcggactttctggtgcttggcacaggtacgcttatttgctttgcgtgctccgactcgtgcaagggctgcgggaagaagatagacgacctggccatcatattgtcgtcgtcgaacgaggcatactgctcggagtgcttcaagtgctgcaagtgcgaccgcaagatcgaggacctgcggtacgcgaagacgaagaaggggctgttttgtatttcctgccacgagcgactgctggcaaaacgcaagtatgcggaggaaaagaagcgacgactgcagaaggagcttccgatcgtcccggggcaggcaggcgcaacgacaggcacgtccacgcctgaccgcgaacagttcaagatcccggtgcgctctgcggcgcggccggtgtcgccgcgacggttgagcgagccacgacggctgagcgagccgcgacggctgagcgagccgcggcggctgtcgcgccgcggctcgtcgacgtcggagaacacggtgccgtcgaccaagagcacgagctacagcgcgcagcggcccgacgcagactccgcggcgagcgacgttgtgcgcagcaacacttcacaagggctcggcacggtcacgaccgccgacacgagatccacgagttcgctggggcctgccctggatccacaggagagacacataaagagcaactcatggtctgtagttgcccagttcctggaggacgacgatgatggaagcgactatggtaccaacacggatgcgccaagcatcaatatagataagcactccagcgagtcgccgtgcgccacagcgagtgcagacagtacatccgacaacggaaagcgcaattccgcggtgcaacctgcagccaagggtatagggaccccgccgcgcgagagtgctgacgacgagagcagctcccgtgagcaggacgttcgcaagcgagcttcaaaggatagctacgatgtagtcacaccaaagtcgcatacgcggaacctctctgtagacgatgttcttcagcggacgctgacgaaagactactccgagagcacgagcaccattgataatctagcgccgccggcgaacgatagaccgcggagatttcctttgaacaagacgcctttacggaatagggacgaatcgccgatcaacgggagatctcccgtatctcataggcgaggattaatcatgtcggaaagcggtgaattcattaacgagcttttggctagccccaacaacgttgaacatttaaagaaggataatgtagctctatctgagcacatcgacgcgcctccattagtgaagggacttgaagatcccgtcctccagaaggataacactgctgggaaacacttcaaagtttctggcgcgttttccttctcacctaagctggaagttgccgcgggcactgttgggaatcagagtcacttgacccattcggcatcttccagctcactcgatcctaaacatgtgagaccgctcaacggaacagggaacacttccaacaccggaactccaaacaagatgggatctaaacttgcaagatctgcttctgttaggtccaaagtagctagcctaatacatggcaagaaaacacctaccagaaatcaagcaccagaaggtgcctacgatacccataccggctggggtgtttcatctatgtctcagcagcaccccgccggtgctgccacgaattcagtgggacgaaaactgccccctcacggtcgtggccaaagtgattctaccatatacaatcagttttcacccacgctcaatactagaccgtcgttcgatcaccagcggtcacatagtggtaccacaggtgcaactaatgttgctatccatatgacgccacctctgaataccatggactctccgtacagtaacagcgtgctggaaaggaagatgagcgtggggaggaaccatatagtcggcagggacgccttaatggaaaataggacaccgacgaatgaggaatttgttaggcgcgatataatcagcgaagaattgcagctgcgccagctcaagctagagataaatgatttgcaatacaccaagacgcagctgacatcagaagtagaccagctgaagaagctaaaagaacatctacagtttcaggttgatcagttgaaaactgaacggaaggacctgcagaatacaggaacttccgtggaatcactggacgacgtgcaagaagtggttgtaaagcaggcagtgactgcaaacacatcctccaatttgaaaccgcggttctggaaatttttcagtggcaagccatcctcatcaacggggtccgctagtggaagttctggatctggaccaagcactggaaaccctcagataggcatttcacatcctgttcttcaaaatccaaacgagtttgacgactggaacttgaaagctgtaaacaacggtgcagaattgtatggatcgtcattggagagcagagtcgcctttgaaggtacagatataccaatgattattaccacatgtatgcgccatatagaatccaaggtggaatatttgaccagcgaggggctgtaccggaagtctggctcacagcttctgatcgagcagatagagggcgagtttacccagtggaagccgaatacacctcctcccgaacggctgctagagtttctgagacaggacatccatgccgtcagtggggtgctcaagcgctacctccgcaagttgcccaaccctctttttacatttgaagtttacgagcccctcatgcagctggtgagggacgagaaactaagttcttccgtacccctcaaatccgctaagtctagtcccgtgtacgcgccagcaatagagaagctggctgccatcctcaagacactgccgcccgagcatctgcgcgtgctgtcagtcatttgccagcatgtgaaccgcgtggcccagtaccaggatgcaaacctaatgaacatgaacaacctggcactggtgtttgctcccggtattatcagagactataccggcgagaaagacatcatcgacatgagggagcgcaattatctgattggattcatcttcatgaactacgaggacattttcgcgaaaatattttagttttcttaaaggaatcttccgtgtacacagtataaaagtcatctatacattgaccttagcatccaagctgcttcagcggatgtccttgatttctgggctggagtacagcgccaacttcttcttgcctacccgcagcaaatgctcaattgcaacgaagttcttgcgaggcaggtccttatggcgccgaaattcctctctgatgtagcctatgaagtgaggcctgttttcaggagcctttgtgtaggcgaccctgatgaactctcggtatagatgcagaacgtccttctgcagtccactaaaccgcttcaccatgactaggggacctgtaactctagtgattcagtcaagaatacgcccccccgtagtattgctgctcattaagaaaagacgttggacgcattacccaccaaaaattctcgaactttgagatagtttcaccgaaaaaggcccctctcgcgcaagggctccccaggacataaagagtctaggagaagtgtgccaaagacagcagatccagaattccatcatgctgtggatagtgcgattctcacaatgcaggctcttcagcttaccgttcgtggcggctgggctcgcgccgcagcttggcgagatgatgccccttgaccccgaattggctgagtcgcacaggatcggctatgtgcagtgggccttatgtgtggtgttttttgtatggtacctaattgtggtggcattcgctaccagtggatggtacgagatcatgaccaaattcacatcgcagatggcgagtcagcgactgtgggacggggcgggcaccgaggaagagagcgaggcagcggtctcgatcatccgcccctgccgcggcatagagcccgaaatggcaatgtgcctggagagctgcatcaagcaggaatacccgcccgagaagctcgaggtactgttctgcgtcgagagcgaggacgacgagtgcctaccgatactcacagcactgctggcgcagtaccccacgcgcaacctgaaggtgctggtggggcgggaagcgttcgggcccaaccccaaagtgaacaacctcgccaaggcgtaccgtagcgcgcagcacgacatcgtgtggatcctcgactccaacgtctgggcgccgccgggcatgctgcgccgcagcgtggccagcctggccgggtcgctggacaacgggcgcaaaactcggagaccggtggtgctgacgcaccacatcccgctgggcatcgggctcaatgcgcagagccggagcgcccgtctcgaggagatgttcctgttcagtagccacgccaagttctacgttgcgttcaataaagtcggcgtcgctccctgtgtcaatggcaaaagcaacctctacagacgcagcgcgctcaaccgcgccgtccaggtgctgggcgacggggctgtcaccagcgccctgttcagggacgatgccatcaagcgctgtgccaggttgaacgcgctgaagactgcgaactccgtggcccacacgcacctcccgttcacgagaatcacctgggcccagaatgagctccgccgcacggtcgtcggccccgaacagcagcaacacagtcacggcatcgagttcttcagcacctacatcggcgaggacaacatgatcggcaccgcgctctgggacatgctgggcggccgcacaggcatgaccggccaatgcgtgtatcagcccctgcactacagcgtgaaccacgacggcctgcagaactactttgaccgccgcgtgcgctggcagcgcgtccgcaagtacatggtgctcgccgcgacgctgcttgagcccaccacggaaagcatcctcatcggcctgatgggctcctacgctctcccgcgcctgctcgcagccgcgcatcccaccacagctgcgttcgcctactttgtccttcacatggcggcttggtgctatatggacaggatccagtacaacacgcttgtgcgcacgctggaccccactatagcctttggccatcgctacccggctgcgtcctacgagcgcccgttctataattggctacaatactggctactacgtgaagtcctcgccttccccatatggatcaaggctatgagcggttctgtaatcaactggcgggatagaccttttcggatcaagccggatctaactgcagaaagcctgtagtgacgacaccttgttagggaggacggacattttcggtaagcggaggaagattatttttggaacttggcgcagtgtccgcaagtttcagcctcttcgaggcgcattaagggactcagtgcacccacaaagggcgttctgagtgcagcgaacggtccccaacagattatgcgaactcgcagccggtgagagacattagtcagaatctgtcaaaactcactttttcggaggggctcagcgtcagggtactccaatgcgaatacggaaagctcagttttctatatctgggcgcacctaagcgtagccaaagcctcgcggatcttggcgatgcttgggcaggtattgtgcaactcaagagttcggtagggaccggaatttacagttccgtctgcaggtaggcaagcgaaaatggcgaatgtgagaagggacaataggtttaagggcctatcgaaccacaagtgttctccgagcggcttctttgcacaatcatggtgcgcagcgtgttgcggaggcgcggtagatgtatataaactgtgtggtcgggcacaatcaggaccataggcgcaccaaccatgttgcagatggcattgatgcataggcctaatgagaaacggaaggtggccagacgcgcatgtctggcgtgccgggacaagaagatcaggtgcgatggggaggcgcgggcggagcgtggcggggatcctgcggtgtgctcgaactgcgcgctgcagcgcctggagtgcgtcttcgtgcgctcgcagaggggagggcggcggcctccgaagaaacaattgccgcataccaagtttctgctccagacgtttgggccgatgagaatggcggaggcgaagctcgacaggggcgcgagccgggtacgtctggcaccgccgttcacgcaatcgcggagtcgcgattgcatggatgatgagctgagggacccgcgatactgcttgcaggtagccccactagaaacagcagccccgtcgactcccatgcgcgagtttagtacagcctcgaatctaggaaggtgccagcgatacctgctcccgccgcacgtgccccattcagggccgcgctcatcgccagtcgcccagccaggccagtgcatgcagcctcccgtttcgggaggcacggcgttcccgaaattgcccattgagcagcccatgcccccacacgcagccttccaccctagcacatgcgctgcgagtctgaagccttctcgtagggcatcattgggggtgggaagctcaccgtcagcatttcccttgccgttcacaagccatgctgtgcgaccaatgaccatgactaaccctgcagttcaattgatgtcctcgaaagactctgcggctggcagcacccagtgccgaagctcatgtaacaccgacacacgactatctccttttacctcgtctatgacattgaatactgtgcacaataacactgtgcgttccagtgacgcggcacagtactccgttggccgctaccacgctgactttggctctcttccatcggaagtggttgaacagtgtattgatgcgtattacatatatgttgaaccgcatttgcggctgctttcagactctgaggaacgccctgagaatgttggcacactgaactctgctgtacaaagcgccatctttttatgtgcatcaccttatgtcaaacatagtattacctacgattcagcgtatttcttagatatgttgaggaaaagctggcataaactggagaatgaatatgcaattgtgcagcatgttttacttctttgttacttctatttgaatcataccccattatcaggcaactgcaagtccacgatagagaaactaattcgcatcctaatacttggcaaggtcccggattctttagctcgaaaacacacggatatgcagcttgcacagtttgtgccgcgtgccatggctgagaactgtgctcatatgctgcaattgctgtgccgcgttttctacctcctccagaagataatgcttttctcgcaggattcaaaatggctggcatcgctcctgagctcgttgaatgttgataatttaatgaaggcattcataccagttggtgtaccaacaagctacaaatacactggtaagctattctccaccaaatcccacctgccttcaaccgaacatatgcttcatgtactttacagctcttggcaagagggcaggatacctaacaatgaatttattggcacgcttcaacaaatgcagcctagcattaatgcaaacgtctacagactcggtgatatgaatacaatccacctgcaatctatctcgaatttaaacgttaaagttgtttcggatagtatgcttcttcgatacctcagctgctgcagtcgagatgggataaagttccaacttgacttgagagcaccagattctgatgtgtccatgcaaagcgctcacggatttttaacacggatactttcagacttggatgcctggactatccgtcagttactgcttcagctgtttattctagcggatatcctctattcgctaggcctggccgcaaatgggatgccttctacaaggctccctgatatgaaatccagatacaatatgtcccaaccctcgaggagcaaaagaagtaatgccatttcatgctcgtcctccaactcaccgttgtcgacggaagaaactcatggctttcgaactgaggtttggtgtgatgaagaatacatttcaaagaagtcaatactacaacttgaagagtctaattcaagcacagaaatgttgcatggcgacggttccgcaggtgaagcggtcggtgtatcctgcgggccctaccccgaattttttgataacctcctggtagacatgctacctaccctggtagtgattattcttctattcagtaactacgtggtgccacagtatgctggtggtaaatggacattcaaatccccagctaaaagaagaatccctataggagatatgacttttaacggtgaattcaaagatatatgctcgggaactcttttattccatacaattcccgcagaagatataacccaagatgtggtttttcaaatgttagataccattattaacggaaggtctatattatgccagctgcgttcgtatgcagataccgtggttgtaaaatctcaaaggctcaattacaatagtgccataagtcggaacctcacaaaattacttgcgctccttggagcagttgtataactattagtactagaaacggaaacaggtttcgcgtgtcgcatatgcggaattgtgaaccaactacggcggagttgtgcctatgctgatggaagcatggtccggtaatttatactgtaactacaatggtacagatggcagtacggtgtgttgtgcatggagacgagaagttctggaaaccattgactatggctatttgactacacactgttcgccagcactatatcaaacataactattgatccaagtacgccctatatccaatcgtttccaacttttctgccttgcctagaacttcttcctcctgtttcaagagaaactgttgcatcaaggcgtggtacttggtgtcgtatgctcctagaagtctaacagcgagtagagcagcattggtgctattgttgattgcgacggtagccaccggcacacccctaggcatctgtacaatagaatgtaatgaatcgaccccatcgaggactgaacccttgacaggcaccccaatgacggggagaggggtcatggccgcgaccattcccggcaaatgagcggcaccgcctgcacctgcaatgatagccttgattcctcgctcagaggcctcgatggcgtacttcgacatcctatgaggggtccggtgggctgagacaatcgtcacctcgtatgggacaccgaactgagtcagtatctcgcaagccttgctcataacgggtagatccgagtcggaccccattatgattccaaccaggggagacgcatccccctgtgggttatgcccatcctcttccaaactcactgccccgccggtgatgaacctgagtttgcgctccgcttcttgcatggaggaagccacaatatttatgtggccgaccttcctcttcggcttcgactccttcccgtacaggtataccgaagctccaggagtttccagggcgcgctcacatatcgctagttccttgtccttcacttgcgggtcgccaagcacatttagcataatagcgtgtgtgttggacgtagccatcgatgagaacccccgcggcatcggcagcccaagaatcgaccgcaggtgtgcctcgaactgcgaggtcacacaggcatcgatggtgtagtggccagaattatgtggccggggcgcgatctcgttgaccaacagctcgccatcctccagcaggaacatctccaccccgaagatacccgcgccaggcagcgttgcgacggctctttcggctagaagcttggcacgtagctggattgagtcagcaacccgcgctggcgcgtagcataggtggcatatgttgttctggtgcaccgtctcgaccatagggtacgagaacagctgtccctctggcgatcgcacgatcatcaccgccagctcgcgcacaaagggcgcccaccgctctgcatagagcgatctgtcggccagcgtctccagcgcctccgcgatgctgtcgcgactcttcaccacaaagttcccccggccgtcgtacgccagcttgcgcgccttcagcatgtacgggtaccccaactgctcgccaacagccaccagcgcaggctccgtgccctcgaccgcgatagactccgccaccgcaacaccgtgccccgacaggtgctccttctgcacatgcttgtcctggatcagctcaatggcctccggcgtcgggtatattgtaagcgatggcatcttcgcctgcaggcccctcagcgtgcccacgtcaacatgctcaatctccacagtcagcacgtcgctgcgctgcgcgagctcctcgatgtccgcagccaccccgaagctgccctccacgtgctctcccacggcattgatttgctttgcgggcgagtttggcccgtccaacacgacggtcttcacgtttagccggttggcagcctcgacaatcatgcggcccagttggccgccgcccagtataccgacagtcctatggtccatagtgcgccgccaatctctctgtttcagatcttctatctttcgctctgtttttcatctgtgttagttatgtcccagcttgtatgcggcctattatattggctgcacatgagcccccctctattatgcatgtttaattctcgagcactaaactcgacgtagaaccttgaaaaatgcctcctccgaaggatcagagtcaagaaaatagagatgcgtcaaatgtctgcttttagaaagtccatctctaatatctgccgtttctccacaaagtacgataaagggccgatgttgccggcagttaccgagttaaagcttgagatagtgctgcagtacagtatcagtgtggctattcgtgggctggtaaatctcagcctggcgtaattatatataatgtgcgtatctgtaacaggggtaggaggtttacaggaggtaagcgagcggcacgagacatgaagccaattggactaacgggcatgggcctacagagcgcaggtgacagcggagaggaattgaagagcgggtggatgccggctgagatgccattgggcgagtacatgttccgtcggctgatgagcgcagggacgaaaacggtgttcggggtgccgggcgacttcaacatggggctgctggagcatatgtacggggaggctgtgtgcgcggagggcctgcaatggatcggcacatgcaacgaactcaatgcggcgtatgcagcggacgggtattcccggtattgcaacaagatcggctgcgtggtgacgacgttaggggtgggggagttatcggctctcaatggcgtggcaggcgcgtttgccgaacacgtgaaagtgctgcacattgtgggcgtgtcaatgcgcgcggcgcagacacatccggagctgcacggcaacgtgcaccacctcgtgccgcgtctgcggaatagtaactttgaggcgccgaaccacaaggtgtatagtgagatggtgagcggccgcgtgagctgctgctgcgagtttctggaggacttggagacggcctgcgaccagatagaccatgtgatcagggagatctggcggcacgggaagcccgggtacctttttgttccggccgacatgccgaacatgaaggtctccagccgtaatcttgtgcaggcgccaactatcatgcttgaaagcgctgttttggagcgcactaacctggcagcctgtgaccggattggaatagaaattttgcagcacctgtaccagtcgagcacgcctgcaatactatgcgatgggctttgtgacaggtttggcctgacgggcgacgtgcgccgtctggtggagttgacgggcatgtggaacttctcgacaatcatgggaaaatccatattggacgagacccagccgcactataagggcgtctattatggtgcaggttcaaaggagcggaatgcccttctgcaagaatgtgacttaatcctctacctggggccggtcaaggacgaagtgaatacctggaagtatacctttcagtttaacccgcaatcaatgatcatcgaattgcacccggagtatgttagccttacacgcaacggcgagcaaaccattttaaattcgggccacttgctgccagtgttgaggtccatcctagcccacctgaacgttgcaaacctctcatttaattacccgactgcgaagaaacgagtcccgcgtgaacaccaatacgcagcagacgagccgattacccagggcatgttgcaacatatgataccagagtgtttaaatccgggcgatgtcatggtggtggacaccggtacgttccaattttctgtctttgacatgaagtttccaacagatctcaagtgcatttcgcaatcattctatctttctattggtatggcactgcctgccgcactaggtgtggcgtgcgccatgagagaatttccaaggctccacctcgggcctaaacttgccaacgagggatacactccaaggttggtgctatgcgaaggcgatggggcagcgcaaatgacgatccaggaactaagcacgtttattaggtacgagctccctgtggaggttctcttgtggaacaatgatggctatacggtagaaagagtgatcaaaggtccgacgagatcttataacgacatcatgtcatgggattggactaaacttcttcgcgtgttcggggactttgacggtacgcgttcggaatcagtgagagtgaaggatttcaacagtttgattgaacatttatcctcatggaaatctgataagaaaagatcgaaaatcaggctgatggaagtcatactagacaagatggacatttcagcaaccctgaaggagcttgcaaagcagttccagcacaatgctgcctaacaggctgcgtagctactccgcagacgagcaacagaagacatgcaggggttatcgagagataacgttcgtatttaatacatacaatagtaaacgagaatgtaatttatgcataagctaagacagaggccaagatatgaagggtggtcttccatatgttaagtgcgtgcgcccacaataactagaagagagctggttctacgctttcccggcaacatcacttgaagtccccgatgtaacttcaggatcagggctttcagtgttccgaacagtaaccaactctagatttgttaatgactgaagaagctccaattttgattgcatactggtagtttctgtcttattccctacgcttagtgcatcttgttgtgcggtggaaatcaaggacaattcctgtaagagctccttcctttgcggagaaatagtgatctcagacttcgtcactccagcgctgcctgacaagggagttcctggagcaatgtataggtcggcaggagctcctgaaacagtatcatcattcgcagaccgcctaggggacactgggaagtactccttctttaaagtacgatacgttaaaggaaatataggattcaacttcttgttgatcaacatattcccaatgtggtgcctctcgatcctcaataaaatctttatcgttagacgcctgatcttctctacaagttgtacaaggtcctcctgtgctgtgcaggtaacagtagtaacgtcatccctcatggaatatgccgattcaatatcaatgttattctcatagatactcgaaatcacagagaggttctcggactggtggttacttgcggcagatgttcccctgatttcggtcgataccctactatggttactctgcggggattctttgactgagttggaattcgttggatcagatgatgcagcaaacgtatctgcggttggattgatcagtagcggatagaataccagactcaaacctttatccaaagaaaagtagtcaatgatgttagattgcgcatagcataagccgtccagtgcttctgtatgcttcatttcgtgtctaagtgcgatggttaaattaatcttcgaaaagtctgatttctccaaatcaaacgtttcgaatggatgcgtgagtggataattcagacacacgtttaaaaacctacccatatgcgccttattcaccgacatgaatttgtatatattctttaggtggccataaagttgggtcaaaacgcgcttcctcacctctcttgacctattcttcggaaagaatacatgctgcagacatgtttccaaattatgcattagtctgatacatttcaaagagctgtattcgaaaaactctggaaacatgataaagtccttgtaagttagcatatactcatcctttaataggagctcaatcgaaggtcccgaatcgtggtttagtctagagaataagtgaatcaactgaagtattatcactcttttgaacacatttagcacagtttggttgtcatgctgttgaagtactatgtattgaataaacttcaatagcagacccattttgggagtttcctgttttatggtaacatgagaagtaggatgtttgttgaatatcttcatcagcaactcactacttctattattttgggggttagttgaaccaataattgtaactggattcattttgctaggcttagcctgcgtaagaagggttgcactatccagatcatagtaaaagtcccatacatccttttgcatttcgaaaatagggttcgatacaccaacaatcgaaaaatagttaccagtctttttaaccgagaactcgttccgaagctcgtcaatcatagatatgtccatgtaagggaatataataacagaggagttctggaaataatgttgatgatcaaatgcattaataaagttggataaggcaagcacaaattggcataagctatccttagaaagggtggtagagttcaccattaacctccaagaagggtcattcctatctaacaggcttatttgtggaataaactgtctcaaaaacttcaaaacatgatccttgtagttgatattaagttttatggcatcatacttgatcaggtcaatctgcagcggtatttttgtgaaatgttcaggtaaaacttgcggcttgaatgaatcaaaccggtaaaccatagcaccttgtttgaaaacaatggaattgccgttgacatcatgcttgggaagctcattgacccgaagaatgtgctttaaggatttctcctccggatcaaagatctcgttgatgatctcgtcattgttaatggagttcaagatattctggaggactttattagagtgaatgcgattcataagtgataaatccaaactgttaatcatgttgaagcactcgataagaatgcggatattcggcatcttgatgtactcatccagcgccatcatcagcaaaggtttaaaaatgaaaaagttctgcagggacgtgcccaccgccaaggatttaatgacagcgccacgttcattggcgttatctatcttagcgtgaacaacattaatgaagaacagggggatctcacgcgcctgtgatagagatgtcttactactgcctgcattttcatcctcctctaggatcatagactccagacgcgacgagggcgatccccccaagtgtccatgagactctgccgttggtttcaaactgcccttggcgttatcgttcgggaacaactggaaggtctgtgcatacctgtccttgtaaagaataaaggtcgtaaaatcggactctcccggccgattttcaatcccgttcgggatcataaggcccgccaggttcgacaggttagagttcgtgctcttaaagcccggcaggttcttcggaaactggtgcttcagcaccggccccaacttgttgtcaaactccgctgccaatatgtattccacgttggtcgcaggctcgcgcgtggcctcgccgcgccccgcgcgccgcattggcccattccgcacgactgtgggcgcctgctgtagccccggccctgtcctgccctgtccctgcccaccgctcccgagtggccccatccgcgacaccatgtctgctgctcgtcctgtattagcgctcttgctcgcctctgtatgccgtggatcctaccgcgcccaccaaagcaaacaaacaccgtgcccactgcgccgcacgtcctccttttcttcgagttgccaccagcctgtaaccagtcggccaattcggtgcgcctataaatactcgtgctttttttcgctgcgatatccgcgacctatagctttccaggtccaaacactcccctcttagtatttgttatccaaatagtctcagaatctgtctttacgagtccgacacgtcttttgcctattgtgtgcgtacgattgctttcagtttaccaaaccgtcgtccgattaactactccggttgcaggacgtattgctatgctctacagtgcagcattgcgaatgcgagcgtgtatgcaaggtgttctttatcgtgtcagatcggagtgttggtcgtcacgtccagaacccaaagtcgtccgggtaatgagtctcctccgggtaacgcttaattagtcggatgagggatacaccgggtaacgtggtggctgtgggtgtccacccgtgccggcggcaggcgcatgaagagcttgtgatgctgaagaaacgtccaccatcaggagaacagatccggagctctgccaggctcccgccgcgcgcgactaccggcagctggtgccatattctggcattggcatgtggcgtttctaccacgtgtatcttcgtacaagagcatcggttgtggtcacgtggtttgccaagactgggaaagcagatgacgtgagcacgactactcaaccgagcgcgctcgagatggtttcggcgacatgtacgaaataattagatgcggtgcccacatcaggttccagagggtacactaaacacgcaagcaacacagtggggctaccagcagtgtcgtgcaaggcctgccgcagtgatgggcgccaacgctcgcgtgccgagttatggatcacgtgatggatctcgagcaccagtatccatcaggacaccgcattgcgacaccgcagcatagcgagtgaaatacacatatcgcaggcatcttctccgacacacgcatcaccgacaccccgatggccggagcgctagtggcattggccaggcgcacgcgatccgtgttggtctttgcgactactgcgctgattctcttctactacacggtagagaaccagatagacatgctaaactcgtatgcgcagacggagcatctcccacagatcagcaaagcgagcggcgatagcgcacccacgccgcccgacgacctcgcggatccggtgcagctagtggcgaaaaaccgctactttccgctacttttggacacctggagagatgccccgcaggtgcacgacacggccgaagtgcgccgcagggcacctcggtacgatactcttcatgccaaggtagaaatacgcgagcggccggcacgtggcatgcgcggtcgtgttcaggcgccggttcatctgctcgaagcggatgatgaccggctgcgcgctatccgcgatgcgttcatgcaggactggcagcaatacaaacggctagcgtggggccatgacggtatgcagccactatcagcacagccctatgacaccactggtctagcaacgaccatgatcctgtctctagagatgctgtatctggtcggggcgacagatgacgcagaagctgtgctgcaatttttgggcggcttcgaattccacgctgacaaaatgcccgccgattggaatgcgacctcggatcccacactaggcgcgctgataggcgcttacgagctgtcgcacgagcctgtgttactgtctaaagcggtagagcttgcggatatcatcttagaagcatttaacacgccttctggcgcggcaatggcgccgctagacgtacgatcacctctgcagaacaggcacccatatcgcaggagcgccctcgcgcatctcgcgggcgtaagcgtggagtttgcgcgcctcacgcagctgacgcgcgaccagaagtacttcaattccatatacggtctctacgaccttgctgccaattctgaagatgagtttgacctcgaaggcctcgtcaccgactatgttgaccctagtggctgcgaaataacaacatccgagattcgtgggatcaagagcattttccagggacggtacattggctgtaagcttgtaaggcgactgcgtccggccgtgggcgctcgcggtagttctgatgcagaaggcatacagtattactcatgggacgggctcgcagcgtggtgccgcagcttacaggacttagcgctcatagttacagacccggagctcagtgcagcgttcaagaacacgctcaaggccgccctggaggcaatcatgaataatatgattttccgacccgcccttccagaatcagctgctgcctctgagcctgatgaaccgctcttcgtcagtgcagtgcggacatggtcgtacaccgatgcgtccaccggtacggatgtcgtcaaggtgatgcgggagttcgacatgaccgacgcctcctgcgcactatctggggttcttgcccttgcaggtgcggcattatttgtggatgactccaagtataagtcaacggcaaatggcataatggagggatgcgcgcgcttgcagcagctgcttggaacaccggtggagcgcgtctacgttgatccatgcgatgctgcagactgttacttcgacgcagataagaagtcccaactattgtcagagggatactaccgcaaacagggggaccacaatgacctcctggatggagtaaagctcactaaatccggtgcagcccggattacaggtgccaagaaatacatttttgtcgacacggagcggtcgtacgaccgggatctagagtcctgggatcccgctcggccgttgttcgttaacgactgggaactgttgcagtcaccggaaggtcacatgattgaaagcttattctacatgttccgcctgagcggtgactcaaaattacgcctgcgggcttgggagcactgggaagccctggtcaagctgcacactgcggtcggcgcgaaaggagtggccgaaaggaaaccgtcagcttttcgcaacatcctggcaggcgaaagagaggacattctgccgccagaatggttcagtaaaagcttgaagtacctttatctaatgttcagcgatggcttaaaagtcggcaaccttgatgactgggtcattaccgccaagggtaatatgtttcgtaagactatttaaaattcagagctctgggtagcatcaccgtatggctccgccctcccctttgcatgccctaaaggcgatctcaggcattagtatattagttggattattagtgatatattgttcaccagtttgggatactgggtgatgaatcagaacacgattttcgggtaagcagctgcttgatttgcgtcacctcttgccgtagggaactgacctccgctgagagattgtggataatttgtaccagcggctcattcatgcccggccccgggacggccgaagactgcgaattattcccggaacattgctggtacgacggaaacggcatcacctgaccgtcctgtgagtactggttctgtgacgatggtgccataacgaccgtggacgaggaagaggaagatgcagatgagggtgcgcgctgttcgcagagaatgatgttgccctcggggttgaaagcgaaggattcgagcagcatttttaaaagcttttccagctcgtcctgcggcggcggcggcggttgcgttgcgaaacgcttgctggtcttcttgtacagaaggttgaaacgatcccgacactggcgtgtgttacgtgaaatgtgtgattcgcgataaagctgatcgctgatccactgccagaacttgcgccgggggctcgatataaattgcgggtcgctcagctgctgcttgctgttcagcagaatccggagcagtgagatatcctcgtggggcttccaggtcgtccgcgcatacttcggaagcttgtagctgttgctgccctcgaacgagtcctgtggcgtcgcgctcgccaccgagccccccgagatcgcctgcggcgcaattgtgcccgacccgaactgctgcgtctgccccgagggcgacgatatcaccggtctccctggaaagccctgtccgttgttcacctccgagaactgctgcatgtggtggttcgtcagcggaggcagcttgatcgtcgacgcgtggtcgtgggccccgcccgccccgctgacgcctgcaccgtttctgcacgtgccaatctgaagctggtccttgttcatggcgccccgcacttgccaagtttgcaactggtacagcccggtctgctacctgtactgctggacttagacgcaatgctgagcccttccgactgctgagttttggatctcaaccgcttccctttaataccgcctcagctcctcttcacgtgcatccgtgttctggacacgcaccaatgcgtgctactggatgcggtactgacttatattgtctctgcgcgaaataatacagtcgctagttaggtttctgttgcttcccgcgctatacatggtattcttctggcttttttggggcttcggactttccagcatcgataagcgcagtccctgaaaccttcacttcctgcatctggctgcggccactgccttctaattccgtccattgtgaacgacttctcacgacgcgccacattgacccgaagctatactagaccgggtatggctcgcatgcgtgagcaaccaactgccgagctgccgacgtgtcgtcgcttgctttggccgtacccgcgttataccgccattaacggaattcgaatctaggctaccgcctgcatgcccgctagacgcaaatggccctagagaaagtagcgtacgaatctggaaagggcgcagttacgcaagtcgttcgtgagttctgtgaaataggccgcggacggtgatctgcactatcccggagcagggcctgcgcggttttctgtggcgcctgtgcgtggccatgtcaggcggccactgaattttggttgcggtcagctacggccggcgccctgtcatacatgagcagcgacatagacgaacaaacgcggttagggttatcgtttttacagcgcaccgcaacggtgccaaccttcgaagtgcgcggaggcactcccagcatcaacgagcgaagtagtagccagtacatacggctgggcgatatctcgagcggataatgttatgtacaatactaaacgtctggtccttagacaggcagagggtactcctcagtccagctgtagatctcctgggcgagctgggctatctcgtcggtgccgtcctcgaccttggccttgaagtccttgagcctgttggcctccttgggcagcgactgctggatggaacgggcgatctcgacagcacggttgatgtagccgacgatgcgggcgaagtcctcctcgcccatgcccctggtggtcatggcgggggcgccgatgcggacgccgccgggcacgagcgcggacttgtcgcctgggatggagttcttgttgagggcgatgttgatcttctcgcagacgtgctcgacgcgggcgccgtcgacgcccttctcgcgcaaggagacgaggaccatgtgggagtcggtgccgtcggagacgaggcggtagttgagctttttgaactcggtctccaggaccttggcgttcttcaacacgagctcctggtactccctgaactcgggggtcgtcgcctgcttgagcgcggtggccagggcggagatggtgtggttgtgggggccgccctggtggccggggaagacggagaagttgatagggccctcgaggtcgtacattacctcctcgccggtctttgggtgcacggagcgcacgcctctcctgaagaagatcatggctccccgtgggcctctgagcgacttgtgggtggtggtggtgacgatgtcggcgtactcgaagggcgaggggatgacgcctgcggcgaccagccccgagatgtgcgccatgtcgaccatcaggtacgcaccgaccttgtcggcgatctcgcgcatccgcttgtagtcgatcagccggcagtacgcggaggtgcccgccacaaggatcttgggccggtacagcaccgcgttcttctcgagcgtgtcatagtcgatgatgccggtctccgggtccacgcggtacgggaacgactcgaagtacgtcgataccgcggagatcttgcgcgtctccgtctggtagccgtgcgacaggtgcccgccgtcgggcaggtgcagacccatcagccgctcgtgcggcttcatcagcgcctggtacacctgcaggttcgcgggcgacccggacagcgactgcacgttgacgccccagcggtccggcgtcacgtggaacgcctccagcgcgcggcgctggcacagcagctccatgcggtcgatgtgctggttcccgccgtagtagcgcgcgccggggtagccctccgagtacttgttgcacatcggcgttcctagcgcgtcgaacacggcggtcgacgtcaagttctccgacgcaatcagcacaatcgagtgcttttgcctgtcaatttcatccttgatgatcgcgtccacctctgggtcgctctcgctcaggtgcgaggagatgagcttcttgtgcgattcggataggtggtatggcatgctgcttggtgcttggtctcagtcggcgctcgaaacctgcgcgagggaagccgaatatatatacgcgctggtcctggtccttgtacaactttatgactctgccgatgccccgcgagctggcgagcgagcgttgaaattgcccagccaaccacatgcggccttgcatccgtcaaaatgactgtactcgagcaatctgctgacagagcagacagagtcagaagtgcgcacgcatcacgtgggcgcggtcgaatcgaggaacgcgccggcaagcaggggctggcgggctggcgcgatggttaacaggaaggggtatttgttacatattgtatagtaggagatactgacagataatgatataataacatatggaatgttcatgaaacacagaaagcacaaggacatataggacaaacgggactactgtacaaacgcagtggatcggggtcggcgtatcctggcagggcacggaggcccgcagtgggcccgcagaccgggcggcaggacacgagggagcaatgcttcaatgaggaacgccagtcgctgccccgtagggcgcgccacggcattccgcctcggtgtcgctgccagccggcgttgggatgtgcacgcgggcagccatggctgccggcacgccgagcacgatcctaccgcgttgggggcaatgacgacgtgggtctaacggaccggaaatatagaacaataccttgcagggacggaaatgacgaagtatgaaatacattgaggctcagcgccagaaactgaagttttttcggaacaagcgcagctcaatccatcgagatgaaatcttctagctccagtggtaaaacacctgactgcgcttcgggcagaagagacgagggcgagcgcgcgccgcggcgcgccccatccccatggtgcgagcactgcgtgcccgggcgcccggcgcgctcacactcgtctcttccactggacaaccgctgctggattgcgccaatggtcaaagtccaccgagctatcagtcaactcgaacggctcgttcaggtcgtccttgaagatactgctgccgcccaacgggtagttctgcgactgcgttagtaacaggttccacgactcgctcgcggccggccgcccgccgaacgcgcgcggcccctcctcgtacgccggcgcgaacgcgccgtacgagtacgactccgccgcgagcggctccggcttcgcctccagcacgaagtcccggcgcccgaacgcctcctcgcccaccgtcgtgcacggcgagcccggcgtcgcgcccgacgcgcaggggctcttcacgctcggcgtcgtcgccgccgacagccccgcgccctcgtccttgtcgctgcgctcgtccgccagcgtgatcgcgaacgacggcgtgcccgagccctcgcgcgccaccgcctcgtactccgtgaccgcccggcccagcgccgcgtccccgcgcgccgccaccagcgcgcccaggtccacgtgcgccacgatccgctccagcagcgcgcacttgcgctccaggtacagcaggtgcagccgcttcttctcgcgcgactggtgcgccgccttgcggttgcgcaggatccgctcgatccgccgctgctccttctcctcctgcgtcttggcccgcttgcggggcggcagcgtcgacttgaagtccgcagggatgtcgttcacggtgtggcttgtcatggggatgggtttcttagcgaatggtctggttgctgtctttccacacctcgaaacccaccggcccgtagccccttatataccctccgctgcgccataaatagcctccgccgccccacgtccacagtgatgctgcggctgccgatacgcctgcataccgcggggctttgcgtgccgtcgtacggcctgcgcccgccattcccgcccgagacgcgcgcgcaggcgccgggcctagcccgcgcccgcatcatgccacctccgtggtgcacgggcgctcattacgtcccgtgccgccgagccccgccccgctgttgacaaaatagcgcataccggcaaaatgtttgtttacgtgggcgcctgtcggcactatacgagcattgttggctatttgtgtcaagacgtaaacggatagctccggcggcgcggcaatcgcggatcggtcaagccaccggagaggcgacggaaggggatattgcggcggatcgggcagacgcgggatcggcacgcaatccggcctgggggactatgtaggcgtagggctggccgggtcatcggcggatgtgcaggtcatctcgggcggcacgaggtagtgggcgcggtaccagcggagctgggcgatgctctcgaggatgtcggcgcgggcggtgtgggcggcgcgcttgcggggcgtggcggcgtgcagcgcggggttgtggcgggcgcagacctcggcgagcgaggagacgtcgatgatgcggtgggacaggtgggcgacgacggcggggaagtcgcgcagcatgaacaggcggtccatgtgcacgctgttgccggcgagcacggcgcggccggggcgggggacgagacggcggatgtaggcgagcagctctgcctcgacctgcgcggcggacttggggcaggccagcgcgcgcgcggtgaggccgctggcgccgtggtgctgggtgcaccaggcgtccatggcggcgagcgcggcggcggaggcgtgcacgacgctctcgtagccgtcgtcgacggggttgaggtgcccgtcggtgacgaggcagcagacctcgatgatgtggtccgaggtgtggtcgaggccggtcatctcgcagtcgatccagacgatgggcttgtagagctcgccgggcgcgaggtaggggttggcgcggcgcgcggggcgcgagaggcagatgcggcggagctggcggcgcaggcgaagcatacgggtgtgctcgtgcgcggacgcttgcgctcgcgcggaaaaatttcactgcggcgccgcagggcgccggcgctggcggcggcaggcgtctggggccctgctggcggcggcagcgcgcccgctctgcgtgtagcctgcgggcgggcggcccccttttcaacagcgtttgtagctcgaacacaaaagcgaggtctgtgcagacacaaggtgcagcggatgttgcatagaggagcgacgcagagacttgccagtaagaagcgaggcagagcgtagagcatgagcgaggcagacgtgtggcagcaggccgccacggcggggcggggcgcggagcaggcgcatcgcgaggcgcgcgatgcggactcggcgtctacgtcgtcggtggactcggtgaactatctgcagtaccttgagaaggcgacggccaagaacccgtctgtgttgctagagctcgatccggacggcaacgtcaagtacgtgtcgcaggtgtgggagacggtggtggggacgcggtgcgcggaggtggtggggcggccggtgtcggaggtgatcctggggggcgaccaggacaagctggtgttccagaaggcggtggcgatgatgtgccaggacgaccgcagctgccgggtgcggtttctgacggcgctgggcccggagcgcgcggcggcggacggggaggcggtggtggagctcgaggcgcaggggacgctgatccacgacggggagatcagcagcctgccggcgcactcgatgtggatcgtgaagccgttctacgaggtggacgagctggacgacttgccgccggacttcgtgaagcggctcggcttcggggcgaagctcttctcgcactacttgcagcagatcgaggatctggaggtgctagacgagcaggagctcccaacgccgaagtgcgagctctgccgcgtgtgcgagacgctcgtgccggcgtggtggttggagacgcactcggagatgtgcgtgtgcgagcaccggatcgagagcgcggtgcagctcatccacgatgagttggtggagctcaagaggctgatagaagacttgaccggcgcgctcggccagcccggcgcggcggcggagtacaagggtctcgcgttgccgcagccggaccctagcgacctgggccctgcgaagcaggcgcccgtgatgctccatccgtccctgagctgcccgaacttgtccgacgacgagcacaacccgttccgccgcgcgagccgctcgggcaaggacgcacggtcgctgttccaccacgtgcgcttccccttcaagcagctttcgctgttgagcgatttgtgtgaggacgccatcaacatcaacaccagcgagttgctcgacgcggacgtgcgggagcaggactcgccctacggccttcttaacatgcagtcggttacatatcgcttctctccgaacaccaagaacaacatagatcacgtaactgcctgggatgcccaattgggggtcgacgacccagccataaacctgttgacacaggataccgtcgagcttgttaaacggaaggtggagatggtcctcaggttagacaatacgatgaggcattcgttgaagataaagcatgaggtggattgccaggttgtgaatttgataaaggataaaattgagagcaacaaaatcaacctgcaggccgacgaaacgatgcaggatctgggacaggccgcgcagccgctatttggcacgtcttgcagtccatcctcctccagaattgctacaccgcttccacagaggccccagagccgtattctaacggacagctacatggcgtcgagctccgtcacggacctgaaggccgtcatgaacgtgggtatgccgcccctggactatacctcacggtccaactcgggctcgcatccgctgtcgcggtctataacgccgcggcaggctattaccgaccactcctcaagcgcctaccagctgccgctgacggtatccaacagtaacacatccggaggcacgcccgttgatacgaaaccgcccacgattgggaccccgcgtgcctcctctacctctcaatgcaatctgcccaagctgagcactatcattaatctgacgcctagaagaggctcgccgctgtcatctgtcggcatgaacacaccgttctcaacaatacagcggaaaagtactgtcaaaagcatcggagagaaatctccgatgtcttcaccatttatggtcgggtctgacttgttgtcaccggaggggcacttaccatcagcgactgccccgaagcctcctctatcgcccttgttactagcaacaaaccaagccaaggcaccaacgccatccattaaagattatgatattattaaaccaataagcaagggtgcttatgggagtgtctatttagcctataagcgcattacaggagaatattttgccatcaaggtactaaggaagtccgatatgatcgctaagaaccaagtgacgaatgtgaagtccgagagggttataatgatggtccagagtgaaaaaccatacgttgcaaagttgtacgccacttttcaaaataaggaaaacttgtttctagtgatggaatatctaagcgggggggatttggccacactaatcaagatgatgggcaatttgccagacaaatgggcaaaacagtacatcaccgaagttattattggcgttgacgatatgcacatgagcgggatcatccaccatgatttgaaaccggataatttgttaatagactcgaatggtcatgtgaaattaactgatttcgggctttctcggataggtttgattcagcgtcataaaaagcaccatagtagacattgttctatccaggcggtgacgtcaaagtcgagacacaacagtctaacaccggatgaagctctagagcaaaacggagccgttacctgcacaccaagcaacttactcgaaggactgatggtcagtaggagaggtgagcgttccgattctatttccagttcccattcccagctagatgcacagactttacatcgaactggttcacaggtgtccttctctattatggacatatctagatctgggacgccgcctccccctctgcccgctcctatagcgtcccttcagaatcaactgtctcaacaacccgggcaacagcagcattcgcatatgaatcagccgcaacaactgtctttggctccttcaagtagtggaagcatgcccaagagaagcgcgtcggtgttctcctctgacaactctgacacttcccgcgacttcgccttgttccatcccgatgaagatggaagcaggcggtttttcggcacacccgactatctctcgccggagacaatattgggcacaggtgaaagcggtgcctcagattggtggtctgtgggttgtatcctcttcgagtttctactaggctatcctccattccatgcgtccacggtagaggacgtcttcaagaacatcctcagtggtcaaattgattggccttcattcccgaacaaagaaactgaactggaatacctttcgcctgaggcgaaagacctaatattgaagctattggaatcaaatccagaagagcgcttgggcgcgaatggggcgcaggaaataaaggagcatccatacttcaaaggcattaactggagcaaggtatacgatgaagaagcgtcttttgtgccaactgttgataacccagaggatacagattattttgatcttcgaggagctgatttggatgaattgctgcgcgacaattatggtgaagatgatttgcaaagtactagcgggatgcatactccaaactcatccatgcggacggacaaaaaacagcccagcaaccacagtagcggcaacagcacgcctgtgccaaaaatgagtattgcttcagtttttgacccgctttcgcaagacaatacgagtagtaatagtaactcgccgatattgaaacatatccccttggcgattcctcctcatttgagggaaaggcggcctagcaagttgaatgatattcaaacagaatttggctctttcagctatcgaaatctaagcgctctggacaaagcaaataaagataccataaataggttgaaaagcgagcactactcagatcaccatcacgtcagggcatctcctggctctctgtcaagctcttcttccgaggcatcctccaagctaaaagccgccaacccaggctccagtgcttcgtctccaatctgcaataatgccggtaaaggaacctttagcagagcaggttctccgcagatggctcggacacattctccaagcaggcggaacagcatagagcagtcggctgctcccggcgccggtacaatcacgcagcggcgccacacctgggaccaccacattactctggataacgactatcctccaccaggcccgcccatcacaaagttcaagtcgcccctctcgccaacccagaacatggggacttctcgctcaaggatgcagtccaggacgtcttcccagcgcaccagcatcagcgaaatctcgatggaggacgacgagcgccacatagcactctccaaagtgaacaccttgcgcagccgcaggcgtagcggaagaaaaagctcctccggcacaagcgaggtgggatacaacatggatgtcttgctctgtgaacccattcccatccacaggtatcgcctcaccagagacctcgagtctttgggatgctccgtcgtcgccgtaggcacgggcgacgaaatcgttcgacgcgcaaccagcggcgtccgcttcgacctcatcataaccaccctgaagctccccaaaatcggcgcagtcgacatcacccgtctcttgcgccagaccacgagcatcaactgcaccacccccatcgtggccgtcactgtcaactatcatgacgcaggaacccacatcttcgacgacgtcctagagagaccgatcggaacggaacaattgcgcaaattggtttccaaatatgccctttttaaatctcagcaacatgaagacaccatcctgagtgattccgaaatgtagcaaccaatcattctatgcattcgagacttttacatatgctggctttatattttactattttactcgatgttgccccgtagcttttcacactcattatcgcaacagccttaccttgaagctttaacgcaattccagtactcaactggactacgaacacattaggcacttatgggccattctctttagtatcttattccacttcaactaggtcgctggcgccaggcagttgaaatggcctatgtcactatatacggaatacttctcgaagcatgaaattttgaaaatttcttcattaacaaaatctgcctaagatgttatccagcaatactaagcaggaattaccagggcccagctggcgctaaacgatccgaaatgccaaccatctctgtttacaaacagcagttatttgatttattggggaagaactactccaatgaggaatttgacgagctatgctttgaattcggtattgagttagacgaagataccacggaggaagctctcaagaacaacgaggagccggagctcaagatcgaaattggtgccaaccggtacgatctgctctgcatcgagggtattgcgcagtcgctcaatgagtacgtggggcgtgcggagacgccaaagtacaagcttgcggcgcccacgacgaagctatacatcgagccatcgaccgagcagatccggccatacgctgcagctgcgatattgaggaatatcaagtttgacgagcggtcctacgcatccttcatagcattgcaggataagctgcattctaacttgtgccggaacagaactctggttgccatgggcacacacgacctggacagtattcagggcccatttcattacaaggcgttgcctccaactgacttcaagtttgttccgctattccagagtaaagagttgacgggtaaggaggtggtggatctttataaaacgccagagcagaagaacaatctcggtcggtttgttcacattatcgaaaactcgcctgtataccctgttatctttgactctcaggatcaagtttgctctctgcctcctttaatcaactccgagcgctccaagatctccattgacacgcgcaatgttttcattgaagttaccgctaccgacagaaccaaggcggaggtagtgttgaaccagctggtagctatgttttcgcgctactgtgaggacaaattttcagttgaagcggttgaaattgtatctgaacacaacaacgaatctcgtatcactccaaacttcactgagagaaagattaatgtgtccgcagaatacataaactcttgtttgggtctacagctatccctggaggagatatgtgcctgcttaaagaaaatgtcgctgcacggaaagccagctggcaatgacaaagataccattgaggtgtcgattcctatcactagaccagatattttgcatccctgtgacgttttagaggatgcagctgtcggttacggttacaacaacttgcctaagcataacaaactatccaatgcgaactttgtcgctgctcctttgccaatcaacaaggtttctgatatcttcaggatcgcatcctctcaagcctcttggctagaagtactgcctctaactctatgctcgcatgatgaaaactttaaatttttgaggctagaggacgacggcacaactgccgttaagctagcaaacccaaaaactgcggagtaccaagtcgtcagaaccagtctactgtctggtatcttgaaaactgtcagggagaacagaaagcaggcattgcctattaaagtcttcgaaagtggtgatgttgtgttcaagaatcctgcgctagagagaaaggcctacaacgagcgccactgggctgctgtttacgtaggcaagaactctggttttgagattattcagggtcttttggggaagatcatgcagacctttagaacatcttggcttccagattacgggaaagactctgatggaaggggctactggattgaggaagatacctcaatcccaacctacttccccggtagaggcgccaaagttatgtttaggtctagacagggcgcagaggtcaagcaaattggccacttgggcgtcttgcatcctgaagttatgaacaatttcgaaattccgtacgcgggatcctacgtagaattgaactccgaggttttcttgtagacgaaccctttgtatcactttatatcgggtttgatgcctaaacgagccttggaattaattactcacaaattaatttagatatatccttttaaacaactgagattgtataatttttgaactaaaaggttatatatcatccgcaaatgcatatgtaacattttcttcatttccgaattcgtcgtccgaaagagcgatgtcggttcgacgaaggccccgttgggcatgctcggccacatccttcattagatcattaacatccttatagtttgtcatctctttgtctacaacttcttttaggtattgcaattcttctaccaatgcgtcggtatcaatgatcggagaagcgtcctctaaagtttgacatgactgttcagactgaactgttggtgccactgcgccattggtggtggtagcagcggccgcattgttccgtaagctatcctcgtacatttcttgccattgctcccttttcggtttgaaccacttcgagacccacgtgcctttttgcttcttatccttcttattagctaacttatcttggacatcttgtaggtcatgaattagctttctctctctcttaacttgctctggatctggggagtcatcaatttccgtgaactcttcacttaagactgcaacacccaatcttttgagtaaagacggaatattctttctgtacgccatatgtccctcaacaagttctgtacaattcatattctcgatgccttcgatgccttcaattggggatataccagccacagtttttaacccacctgcagttaccctaaataaatatccaagaatccagtctttatcagagtagccattaacgaatctaccactcacaactgctcgtgccatcaccatctcgtctctattatataccagaggagacccaaacaagtacacgtcctccaccaaaccaatagcaccttgcttgcttagttccaacaaacaagaataaataacccttgatccaagagaaaacccgaccagagaaataggcctagctccaagattctgtgccattaatgtatcagccaatattagaccagcggcccatgctcgatctagcgacacattccatggattgtctataatgtagcctagcttcgatagcagatttggcacctgaatcgctgccatgagtgccgtcaggacggtcgcgcctagtatctgttgaattgtctgagtcactatttcactggccaagatattgattgtttgaccagtcgacttcagcatatctggttcccagtgaagcgaatataaatctccttcaattggatcaaccggagagaatggaagtctaacatcatcctctttcccaatcatccatcctgacacacttacgattagactgagtctcctattattatgcaacggcctaaactcaaatgttttaacgctacccattcttttattcatggcctttcttcctatgttaccacctatcgcagtactagataccgcaactattgcagttcctcccgcaccggttaaaaatccggcagcacctgtaacgccaatggtagataatccagccgcaagacttgcgcctatgacaggagccagcagcccgcctgatagccccagaaccaaggaaccaccaatcgtgaccaatcccacatacgccagttttttctttcggttttctttgcgccgctcatgcatatggtttttctctatccaaacctgttcatctgtagactgctccagatctaaagtgtctataacacgtttctcgaattcacaaatatcgccacgagaaatatctaggacttcagcaaagcgcatcaataacgtcctagacctggaatcgtatacggaatcgtgcaccagcaaaagaaacaggtcacatattatcgtccatgaaacatcgatctcaagagtttggtttttcttcacctcgtctggcatcatgatatcatcgccgctcttcatccacgggttctcaataacctgagtggtcttgagacacttgcacaaatcttgcagtcttatcccatgcattggcagtttctggatcatttcaatctcctcggcactaacgcccaggtgagcgtagagtcgctggcagatagtactctgccacacccccatatttttctgcaaaatatgcaaacgatgcgcaagcttcttgcttgaggttacattctttgagcataaacaaagctctgccagattggtacatgtttggttagccagaaccgtaacagcccctagataagcaaacttcgcgcggtcgttcaacagcgtcttcgtcagcacaagctgttcgccggcagatcgtatgccaacaggggtactgtctctgtcgtcatatatggtgatatcttcagcaacagcagagcccatagagctgcccgcggcggtcttcctgaataggaaatcggtcttcttattcgttgcatacgcgcgttgcgcttgctcctcgccggctgccttcgtatatccgaacgcgccacaatccttcccgcggactgatgagtccagcgaagctgcagaatccataccggaaatgtctactgggctatccgataaccgcgttaccgccagctcgccgcgttcgtcgtaaacatcgtacgacgcaatcgcaggcatgggctgccagtcctcgtcggacgactccgcctcctggtacaccgtctcaagcgtcgaagtcgccggtgtcaccggggccacgctgcttctgggtgattcttgctcctgagggctagcgctgcaggccgaggcatcacccgaattcgcggctcgcaatttgctccgccgccgagagtcgctcagcgcccgcttcaccatgctgggcacgtctatgccttggtctgcgacgtccttggtactccgcatatgctctccccccctacgctctgcactcggcaacgcagagcctgctgcgcccttgactatgtggctcccactgcctatcttgagctcccgcaaccccgaagtcagattgtcatcacgcctgcccatagctcaactactccacttgtttccaggttccagctaacaggaaccacactagtaacctaccgcccaatatcgctaacatgctgaatacctaatagcttatgcagacccatcttgatcaagcagcatggtcacgtggtcattgactgtacatccatacatccaaaacccacacactaaatattacctattttggacaagtgatacccaagcgcataggctactggaaaatcacgatcactaggccgcgcattagaggcataagcttgccctctgtacagtctcagacagtagttgcaagcacttcatcgacaaaaatggctccaaacgtatgtgaactttgccgtggggcatactgagttttggaaacacctattcgatctattaaggaacaccaccgtccttgcgggatggctggggtgcatatatgctatgctgtattttaattattcaccgtttggcaagggcacggtgattgttaatagcagtaggcttccaaaaaggatgaggatcgagtactaacgtgttgctgcagacctccagaaagcaaaagatcaccaagaccttcaccgtcgacgtctcgtctccaactgagaacggtgtgttcgacccagcttcctacgccaagtacttggtggagcacatcaaggttgacggccacttgggcaacttgggcaacgccatcactgttgaggagaacggcactactgtgaccattgtgtccactgccaagttctctggtaagtacttgaagtacttgaccaagaagtacttgaagaagaaccagttgagagactggatcagattcgtctctagcaagaccaatgagtacaagttgaccttctaccaggtcactccagaggatgaggaggacgaggaataaatgttcgagcgtatgtaactagccgtactgtaagattattattaccttgtgtattagcgtggccttggttgggtcgcgtttccgaggcgggtctctacatagttaatccgatgggcgtgtcggactgctccgtttgcatatcaccccgcgcacaatgtcaaaggcgctgcccgtccaccatagcggcacgctcccgccccagcaactggcggacctgttcaaagacgctttccgcggggagctgtacggcgaacaccaggatgagctggccgagacggtccagcaggtgaagggcgacctgtacaaccgggactacatcgcggcgttcgactcgcaggagaagcgcgcagcatactgctgccgctggtcgccgtcgcgcgccgtggcgtactcttccctcttcgcacacctggcgcccgtgcgcaacgtcttgacctgcgctggcggcacctcccgcaacgttctctgcgtcggcggcggcgcgggcggggagctcgtcgccgccgccaacctgtttaccgcgacccgcgacttcgatgcccggcaccgtccggacgcccctgcagacgcaaacgccgcccgcctcgccatccgcatcgttgacatcgcggactggtccgccgtcgttgaccgcgtggccgccgccgtccgctcctcgtggctcttccacttggcccccgcgctggacgtcgccttcgcacacaccgatatcctgcagcctgccgcatctctcggcctgccgtcactcgacctcctcacgctgctctttaccaccaacgagctcttcctggagaacagggcagccactgttcgtctcttccagcgcctcaacgcagagtgccgctctggctgtctgctgcttatcgtcgagagcgctggcagctactcccacatcaccgtgggctctaagaagttcccagtgcagtttctcatcgacacgctgctgctcgggccgcgcggccgtgaagctggcggcccctggaccctcctgtccgagagcgatgccctctggtatcgcggtgatccggctgtggactacccagtcaagctagagaacatgcgctttttctacagactctatgtaaagaagtagggctaagccatcgccacccatgtcccacaggaatacgcaattgtccgtctctcagcgtcccagttaccaccaatgcggagctcatcgcattgaaggatttccatgccataaatttcagatcatgacatacgtaactgtaacctgatgtgctgaccctcggggatgataactacatatcagcaactcggcttctggcctgttacttataataggtttagttgcaggaggtagactttaacattttcgttagaaatgtcgttcttcaactcactgaagtatgtaatcacggtacaacaggtctattgcgggtagcagagtactaactaggagttcgccgcaggggattgggaagaacaagcaaaaagaacaagagctcgcccacaaggcctcctcaaacatcggtcagcggttctgtatacgggtcgccgcaggcgaacgggtcgcggatgtcggtgagcaaggcgaggtcaccgacgcagcggtctgtggtgcaggcagccgcagcggacaaggtggaatcgcagcaggtgatgttcctgagcgagccgtttgtgcggacggcgctggtgaagggctcgttcaagacgattgtgcagctgcccaagtacgttgatgtgggcgagtggatcgcgctgaatatcttcgagttttacacgaacctgaaccagttctatggtgtgatcgcagaatacgtgacggcggaggcgtacccgacgatgaatgcgggcccacgggtggagtacctgtggctggacgcgaactcgagacaggtcgcgctacctgcggggcagtatatcgacctggccctgacctggataaacaacaaagtgaacgacaagacgctatttccgaccaagagcgggcttccatttgcgcagcatttcatcagagacatgcagcggataatgatacagatgtttcggatatttgcgcatatctaccaccatcacttcgacaagtttgtgcatctgtcgctggaggcgcactggaactctttttttgcacactttgttagctttgccaaggagttcaatctgctagatcggaaagaaatggcgccgctggaactgctgatcgagagtttcgaacggcagggcaagattatctgacgttgtacgactgcctggtaggaagctaatcctgcaaataatcagctgctttccgcagaaggattatgcagcccaagagaagggttgaataatttatccctttattcagcctacgtgagtatatacaagttagaaaatatagatataattgataaaagcaactaaattttcatgtaaagtcgttgctatgaggttatgaacatgatcaataactttctgcaagtgggttcaagaaaagaagtacttactgttcaccaactgccggatatcgtaacttccctttggaggaataccagagaacttcaatgggactaaggcgcagacagactgatgggtggaagtttccatatcagtagtgtctttgtcagacatgaaagacacagtagtgaccatacgctcgccctccgcacgtagcactgggtcctctgaatttagcagattttgccttttacgttccatttccagctcgtccttcattgtaatcggccgacccaaagacttcgaaagccgagaccttagtagtaaaagctcttgacccagctcgctgcgcttttttatccttttaacctcaaggtagtttttatagcgggcgtcaaattcgttttttaatctttggataaggtcaacctgatgcattttgacaaactcgtttctaagcgctttattcatctttggaacatcactggcatgcgtccaataagaatcgtgaacggccgcgaactgtaagcctaacctaccacattctatcgcggataaaagcatatgcgatgcgtctaatgagtggataaagtttggtgggaaaccagccatctgcctcctaggatcaattggattcacagcaaaaggatctgcgataaagacggtctgtaggttggtgtgaatttgtttcttcttaatatcacggtatggctgtactactggtaagcccaaaggacttgtccaaataacagaggtcatcatgatggaattatccaacttcttgattttttcaagctctaaatccaaccggatagacttggatatcttttttgcactctctcctaaccagtcctgaatcaagtgcgccgcgtggaaaagctcacgaatactgttgaatacgtgcttcgtcagatatctggccatatcgtaggagttatcagggaatgcatcctgcagctctttatcaatctgattggttgcaccgataaaagtgacaccatacacattggtcatgacagtccgcttgacaaccttcctagtgatcagattttttaactgagctgcattttgatcaccttctagagctgccttttctagtctctcggtcactaattttgcgacaaaagcataaacatcctgaggcttgtcactgggcaccaagttaacctggcgagcaccttcgatgtcaccacccaaagctgcgtaatgctgcagaccattacaggtaccgtcttgatgaactggctgatgggacacatagtcctccggattcgacagtttataggcattattaatttccatgcatgtggcgagacattgccatggcttgtccgccttcttccaccagccttttccattcaatgggttctcggctgaatcctttatatcctctagatgggcctctgtaaaggcgacacgtgcctcgaacgtctgcttatccaatccataaagattacccatgtggattttcagccatctaagcccttccttcccgagccttttaccctcccaaaagatcaaaagcgatctagtcatgtcattacccaaatgattgaaatgaggagctagtgggtaagcgcgtccgcggaagtccatattatgagggaagtagaatttctctcctatgaatgccctcgcaatctcgagtttgtagttggcatcacatctcatcgacctatgcttttgatactctgcgttcagaaagcgacactcctgtttccatctcttcaatacaatgggttcaggttcgctgccgtcctcccctcgtggcttagctggaagtagcagctcatcttgctggggaggaatatctagaaactcagtaccagagttccaaaccttagagataatgtggagcatattcttgttcaccgtccatgcagtttcaccaagcacattcaagcccttgtaaacattttggaccacgcctttaccagtaaccgccttgatataggcggattgttctggtgagtccttggatctgatcagagtagatttagtaaagaggtaaccaccactgttccaagaagtccagggccttggcttgaccagcattggtaagtgctgtggctggaaatttgcacttaaacggtctgagctcatctggttcgccaaagacctatgaagtttcaaaacaccaactttgctgcccattctatattgaaatgtatgacagatggcaggtgccttaccgtacactgttttattggtaactgggtctacacctttcacgttcacctttgccacatggatcaacatagaaattaaaagagagccaaccttagccttgatattgtgcggccaaagaactttagactcctcaatttgtgtatttctaaacgtggtttttgccctttggaccagcttcttgaattcgttactattggccctaacttccttaaaaatcgatttctcactcttcaatagtgcttccgatctgtattccatctcgacagccttacctatagccagaaccgctctggttgttctcataccttcactgacgcctccagtagaattcaagcttagcaattccaaaattgttatgacacacattttctctggattaaccagagtgatataaggggcatattcaagccttgaacgaatatgtggacggcgttcagtaagcaatatatcactggcaagcagttcacgacatgccttcacctcttcctttagaagcggtatcataccaagataccactcccataactgagcatttagcgaacgctggacgctcagcgcacctctcgcttgagcttctgcaaactcatgcttccaccgctgcttcgctgcagtcactgacctactttcaagatcgcattggcgttcactattaaagtcctccaagaatgagtcaaaagcttgtctttccttgtcagtctccagagacttgtagatctcaaaaaaatctatgccattttcagcaggcatagatgctttaagtaatgggtcgacagccaagccactcaatctttctctctgtttctcacctagttccaagcccaataaactgtgccgaactgcccgcataccaaatgtgccaactgaccgaagttcagctgcgttcttatctagcgacttgatatcttcactcaacaagtcttcggattccgcgctaacaagttcaggctcctcctccacaacctccacagacttatccgtcgatgacacgccaagagaatcttgaacaaggcttctagtcactattgggacgtgcttcaagtcgcaaagtcccattttgcacagagaagcataatcttgaacacgcaaaacgtcattatgctcaagtagctgttttcgcgaagttgcaaattccataagcgttcgcacgtcttctttttgagcagagtatgggttggcactgagtgcataacgaactagaattgcagcggacttggcatttagctggacctctggaaaatgcttgctgatatcatcaaaaaccttctgtctcagctcctgaaccgatgcatcgctctttggttggttttcctcacagtaccgtaataagtaagaattgtagtcattcatgaaatagggtctatgggaatcgatagaatacagcgacttcagaatcttgaacgcacggtctaaataaccggtacacaggcatgcttcaagaagcgcccactgattcatcacgttgctccgctgactagcaagtatgggcgcatccgtagtgtcaaatagagcgaagtcgggcgaaatcgaaacactgctcgaacgttcaaaagaaacgttcatatcgttcgcaggagaagcggtggaagtgctacgtgctccggatagagccagatgcgtgacgccgacaccggtaaccatcgcagcacccacaggtggtcggctagcccagtgccgtgcgccatggcgtaataaattgccgcctttgaacgctctgtagtttcgcaacataatggctatggcctccgtttcgtaacaacaggtaaagtgatgagcgcaccagatttactatgccggagtagagctcatctctgcactggaaaattttaccaattacaaatatcatagttcaaaaagaaagtataaatcacgtgagtagaatttcgtgtggcggtgcacgggctcaaatatgttccaggtaaatatcacgtgatcgttgattataaggggaatacctactataatactagtctagtagaatcttcctgcgggtcacggcggtttcctgcttgtcgcacccttggtaggtttacttgcgaactaatattagggttctccagagctcctatatatactctgtccgacagctgatcagcactaccattcactgcaaacgctgactgggctgatgaggaggaaagttactaaaggttgagcaaatacacacttgctgcgtttcggaattagaccatcttgctccggggggttttggcacttgtgttactacattcagggctcttccgtttctctgaagtgaatatctatctcaggatacatataccgatgtcattcatctgaacaaatccaacatgcatttggcaaacgtactgggagcgtttatcagtccgaagcgcatgacctgagttgtattcgccgctaggtctgacggatgctgttttctagcagttttccgctgcgataggtatttgatattatccactgtgcacgttgataggtaaatatcgttgttgtaccaatccttgctaaaaatgatcaaccctagggcaccaaaatggatctctcgctgttattttgtttaatgttccataatcaacgcactagctatgatcgcctgctttctttgaaactgggatagcgtgactaacgtatggacagtgcgtcagttcgataaagcctttcgctaaaagtccgagaaaatgccttccattatttgcatactgtgaaacggcgtacgtagggttgttgtcttgtaggcgagtaccttgctgtagcgcatcccgtgttttacgcgatacagggctctgtatatgactcgcaggacaagtgcggacgaaaacgttcgagtcgagtaagtctgtgagtcttatggtagccgtaaattttgagtcttccccattctattattctttaagtttctcattcgtgggactaactgcttcaaatactgagacagcacggacttcaataaaaaactagtcgaacctggtcaggtttctgacttgctgaaaggtaatacatccaggagttacttcactttcgttagaggtaaaaagggcctggagtaaagcatgggcggacactttcgttgcatccgcagcaacagcaaccggagtgtctatagagctgcctaacagaagaaccttgtcaggatccaactgttcttttgcgactgtgaaacttggatggggtttccatttgcatcatgaatcacattgcaaatttctggtcacgtgggcatgcccgggcctataggagtcgtcaaccggacaattgctgccccacactcaccttcatcattgtgggaaaacaatatacgagtttcgcatcggatgtgatcttcatatgctatgttttgatctgttccatcaagttgtggggggatcggcacttgcgcatgtctgcaattccatacagccgatctttcccgcgttagatttgcgccatgcaagattgactttttttagcatacagcattgtgctatgtaaacgtgcggtccaattagcatagcatacgttacggctagttcgggattgctatttcgaaggttttctttgaattatggaaatcgctatgtgcgccccagctgtcgttaccatagagacggcagctctagagctgtaaaagtcacggccggcatatggcgctttcgagctgcgccatgtgggataacctaaagacaggcaggcgggcaaaacgataaccgtgacagtaatgattgtccatacgtagcgattacacaatcagaagaccgtttatcaaaatggttgttctaccctcgtcaccgtgtggcctgattgcctgaacgagatgggcaaagccaacaactcacagattaacccaccaagtcggaaataggcgggctatatgcgtcagttgcggaactttaagtttggaattaattcctatgcgggtgctgggacacttatgtgtccattttgccaatcttcgggcgatacttctcgtggaatatttcgctgtcagtgtacgcaactcatgcttacgaaagccggatcataagagtgattttcctcggaaaagccacaaaaataaaccccgcatggtgtgtctctaaatttctgcgtggggttgtagctccgatacttcctagcgcatgccggagttgtttttacatcggatctgctgtaccagcataccacccacctcttcgaaacactttgcaagtgttgggcggttagtgtagtggttatcattccacccttccaaggtggagacacgggttcgattctcgtaccgctcattttttacgtctaagagtcccgcggaagaagcggcaagtagcatgtatggcattaccaagacgataggccggtgctctgttcttccctgtttacgagtacaatacatacgcagtatttaacatgcaagacagcacgcgcaagcagtactcccatctccacaggaagtgagaattaaagaatacaaggaatgagctgatttgcgtagcaactattgtgcgcgctgtgtggaatagttgaatgttgcagtagaagcctaggctcgattatgacaacaatgacggggacaatcaggtatagtaaggataaggtatcaatcaaataaaaaacattaaaaataatcagtaatttttcggttaaaaagagacaaaaaaggaatatgatggactgctgctatattacctattcgaagttttcgaccattggctgttcatccccataattcaattcttcgtcatcctcgacagtagcttcttggtactgctggtactcgctcacgaggtcgttcatgttggactcagcttccgagaactccatctcatccataccctcactagtgtaccagtgcaagaaagcctttctcttgaacatcgcaccgaactggtcaccgactctcttgaacaactcctggatggaggtggagttaccaatgaaggtagcggacatgtccaagccctgtggtgggacagaacatactgccgtctggacgttgtttggaatccactcaacaaagtaggacgaatttctcgtttggaccttgtgcatctcatcttcgacttccttcaccgatactttacctctgaagaaggccgcgactgtcaagtacctgccgtttctagggtcggacgcggccatcatgtttctggcgtcaaacatctgctgcgtcaactctgggacggttagcgcacggaacgactgcgcaccaatggaggtcaatggtgcatagccgaccatgaagaaatgtagacgtgggaatggaaccaagttgacggccaacttacgtagatcagagttcaactgacctgggtaacgtagcgaggtggtgacacccgacatcacggaggagactaagttgtttaagtcagagtaggaaggttgtggcaacttcaaggtccgttggcagatgtcgtatagtgcctcgttgtcaatacagaaggtctcgtccgagtgctcaaccaactggtgcacagacaaagtggcattgtatggctccacaacagtatccgaggtctttggcgaaggcacaacggagaacgtggccatcatccggtccgggaactcctctctgatcttggagatcaacaaggtgcccatgccggagccggtacccccacccaaggagtgcgtgatctggaagccctgcaacgagtcgcaaccctccgcctcgcgtctgatcacgtccattaccgagtcgacgagttccgcaccctccgtgtaatgtcccttggcccacacgttgcccgcagacgactgcccgaaaatgtagttgtccggccggaacaagttcccgatgtttgagttccgcaccgtgtcgatcgtgcccggctccaagtccacgttcaccgaccgcggcacccatttgcctgacgacgcctcgttgaagtacacatttagccgcgcccgctggagttcatcggtccccgagtacgtcccattgaagtccaacccgtgctccccgcagatcgtctcccagaaagccgctccaatctggttaccacattgccccgtcgataggtgaatctgtctgtgtgttagtatttggctgtattttcgcccccggccgctgctccgccgctgttttgcctcccgcctccgcacacgcgaccgcgcccggtacgcgtccgcgccaccagcgtgcgcgtcccggagctcgctcttatgcgcctcctctgcaccgtcaacatacaatttctctcattttcctcactggtctttcacttcaagttgtggttcctgttagttgtaaactgtacaatatctgttttatagagatctgtaattattgcgagtttcaaaaggtgcggtccggtgtttttttctgttttgttttttgtttacgatttgccacaaagacgaatcccgcagccgggtaacgcggtacgcgtaggcgatcttgcacgtgacgtggccgtcgcgcgcgacggccgtcactccgcgtttacgcgtggcgcgacaccgcgggcccggcgtcgcaccacctggcggcgcggcgcggaggcacacagccagagtctcacgtgacttgagtgtgtgggtggcgggaccagacatgcccattagtaactacagctccacagcgtgagcaagagcttacgcggaggccaagaaacgcgggaggcagcttgtgacgtttgaagcagcagcagagcacggtaacagggtacagcatgtcgcaagtacaggagcacatcatccaggacccccacagctcgcagtacaatatccacgcgacgggggcgtcggaacggcagggctcgagcgagcacactgacggagacgtgatcgaggtgcacgcggagagcgggcgcgggcaggggtacgaggaggacgtggcgctggcggcgtttgtgccgctggagcggctgcaggtgaacggcataacaaacaacgatctcaaaaagctgcgcgagaacgggctacacacggtggaggcggtggcgtacgcgccgcgcaaggacctgctcgagatcaagggcatttcggaggccaaggcggacaagctgctggcggaggcagcgcgcctagttcccatggggtttgtgactgcggcggacttccacctacggcgggcggagatgatttgcctgacgaccgggtcgaagaacctggacacactgcttgggggtgggatcgagacggggtccatcaccgagctgtttggtgagttcagaacgggtaaatctcagttgtgccacacgctggccgtcacgtgccagataccgctagatatgggcggcggcgagggcaagtgtctctacatagacacggagggcacgtttcggcccatcagactagtctcaattgcgcagcggtttggactggatcccgacgatgcattgaacaacgttgcatacgcgcgtgcgtataacgctgatcaccagctacggttgctggacgcggcggcccaaatgatgagcgagtcgcgcttttcgctgattgtggttgactccatcatggctctctacagaacagacttttcgggtcgtggcgaactgagtgcccggcagatgcacctggcgaagttcatgcgggcgttgcagcgtctggcagatcaattcggagtggcggttgtggtaacaaaccaggttgtggcgcaggtcgatggcgccgcaatgttcaatccagatcctaagaagccaattggcggtaatatcatggctcattcttctactacgaggctgggattcaaaaagggcaagggttgccagcggctctgcaaagtcgtggactcaccttgtcttcccgaggcagagtgcgtctttgctatctacgaggacgggattggggacccaagagaggatgacgaagactagtttttttcaactcgtttagatatgtctatttgctagcaactgccattccattttgttttcagttccatcgccgtcatctttccgtgcctcttcatttccattccgcatataacttgcctctcgagaggccaaccttcttgtattatgttcaagtataccatatggttgtataatttacgttattaatacccatctgccctttctctagtttgcttctggggttttgtttctagctcctcgacggctatgttcacgtgtctgctgacgccacagaatgctccgcagcaaacagtcatgatttgcctacagcaatgaattttttttcgttctgacgctggatgggtgtatgtggccgggcccagcgatatgaagcaagcctcaggacgtctgatcattgccagacgctccttgtaagctgctactacagcagccaactagtcgccgcaggtctaagttcaaatttctttttttgtgtaaagcgccttgtgttgccgtagaaaatcaatacgaaatatttagttatgcaagaaacccttaactattcgagagtgcctattctaacagccaagctataacaatttctaatttgtttcatctggcattaaacacatttgatataaacagaagcagcctggagcaatctaagtagataacaagcccccgtcgctaatacctttattgcaagccgagggtcgtctattagttgtgccatatacgagaaggaagccgtttcggacagataataattgaaaaatataagctggaacagcttctgctattattttgacatttccagcagtttattatctggtagcactcgtcaccgataccaccactggcgtcgacgtcctcgattgttttcagtacagcgtagactccggtatattggcataaggcacatacgatggaatcaccgcgttcataccccccatcagaccaggcagaccaggcagaccaggcagaccagcagaagggctccactacgtatgaagagtccgcagtgtactcagaaaactcatacctacattcgctggtggagaatgacggaggtagtggggaaccgcaggctgggaagggccttccgccaatggatgcgctacacatcatggtacccgaccagattgacacaatacagctggatgggaatgtgccagtactagatgataggcttgacctgggtgtcggagagccaccgctagagctgcaagcactggactttgttgctgtggccgacagcttccaagcccaagctgaagcgctgactgttgcgccatatatcaacatagaactgaacggagcatttgataccgaggatttatctgagaaaccgcagcttgcagccggccccctaagcgaagatgctcgtgcttcgggatcatcaacgtcgtcaagggcacaaggatgctcctccttatcacttttaaactcccagagcacttcaactatgcatttaggttcaagtcatggcatgcgttcgagtgtcacaggctcctatgattccagaaaaccaaagatcaaaccagtagatctatcgcatttgtatttggtcaacaacagtgatagtataaccctaacacaaacaaatgaatcggtggcccacttctctcacaagatgataagtgagtgtttaggagatgactcagaatctattttagtgccgaggctgaaggcattggagatgtacaagaagaacgtaaagaagtccaaagatcctgatgttttattccaatacgcccagtatatgctacaaactgcattgactatggatgtcagtccaattatcgaaacggaagaccccagaagaaagggattgtgcaaaaaattgtcacccacagagaaccttaaggagcagtttctcaaagaggctaaggtttatttgactaaacttagtgtcaaaggctacaaagatgcacagtatttgctcgcagatgcatattcttcgggtgcatttggaaaagtaaaccataaagacgcattcatcctgttccagtcctctgccaagcacggccatgtggaggcagcatatcggacggcggtatgcttcgagaagggattaggcaccaccagggattcacggaagtgtatcgagtttttgaaatttgcggcttccaaaaatcatccagccgctatgttcaaactcgggctatattccttccatgggcgcatgggtttgcctaacgatgtcaatacgaaacagaatggtattaaatggctctcccgcgctgccgctagggctactgaacttacatgtgctgcaccctacgagcttgcacaggtttacgaaaacggcttcttggatatcattattccggatgaaagttatgccaccgaactataccttcaagcagctgctcttggacatgttccatcaacaacaaagttaggaaagctctatgagcagggcaatgaaattgttcctcaagatacctccctaagtgtgcattactataccgatgctgccatgaaaggggatccagaagccatgttaggcctctgtgcctggtacctcattggcgcgcaaccggcattcgaccgcgacgaccgtgaggcctttcagtgggcactaaaagcagctaagaaaggatacggaaaggcccagtatacagtgggatacttccatgaaaacggtaaaggatgtaagaaagatattgacatggcctacaagtggtatgagtgtgctgccgataatgaagatccaagagctcttcgcaaattggctagtcgtacggataaaaagaagagaaacagtaccgttttcaacttctcctttctgaagccagacgatttcgagtcgaaattacaacgtatggatgttggtgagtattcccctttatgtctggatttccagggcacattagcacggaccaatgcagcatcccgcagtaaacacggtatcaatacaagctgcagctacgatgttataaacgtcataactgatgaccaatctctgggaatggagatggatgacggcatgcaacgtccagctcaacaaagatgtctaacaccaatatcacgacagacttctagcttcttatcggaagtcagcccataccaaagctcaaacaaccctatggcgcctaactatgcggctgaaaatcaagcagtggaactaagacctgttgccacaggtcagacatcgaacagtagtacgagttgtggcccacgggaaaaagatcaagaaataatgccaagtaatatacctggagaacgttggcatacatctgctgcccctgaaggggcaccattcaataacgttgcgccaaaaaaggtaacggacagaaacgtctgtgttataacttaaaaccattttgaaaattacaagacaattcgctggatcttttttagtctagaatccaggccttccaaccactgtactaatagaagcgctttaactcttaaaaacatgtttgtatctatatgccgcatgaattcatataagcaaaataggatttaggtttgtaaagataatccaatatactttgcaagcagctctaactgcttgcttataatagtaataacttcaatctgaaaagatgatattattgaagataatagtgatacccttataatctatataaatacttcattcataactaggaagcggacgactatttttcgaagagcctgggttctaaagtgtaccttctgctagaatccattgccttttggctttcgtgaatggatcctaatgtcatatcagcgctatgctcgcatatatccatggtcagtcgtctgagtgacctaagcgagctaatagtttgcggaacaggcattttagttaacggctggtcagggacgggcataggagtcgttggagtttgagcgctcatatcgccacatggtgttgggaagttactgaatttgccggtagatggagacaagttttcattgccgctgtacgcttcgtctaaaagttgtcttccatgtgagcatagacttagcggccgttgtggcatatacaatggcggcaactcattaatggccgaatttaactcgtgttcaatcggaacactggtacgaacattagcatctggcttgttaatattgcctaacacatcgaacgtacggccgattgatgcaatttgttcttggagtatttcgtcttgtgtttgggatatttgcataatattgtccctatgctcctgagaaacatagtttactagcgtcccgatctctgaccttaatctatcggcatggttattcgtattgtttatcactgaccgtaactcgcgacgctggtcatccgatacacccaaagccttttgattgatatcttggacacccaaaccaattagattgcaagcttttgatgtgatatcttgaagtttaggtgttaattcttcacgaatagcttcgctaattctagtttctacagcagtaaactcatctccgaatcgtctggagtcgcatatcggacttatatccatctgaaactcttgtagatcgttcttcatcgaaaaggtagctgatgaaacagtattctctatagagttcaccccgccgattgcactgtcatagagtcttcccaccgcgtatgaagacatcttcgacatgccattgtttgaatgagaaagtaagccttttactttgcttacaatactttcttcaaagtttttctgcctcagttctgtttctaccatctgcttcattagaaaatcataactggctttcatagactcctggatgttctgcctttctttgccaacaattttttgtaactgttcttccattgtctgggcaatatcgaaatgttcccgtttctgtgattccaaatcggcctccaactcctttttatgtgaaatcaacccatcttttgtacactgcaccacgtttaacatagaagatgccttcatgtccaaatcccgaaccatctcctgcaaagtcgaatttagttcttgtttcatactctccacgtatttctgtagctttccatgaagcgcctgacactctttttctaacaaggaagcacaactagaagtaaggtcagtggtctccaacttcatatttgaaacatgttcatccattgtccttacaagattctcacacgttgccttaataatatctgtcacttcttcaaatttctcatctacaaagctgagatcgacatccaactgactctcctctgtagtacgcccaacttgggtcagtttctcttggagttcctcaaaaacgccgccaagtacagttttgaagcggtcactgtaagcttgtagcacgtttctgatcgatattagggacgttatttccctggaaattataaggttgcatgtttcaatatggtccacctttgcaagcaaatcttcgtggatattgccgcgattgtcattgatgtcttctaaaagcttcatgttattgttgtgaatcccaatcatagtatgttcgtagtcttcgagtttggaatggatcccgttgatgtaaatagttaaatctttactctgttccagatatttccgattggccacatctagctctttgatttgcccatccttttctttgatcaactttgtctgttccaaaaacttttccttaagtcggcggagttgttcctgcagattgtcaattttggcttgttgctcttcgactaagatactattactttcgtaagtttcaaacttttcttgtgtgatgtatataccttccttcgagtggctagcccttaattccttccttagtcgctcgatctcctgtatatattcaataatgcatgactcctttgccatcaattgatttacctggggagtgtttttgatcgacttcgctcgcgtcgcgtactccaaggtgctcactgtctcttccatcgatatcttcgcaggagagatggtggcaatgatacatgtcttggttttgccgcccaatgagtcctgcaacaaacgagtcaatttcgattcccggtagggaatatgctgtgagtggtccactaaagcgttgatgactctgcctagcgtcaatagggatttgttaatcagaccggcttcctgggcgcgtttgttttctgctcccgagcggttaatgttctctgacccagccaagtcgacaagattcaatttgccaacctttacgtactgttcgccagatattggatgtatcttcgtcacgttagtggtgatggtgaatatagtatgagatcgcgatgataggtcattgcactttgtagccgctaccttacgctttagcgagccatccatcaacaatttaaggccttcttgcgcagatcggatatacatttcttccatgcccttgacaaaaatagaatagccgttaggactagtcctgtcagtctttaagctgtcatatatccgtatcgattctggaggagccattccattgaaattgtgatcctccaaagaaacatccttgtcgtctaccaataggtcgcgaagcttctcgttgtacaactcgagaaaggagactttaaccgagtagtcttcgcttacttctcgaagctcgcgaaacagctctactaaaacgcgcggaataatgccagcatgctcgctcaagagaacaaaattgggatcgtcttcggaggaccccatcattgtaatgtcgccgctcatcgtgtatgtcttccctgttccggtttgcccgtatgcaaacactgtacagttgtagccctcaatcatctcgttgatgtacgcccgcgccacctgattaaacatcgactcctgatcgctctccaccccgaacacccgatcaaatgtgtacgtcttgttgctgcccgtcccggggtttgtgaggatcacctcccgcccgttgtttcccaatgtcgagatcactacgctcgacttttcgcggatctcgcgctcgttgcgcgacctgcaccgcacatacaccttgatgttgtattccggctcgccctcgctctgctggcttgaacgcacgcgcttctgtgtcgttgtgggcatggtcgatgacctcgaccgcgcgagcggcttagattgcggcgcgctcatcgcaccgcttgaatttctcttcattaacttctccgcctgctccagcatcaaatcctctccactactttccgtatccgtggcacttggcagactggccttgttgttcagagctttgccgccgtggttgcacttgtgactgttgatttgtactgagggagtcctgcgtaaccgcgcgagtcatgtcactctatacgatgacgcttacgcgtcccgctcgacgcgtccagaaagcgccgctgccagggcgtaaagcctgagatagcggttgtatgacgcacttgttacagctgcggtaacatgttagccgcggccggaacggagttctcttccaaagaggacgggcacgtgattgcctgtcgtggaaaaggaacctacgacttcaagcctacctaccactaaggattttagaaagtgttcgagcaataagcccactagggataatgttactaatgcccctttgaccacggtattgtcgcgtaaatgacgcaggatcggatgggggtgagcatcctcgtaagcgtttacatgaagcagcacacttcttgctcttctcataaccgaatatttaaagacaggttaacggacctaaatgcaaaagatagttaacaactaaggggtcacgccggcagaagacgttttaatccgcacgactgttctggctaactagtaattaatagttagtattcgctctaccaaaattacaatcacgtgattagtttcgctatccgtgccaccgcacacctcattacgaaaatttgggtgcccatgtgaagcggttacccggatctggtgacagcagtttttcggtgcgagcagcatgctgggtgcaagcaggcgcccatcttctctgctaccaacggtgtgacgggaactgcttccagtagaccaaggtatttatcatcgcctcaggtgagagaccgagcaatagatatagagcacatatgtcttgggacgacgaggagtttgaggtgagaacttcgacgaaggaccaaccgatggttgtgtcctgggatgacgagttcaacaacgacgatgacgatgcgctattagagtcatgggatgcagaggaggtcccaaagcaaaagcaaaagcccaaggcagcacccaaggcagctaagaaggtcgacaagaagggcgaaaccgtgctgctggagatcgacactctcgatgagaagacgcgcaaggagcttttgaagaaggccgagctcaactcggacctgaacaacgctgcagcgctatttgatgggcttggtgttgcagaagaacatccgcgtgcccgcgcgctgcgccaggaggaggaactagctgcgctgagccgtcccgctgccttaacgaagcagactcctttcgagagccaccctctcttctcagaagcggaaaccaagtccgacttccaggatttgcggaaggcattgtctactgcgattgcaggcatggctgagaagtcatcactaaactattcgggcgcgcttgccatcgatttgatccgtgacgtcgcgaaaccattgtcgattgaatccatcagacaaacggtcgcgaccctgaacgtgctgatcaaagaaaaggagagacaagaaagacaggcacgtcttgccaaagttaagggcggcactgccaccggtggtgcaggcaaaaagaaggcaaaggctgcaagacctaacttgggcggtgcattcaaaaaagaccaggagttttccttggaagacaactctgaatttgcagactttggcgatgatgacttcatgtaaaagtctgcagcatatgaggcttccctgtggagattttcatacatcgatgttgatgcaggtgcaccaggtgagccttgaatatatataataaccgttgttagatcactaagacatcgttataaatatacacacacctaacacttccacttgcagaacttcgtaccaatccacttcgcatgatcatatttgggatcatggagaaagcaaccgttattcatgcatgtaatgcctatgctgagactacttcagaaggacctgtcccactgcccgccgataattctatttccttttttcttcttatcagttcgatatagttgcatggcacatagcctacatctcccttcttcgtcctcactttccaccattgagactctttgccagtgggatcctgccgggatatgatcgccatcaagtctcccttcttcagggcgcattctatgcgtggattctccggggtaaagtcgtaaatggccctcgcgaattccaaactattaagatctagcgattgtggttggtgtggtgtagcaatccgtcctctattctgcatttcttgcagcttcataataaatttattgagtaaccaagggaagccgaaaacagctgcaaagaataagaaaagtggcttccaggctattcttgcacgcttgcgttcaccggtggaacctgcactgtttttgcctgatctgaactggtcaaattcttgtagcatcttacctttgtctccagaagcaggcggcaactgcttcttcggagcgacgcccattctgccaccggtcaatttgaaaagaacccttttcaagaactttatcatggcaaatataccgaaaaatgaacccagcatttctttcacatattggaactgctctgccacagataccattgtgagaaaggagttatgcgtcgccatgtaggtcgcttccagcatctgcgcaaagccggccacggccccgatcaagttttcaatcaaatggaatgtagcctgcgtcgactcggcgataccgccgttgttattcatgccgttcgcgcccataccatacattccgccgtagccaccgccgtacatcgaaccatatccgccgtaaccgttcccaaatccgccgccgtacatcgagccgaacccccctccgccgtacatagagtttccatataggcccccggacccatacatcgaccctccgtatggcgtactgttcattccgaactgactgttcatcgacttgtagcctgactcatcgccaaggcctgcaggtttcgtcggaagatccggcgtgtgtccgtaatcgccgctcccgcctcccaacgaagacgcagcagttactgatgttggtatcactgtgttgctttcatccatcgtccccgagctgctggtagcagatgacatgttggcggtttcccatggttttggtctaggcttgctggctgacattgtactggaaaactgtttgactcccgtcctgcagtatttctcctctagtcagtaaacccgttgcaactccgattccgtactgacccaaggataaagtcttcaccgtaccagctatcttaagtagaaaacttgagtcggcttcggataaagttttcatcattaaaagcccctccccgcttcaattttcggattctgaaatattttgttacgtaatgtacagatgtaatatctgaactcggaagtcaggtagcatcgcgcagcaccgggccaacgagtgcagcattttatgccatgaacgatagataatctatccgatgagaacctttaaaaacggagttcagttatctttatataataaaacaatgcctacatctgaacatcgcctgagacaagtggacataatgtacagtcatgataataattacaattcgttctcttgcttaattagctcagtcgtagagcatggcgtatattaccatagctccaaaatgtctgttgatttctcgtctcgcgaaagccataatagtcctgcggcttacgtgtgcaagcggcacgggcggctgcgggagcaagtgcatgtgcggcggaccacagctactcaacgatggagagattcaaatgcaacccccggttacgcgctcgataggacctgcctctgctaggctgctcatccacgggattcgactcttttttgtcggctggggcgtgctctgcgccctcgggctgcccgcacacagaagctgcggctacatcgtcgttggcaattgcttctagctgttcgtcgttcaatagagcgaccttgtggcgtaagggcccatacccgtcataggtcgttaatgcataaatggtacgtttgtacccctgtatctttcgttcgagcgccttcaaactgcgctctgcgtcttggttgtaattattccgcccttcgcgggcttcatgtaatgcgtcgagtagtagcttatcttggatcgcagagtgctccatggaatgtttcaatttgtcgttttgcagctgtagctcctctatctgcacttctagtcttttgaccttcagttcaaagcgctcagtctgtaggctaaggctcggtcctttgagaggctcgaactgaaggccgtccgacgacatccggtgcccttggtttatttcatcctggtagtccatccagaaccggtcctccatggtagccgatagcacgctatctctatgtttgttgttgctcataacgaacccattctcgtcgacagcatatgcaaggtttgcggaggaagaagatgatactggtgaggctgatggaaactggtatacactgcccgatgggggctgcgagatagagcctgtgggtggctggagactgtctggctcaaacaaagttttcccactaagacaactgatcactgacagctccctagcatgcttgcttttgctgccgttgcccactttcggtgtgtgtgtactggagtgcttggctgctgagcctttattataggagttgaaggccgacggccgcgcctgtcctgtcttgcccgaggcctctgccacctgcgccccatctccggcttgctcccaggcggacgtgccctcaagaggggcctcatgggcgagctcgcgcggcatggtaggcaccgcggacgacgtaagcgcagaagccactgtcaccgcgccatccttcggaatggagttcctggtcttgaagagctgatctcgccatccagccttcacattcatgtactcgggacgcaacatcttgggcacctggctcatcatggacgtccgcatcggcgaccccacccggaatagcgactgtgcaggtagccggagagacgacacagggctccccgcacttgcactgcccccgcccggcgtgagctccgctaacttcgacaaagacgtctcataccgctgcgagccccgccgctcgtcgagctgcagcagcgccggcgcacccagccccccatggccatccactggcgccagcacgggcgataaccctggcgagagcggcacgcccccgatagtgatgcttgttatacccatatatcttgtgtgcagcgctgtggcacgccactgtctgcttgcctccagagtccctgtccgctcaactctctgaatccgctggctccgcaactgattccaaactctgtgcgttctgactgagtcctgtgttccagcaacctcgcctccgcgtcctgaagtagtgtaacggcctccaaaaatttcctgctcaatatgttttatgtgtcactgcctgtgtcggtccttgtccacaagatttagtaaccactgctgatccctgctgtgatgtttggcccgcacctaataataataataatacctatttatttcctgcccgccattcaatttgaacaaggccaattgcaacgtaatgaaaggttggtattgctatcgttaaaccaactatattatcctgcttttacagctatatgtgctttgtatttcgaaaactgctttgtgtgtacctatttcccaaaaaagacaaacgactgccgttttcggaaagctggtatttagacttcgtgacgaatgaaaacagatggctacggctatacaacgctcgagctagtagcggctgtgcctcgaacgatgcattaacaaaactgtccgctggcaaacaagccccctttgctcgggcccgcggcattgtgaaagcaagtgagctgtagtttcggacataaaaactcacaattagcagagcagaaactcgcgatagacagggttaccggtttcttcttggtaggcgtagccgagcccgctcaggaacgcatcgaaggccgagtattcgtcagaagggactgcgatgcctacaagtacgcggcccacgtccgcgccgtggttgcggtaatggaacagcgtgatgttccaggaggagtcgagaccagcgaggaagttggtcagcgcgccaggccgctcggggaactcgaaggcaaagagccgctcgttcgggacacgggcggcaccgccgacgaggtagcgcgcgtgggacttggcgagctcgttcgcggaaatatcgcgggcatcgaagccgagcgcgcgaagacgagtgagaacgtcgggcacctcggcggcagggtcggccacgctaaaagaggtgtagatacaggcccgggcggtgccgtcttggttgcggcgagcatgctcattgtagcggtaggagaactctgttacggcgcgggggtggatgatctggttcatgcgcttaaaggagccaggcacgtccgggatagtgacggccaggaacacctccttgccttcgcctagcaccgcgcgctcgctgacgaagcgtaagcggtcgaaattcatgttcgcgcccgatagcacggggacataggtgtggcgactgttctcggcgtcttgatggctggctatgtacttctttagacctgcaacccccagcgcgccggaaggctcaacaatcgctcttgtgtcctcgaatatatccttgattgcggcgcaaagctcgtccgtgttgaccagcaccacctcatcgacaacatcgcgtgctacacggaacgtttcctcgcccatcattcgcacggacgtgccatctgcgaaacagccgaccgcaggcagcattgtgcggcgtccctgcttcagagcggtgtgcagagtgggggcgtcatgcgtctcgacacctatgattttgatatgtggcgcaatccgtttcaggtacgacccaatgccggctatcagaccccctccgcccacgccgcagaacaccgcgccaatctgactggcattgtgcacttgccggagaatttccgttgcgatggttccctggccagcaatgacatatgggtggtcaaaggggggtatatcggtgagcttgtgaagctgcgcaagccgggcacactcggctttcgcctcatcgaagtctttcccgtacaatactacctccgcccccatcgctgcgacactgttgtatttgatagacggcgtcgaagtgggcatcacaatcattgctcgtatacccaattcccgtgcggagaacgcaacaccctgcgcgtggtttcccgcagagcacgcgatgacacctgcgctcttctggtattcgtctaggttggatatcatattatacgcgcctcgtagtttgaatgagaacacaggcagcaggtcttcacgcttcaggcacacatttgtatccagcttggccgagagcagtttcgcttcagacataggcgattcctcgataacatcgtaaactgaggagcgcagtatcatccgcacataatccggcgtattgtctggaagtagttcttgtggtttcaactgagtgtaaagtttatgtaacgtgccggagtacctccggcccgttcttaaagcggaactcacaaggttgccgctgcgtcttccgcaggcattgaaaaccatcttagacgtgggatcatagcccagactccaattacatctgcctcgttagcaacgcttttatgtacttctgccgcgggactgactcattggacatctcgtggccgattcgcggaataggtccttaacgtcctattcggcatcacgttactcaaatattacacatcacgtgacaacgaaccgagagcaggatcctcaataatagaggtcttggttagagtatcactccacttctgatgtccgcaagccttttcggttttatggccttgctactttctgttggcaaaggcgttctttaaggatcacatgatgcgcgccgcttaaattatcatctcatcgcgtattgagcctagacagtagctaactgaagacccggttaaagctatgcaaggcggcccaggcggttttagattggtcctgaagcgatcactgttcacgcctgcgaagggtgcgtcagcacttatcaagcaagggaacacgcacgagctgctacagggcctggggtacatacggcagagccagtcgggcttggtacattggcttcctctcggactacgatgtctacggaacgtggagaatatcgtacggaaacggatggatgagtgcggtggtcaggaattgcagctgagtacgctgtcgccagagacactgtggcaacggaccgggcggtgggagaacaaggaactgttcaaattgcgcgatgcgaaggggaggaactactgcctttcagccacctgcgaggaagatgtgacctggctgatgagtgaatgtctggagtcgtacaaggacttgccctccctggtgtaccagataggaacgaagtaccgtgatgagttgcggcctcgcggaggcctgctacggagccgcgagttcttgatgaaggatgcctattcgttccatgcggactcgcaagacgccatgcaaatgttccacaagatgaagcaggtgtacgaccagatttttacggacctgaaggttccatttaaaagcgctgcggcagactgcggcagcatcggcggcgagctgtcgcgggaatatcactatatccatgagaagggcgaggacgtcctttacagctgcaattcttgcagacaggtatctaatgtggagatgtgtgcaagcattccaacagaacccgggcagcacactggcgcagtcgcagtcgcgtacgcgctcaaccaggtgcacgacacactgctgtgcttatactaccctgccaaccgcacgctgaactggaacttggcactcagcgtgatggacaacgatatagacatgacgcttgccaatgtggggaacgatcgcgtgctggagctgttcttggaacaaaatacggatccaatgttttcgagcgttgtccgcgtgatggactcgagactcaactcccggtcgcaattccctgatttccccctgcagacgtacctgaaaagtaacttctcgcagctcagtggccacagcctcgtccatgccacgcaaggcgagctttgcggcgattgtggaaagggcactctcgacgcccgcaacagcattgaggttggacattgcttctatctggggcgtacgtacagcgaggcattgggcgccgccgtgcgcatgcgcaccaacgagacaaccacccttgagatgggctgctatggcattggcatcagtcgtctcgtgggcgccatcgcagacgtaactcgcgacagtcagggcctgtgttggcctagttgcgtagcgccctataaagtttcactgaactacgcgggtgaggacgagaacgtgcgcactgtacgcagcctactcagcctcgagccgtatgaaagccctgccggcaccagcctgggcgccagcctccagctctcgcagcagctcggtatcccacttagcgtgattgtcggcaaaaaatcctggccgcacgtggagatcgaggtccgcggcaggcgtttctccgacacctggcgtgacgagcaccggaagctccacgagcactacggctggcgcgccgtgcccgccgccgacggcgcgcgcgagaagcactattgcctgcccgagcacctcgacgccgtgatcgccgtcttgctccgcgacctctgactgcctggaaaacgcacactttacctacatacgcatgtcaattctatgctcgatatatgtacagttgtatctagacgctcccctagaagagcttccccgacaccttggcaatcacatgcagcgcgatcaccgagaagataaaacccacagccaagaagagcaccactagcggatctacccggagcccgttcgcctcatcggtgtacagcttcagaatgctgttcgaggagccgccgaagcccgcttgccgcgtcgacgtcggcgtctgcttctgctgcttctccttcgcagactgtgcggctcttctcttctgcagcgtccgctgcccgcctggtggaactgcagtactagacatgatatatcctgcttgctagctcactgaacactgctgcaacccaacgatcgataagtagtcgtccacctgtggtgagttccttgggctggggcagcccggtggccataacttttcgtgacctggcctgtgcgttgtccgggtaacagatcatcactccgcacgagatctaaaggccgggtaacaattttgctctccgcacatggacggttacccggctttatgcggtgatgtcggacggtttcgtttttgccactcaagaagaaagttttacttcgctcgagtgttcagaacaagagaaacataagcaacgggcatccaaaaggcatccactgcataccagcggccactgcgaaacgttcagaaattggcgttcggatctggtgttttttcctgcgaaattggtataacaggtgactatttttgaagttttttcagaagacatcactgcgctgcgttgagaaaaagccgcttcgtagggacagcaggagattgaagttcactggggcgtgttattattgagtttggaagtcgatatgcttacttcgaggacgatggtgacgggcgcgacggagacgcaaaggccaggctgcgtggtggcggggcctggcgcggagggcgaatccgagaacgacggggacgatgccggcgcggcgccacagggcgaggacgtgatccccacggcgattgtgatcaagaacatcccgtttgcgatcaagaaggagcagctcctggaggtgattgcgaagatggaccttccgttaccgtatgcgttcaactaccactttgacaacggcgtattccgcgggctcgcgtttgcgaacttcacgacgacagaagagacgatgcaggtggtgcaacacttgaacggcaaggagattgggggccggcgcttgcgggtggagtacaagaagatgcttccgcaggcggagcgcgagcgcatcgagcgcgagaagcgcgagaaacgcggacagttggaggagcagcaccgctcggtctccaacgtctcgctacagtccatggggaagatgccgtctacaaatgtgctagcgccggggccttcgagctcgcagattttcagcaactttgtgaacggcccgggcgcagggggcgtctcctcgcaggccgtgggccctgcgccgctgtcctcgcagatgctttcggcgcagagcaccgcgcactctgtcggccttcccaagccgcagtctttatcttctgagcggtactatgcgccgctgcctgcgaccagcaacctgctgctagcgccgcagcagctagatttcaacgacccggacgttttggaaatatactcgcagcttcttttgttcaaagatagagaaagacagtaccacgaattggcgtatccgctcggactatccgctgcacagaagcggatcatcaacgtattgtgttccttcttgggcttggtggaggtatacgatccgagcttcatcctcatcaggcgcaaggtgctagaccacgcaaccctgcagtcacatctgcagcaacaaggccaggctaccgcagcacagccactacaggcacactccacaggcgactcgctccagcgctcccagtcgtacaccagcgtccttcaggtgcatgcggcggccaccgttgcggccgcgcaacaacagcagcgccagtcgcaggtctcgtcccagcaaatgcagtcgcagcaagtgatgcagcagccgcctcagtcgcccggccaggtcctcttacacccgattgcctcctacgacgggatatcgtctgcccagcagcagcagcaacagctcctgcgctcccagggcaccaccccctcgttgctccagaacaggatcccctcgggctacgcgaccacacacacgccgtcctcgtccttgttgcgtcagcacggcgtctcgccgccccagaaccaagtccccatgaactcctccacctccaccagccgcatggccaacctattgtacaataatgccagcgcgctctcgcagcctaacactccttccttggccaacgatagccgctttcacccccctggcttgcagcctccggacagcggcacctcgtgtaccacgccctccaacagcgccactgtcgccaccggcgccaccgcgcccctggcaccccaacataccaatggcagcgtccactccaactattccgtccactccattcatgactacgtccccatatcctctgccggcaacgaaatcaacgcattggaggagggcttgacccgcagcttgagcggcttggacatcggcaaacgtaacgtctggggctaaccgaataacgaatcttactattaatgacagccattactacgaaagacctacgattatgatattacatgtgtgatatgaatttaatgaatctggccatcatatcccactgtccttctgtttctgcttccgggcctcggccgtttttcttcgtgcgctttcatctcgcatctcgatacgacactgccacatgaagcatatgacctgtatatgaaataactcactgattatcttcattagtaccatagaatttgtatgtaatccacatctaaaaccttaatagtttttatctataaatcacgaatattcttctgaacccagtatgcgtacgtatttggtgatattttgttcttacggtcgatacaagtcgcgtgttgagccaaagcagcgtcaatagtcacagtgagaggcaattagagggcgtacgagaggccagtaagcagttgatggtggtatagtgtagttaaaatgacgattagtgctgactctcaggcaaagaagagcaagatgctcgatgggctcgatatcaaggacatcatacaaggtgatgagcaagacggcgcaggaaacggcggcagcagacgcgtacacaggccgcgcgatgggaatgggccggactaccgcatacacaaacccatggcggcggtagggtggctacagggacggattccgtcggatgtggcggagtgggggcggtggaacgcacacgtagattttccggatggcacgaagaacaaggtgaggatacgatacgacccgcgcaagctgtacgacttccggcgggtgctgcgggcgtcggcggcggagacggggccaccgccgcacctggactttgagatctacgagaccgagaatctgctgaacatgctggacaacgagtcgtacccgtaccgcggggcgattgccaacaagaaggactactcgaccagcaagacgacgccgacgctgcgcgatcgccagttttttcagaagctgctgtttcagagcgcgaacgcggcgcgcaccaacgggaacacgttactatctttcacagaggaagagcccaaaggcaggccgagcaaggccgagcgggcgcacaaggtttcgtacatctatttcaatgaccacgagatcaaaacgtggtatacagcgccgtatcctgaagaatatagcaaaaacagaattctctacatttgcgattcgtgtctgaagtacatgaactcgaaatatatatactaccgacacaagctgaaatgttcgatgatgcacccacctggcaatgaaatctacagggatggcaaaatctcgatatgggagatcgacggccgggaacaggtaatatattgccagaacttgtgtttacttgccaagcttttcttgaactccaagacgctttactatgatgtcgagccgtttgtgttttacctgctaacggagaacgttaagacaggccaaggcttaaaattcaacgtcgtggggtacttttcaaaggagaagttgaacacaaccgattataacctgagttgcattctggtgcttccgacgcaccagcggttaggttatggccatctattaatggacttttcgtacctgctatctcgaagagagttcaaatggggcaccccagagaagccgcttagcgatctcgggctgctctcataccggaactattggaagatcaagatggcacaagtcctgcgaagcttgaaaccgataatagcgaagtcgacttatttttgcatttctttggaggatatcgccaatttgacggggatgacaccaaccgatgtcatattcggtctggaacagttggggtgcttctacagatactcatctattgacgggagaaaatacgccataagaatagacagctgggatgagatagaacatatttaccagcaatgggaatccaaggcatacatcactttggacccagataagctgatctggcgcccgctaatcttcggaccctcctgtgggataaacgctgtaggaaccatggtggaaactagcacaggcgcacacagaaatactggtgctgtgggctccagtcaagggaccgatttattcaagaacagtatatctgttttggttaactttatgcatgatgatatttcagattccaggaccatggaaaaaatggcatgggacaaaattgtagcacaacagaagaatgcgcgtgaggtccagaaggatgcaacagatcctgccattctggagttggcgtacgtgcacccttctttcacaaatggcagcacagcggaatatggggtcaaacctgtaagaagaaacccgcctgcgattcgcgaaaccccgaaggtaggctcacctgcaacgccggaggagagggatgatatgacacccttagaggacgtgtatgaggattcatttgatcagacacacctcagcgaccaggatgacgaatacacggatcagggagaagaggaggacgatgaagaggaggacgatgaagaggacgatggaatgaatgtcggccgatttaacagcaacgcattacccagtagggcgtactcgagacgaagtgcttcagagcattccaataatcgaacaaggtcgtcacgtcaccagcagtctgtaccacatgtggaatcagacgatgacgaagatcttgaagaacattgggtggacgcactagaaactgtttcgagaacaaggaggatattgcgaaaccgcacagcttagtgcatggaggccgagcatgcccacaccatgcgctggcttatcacatctgcatatgttttgaactgacactaggaacatcacgataagggggtatgcgcctgctgaccggaacaactagtcttaaaatttatgatacataaataggcaactagtgctattggacgggaacagtgtatatataaacaggccttgaagtataaaaagcaaagaagtaaatggatttcttttgatgaaatgtgccactactcagcagtattcttcctcttcttgatattacgattatcatcttagttgtctatcttggtcaggggcagaccacatatatgcatgtagctcttgttctctgtacagcaaataggtctgggaagtagtgatagaagatgcgggtggtccaattcaatggttagtttagctaagtcaaataatgatacagacgataatacatttccagaagtactttatcttttcatttttgggcagtgattcatttacatcgagtcataacaggacgattcaaagcaaaggtaactatagtacattcttgaaaatgctatttaggcttggcagtggagttgcagcagcctgtggatgatggtgactgtgatggatgaggatgttatgatattcgtccccagtcgacacagactggagtttcacttcgggacccacgtgcgcagtatgagtgttgacagaattgaagtttaacgccttgccttcagcagcctgaggaggaacaatggtgttcgatctagtggttccgtcgcttgtagttggggaggtctctttgctcttgttgaagaaaatgggcgactgccgctgttccttcttcgcggacgaagcactggataagttagaagagtggttgtagtcaacaggggtccggtccttgaactcttcgtgccggtcgtcttcgtcctcttcaatggccgtgtcttcattgaaagagcgctccctcgcggcgcggaacggtgacgcagatggggacatggtcacagccgcattaaccaccggtgaaatggagtcaatccgccactgtatctcttcatctgagcggtggggcaaaagaatcgagagctcgtcgagtgacaagcggtgttcctgccgggcctggagtagccggtcctcctcttcggaccacggttgctgcaacgccgtgggcatcggcccagccgcaccatgctggaggaaatgtccgtgacgtggcagatcggtgaagttgtgcgagaacgatcctcggcgggggatgtagactgcagagccccgacgcgaagttgcgttcgacgtgtttgtgttgaaggattcccgccgaccggggaacagggcgctcaccgaggtgggcgccgccaccagcgacgaccggcgcgtcggagtagtagatagctgcgtgaccgacagcctccgatccagctggaacgacgaccgccgggtccgtgacgagaacgagtccttgcgtgccttcgagttcgcgaacgtcgtgttcagcgcggccaccaggctcggcggcgcgcctgccgccgcctgcgcctgcgactgctggaccaccgacccccgccgcgaccgaataacgatcttcgggatcagcccgatgttctcctcatccgctgcccgcgcgttctcgcgcggccccagcgccgtcgagttgaacgacgccgcccgcggcttcacaaacttgccctcgcgcgcaaacgccgcctgtagcagcccctcctcctcctcctctgcccgcgccccggtcttcaggcttcccgatttcaaccgccgccaccgaaactggcatgcgttcggcgtcctgctctggaagtactgcgcgatctctttccacccaagcttcttgacctccttcaagtgccgcaagagcacgtcgtcctgcgggtcccatgacgaggggttccgcgcgctgcctgtcatcgctttcgtgctcgtcatctgctctgccttacgagactgtgcttctgtgctgtgtctactgtcctgttcaagctacggtgtcgctcttggtgaaatcacgatgctcatctcggaggccgtcgtggtcgaggccgagaccgacgctcctccggaacaaagaactgcgacaagatctcaccatggctgggtgtggagcttctgtgctgtatgagcaaaattttccaaaaagaaagctgaccgtctgcgcctggcggcgcgcggtgtggcacggctggcgcgatgagctcggcaccggaatgccggtaacggacaggcaagcggagtatataagcgcgggtagcggacgagcgggcgaggagagtgtgcgatgagcaaactgcgttactatgacatagccgtgaacctggcggacccgatgttccagggcgtctaccggggcaaggcgcggcacggtggagacttggcagcagtgctcgagcgctgtcgtggtgcacgggttgatgtgcttctggcgacaggctcgtcgctggcggagagcgcccacacacgcgcgctggtgcgggaatacgcgggtaatggcccacggctgctgtacacggcgggtgtacacccatgctgtgcggatgagcttgcgcggcccggggcgctggcggaactgcggcagctgtgggcagagtgcgctggagacgagacgttccgggcgctaggggagatggggctggactacgaccggctggagcacgctgggcggcccgcgcagctgcgcgcgttcgaggcgcagctacggctgagctgcgagtttgcggcggtgccgctgtttctgcacatgcgtgcgagctgcgcggatttcatcgagatgatgggccggttcgtgcgcgggtttacaagcgcggacgagctcgacgaggagctgcgggccgcgggcgcgcgcggcgcgaacgcgagcggccggactgagtaccggtttgcggcggagcgcaaaatggtggtgcattcgttcacggggacggcagccgagctggacgcgctactggcgctgtcaccgcacgtatacatagggctcaacggagcgtcgctgcggaccgcggagggtctggaaaacgcgcggcgcctgccgctacagcggctgctgctggagaccgacgcgccgtggtgcgagatccggcgcacgcacgcggcacacgagctgatagccgagggcggcccggaggcgtggcgcgaggcttacccggacttgaccgagtggtacgagagcgtccgggcggagcgcttggaccgggtgcccgagggcgaacgcgcgcacaccatggtgcggtcgcgcaacgagccgtgcgcaatagggcaagtggcggtggcggtggcgcgcgcgcgcggcgttttagtgaccgaggtggccgaagcggcgtggcaaactgcatgcgcggtgtacggatcgtgacgctgtagattctaatgtacaatagttaagctagatatgtaagagaaacagtagctcgaagttgcctcgcggcgggtcgagggcctgctcgggggcggtcactcctggatctcctccagctttttcccgtcctgctcctcgctcacgttatcctcagcgtcggcgcgctgcgcagggcgcgcaacgatgccacccgtagcaccgactagcgaagccaagacttccgacagcgcggagccgtgaatgtacgaggtattgttgccgccctgtgtgatctggatgccgccagcgttgatgagctcttcgagcgaatagaggtgttggcggccgtcggcagggttggcgccatcctcttcgtcgggatcctcgcgcgtagtcgcgtgcattgggggaaggctgccgctaccacggttgcgctcctccggacgcttagttgagatgtcaaagaggttgtcgtcgtcctcgttgataaaatcgtagtggtatgagaagaccttgcggcgctgcgcctcaaaggaaagcagaccctggtatttcttggcgcgcattctctcgaaccactggtcctcggtctcgttttcccgcagaagggcgacaacgatgaaactcatgttgtcacagccaatgccggtcccctcggtggttggtgagcaacacacgtctatcacgcgcgacgcgatgtcctgcaagcccatgccttgttgaatgccgtagtggattaggtccacgcactcctggcttgaaagacagtcccagatcccgtcgcaggccaggatcacaaattcgtctttctcgtagtctagcttatgctctagcacgtctggtacacatgtgacaatctgctcgtgcggagccaggtttgggtttgacttgaactcaaagtccccaatcgcgcgcgaaagcgccaagttaccattgaccctgtccatttccacaaatccatctgccgccatgatccgcgactgttctgagcgcaatgtcggcttgtggtcaaacgagagcgccttcgcgttcttgtcggttgacaacaccgtgcgcgagtcgcccgagttcgcgcacacaagcagctgctgcttgtgtgacaccagcaacgtggtggctgtgcagccgctatggtcattggccagcactgggtccttcagtaactcctcgtccgccgcgatgaacgccgccaccagtgcccgcgcaaagttcggcgcgtcgccgccaaagtccttctgctgctgcagtatccgcgagaattgctccccgcagaactgagccaccgacgcccccccgtgcccgtcaaacacgcagtagtatgcgatgtggtcatccgagccctccgggctgatgtccaggtccacgatgtgcgagtcctccatcgacatccgccacccctgcatcgcgcacatcccgtaggccgtcagcgcatccccactgcgcccttgctccttgtctataactgggttcgacagtatctggcccatccttcctcgtcgcgtctgtagttatccgctgtagtctgctcgctcctccgcgcctgtccgtgctgtgtaccttcagccttgcactatccgcgcctcggaaccctgctcgctcggttctgatgtcttaacgagagctgaacccaccagacgcctgctagcaactggtcctgagcccgcaaataaatagataaacataacggggaaggctttttgccccctcaccggctgccccaaggcggtcggttgacgctgatcggatctggaaaattttgcaggtcgcgccgcacggatcacgtgatcataaattgctgattcagccgctggacctgggcggctagcacagccgcctacgcaggcgctgtccccggctgccggccagcgcgcaagccacaaaccgccgcccgggcgcgccaggccaccggcgtgaccagcggacaccgcagcaaatcagaccgcacggcgactgcactgccgcgcctggcagcagcaccccgtttgcggtgccggagcaggctgagtcacatccagctggggtcggccgccagagcccagctgacagcgctcgcggagcagcaccgccacagcaacagcgtggcacgcaccgtgtatgtcatagcgataccgcagcgcgcgtgttccttcccgtctgtctattcgcttccccctcccgtaattattatctaagtcgccgtcgtatcctctgccgggttcctgcgatacgcgggttgcccccagacaggacatcgtatattggattacttcatgcaaattatttaagcgctgtgagtcgccgccggaacgccgtggaccaccgttgtcccgggtctttggccacagacctatttactgcgattgcgccaccgtggttctcattaccctaccggtcggcagtcaatggggccgcatttgcctgttgggacggccggttgggtcacgtgactgcacgactgcaaccggtccgggctgcgcaagtctccggcgcggcgtggcactatagtcacgtgactacacgtggcggatccttggcgtccttagtgacatggtgccgccgctggcctgccgcggcggtcggagcaagcataaaggagaaatcacaggtagcaaacggtatgctggtcattagcaagtgagaaagctgcataccacggataccgggtcccactactcacccagccatcgattctctacaaagtgaggaactcttcgcaatcgctaacaggggatcgtgcacctcaaaagctcagaaaaggcgtggctctctggcaggacaatttaaagagtgggatgcctgaaacgaggggatcgtttccactcgagaaactaccagatgagctagtgaaggaggtgttctcgcacctgccacagagcgagcggctcaaattgtgctatttgaattggcggtgccacaggctggccatgcagttgctatacagtcgaatatacctaaacgattctaatgtggtgaaaagtgattatgttgatttggcaatcaactggacgtttctatacataccatcgtttctgaaggaggaggagtcgcgggccgtggccaacgagaagctgaagaagttgatctgcacgttccagacgaacccggacacactgaatctggtgcaatgggtgcgcatcaattgggatttgaatccggtgctgcagaaatccattctgtccctactttgcaataagtcgcgctctctacagcgcctcgaaaacgtcacggacccgaactgcaacgacatagtggccttcggctatatgtcgaggcgtaatctgaccagcttagacatggcgcctccaaattctctccccgagcgtcctgtgtgctccacatatataccagccctggcgcggtacctgcgtcagcgcatttcctgcaaactatcgcacatgacgctttttatggatccagtacagctgttcaactgtatatacccgctggaatacaagttgcaaattcgagatttgaagttgcactggcggagagaattctacccggtgggtgagtttcaggtcaggcgcaattcgccattacagaagttatccgaaatattcgacttgcgcgcgctgaaggtgctgacgatcatatcttggaacgagtcactttccaaaagggagcttgagatgttgcaagaatttgaggaattcaccaacattgaggatctatcattgatatcggttgcccaggacaccttagtgctcatgagcttgttcaataagctcgtgaaccttaaacgcctaaagatggactttttggagaattatgtgccacaagccacgaagccggaaattttcttatccatcttgatcagctgcaagaaattgcagttcctcgatatccgatttgagggcctagattctcccattatttccatggaacatgagaaatatcaagttttgcgtaattgtccgtgtgccaagtgcgagaaaacacatgatgaaattattaataaaaagatattccatttcccagacgataaaaaattcaaagatatggatgagtttatggcaaaagacatttttgccatgatgagatatcaatccctactcccatattcaaaggcatgtgactcctacccaagtgttcgaacccaacccatgaatatggaccagtttgtccaaatcatgaatgagagcatgctgctatatcggaagtccagggggcaattaaaggatcaccccttggatgcagaagaactagatctatccgaggctctggacctgcttccacacgctcctttcaccaggcaagatgtgattgactgtttccatactctaatacatcattaccagcggacctacgttaccttactatcggaattcccggagttgagattcttaatgctgaatgatattccgacaattatagttgaggagatctccgagcgaattccccatccggtgtttttccacgagggctatttttcaaatctgcacggctggacctatagatttaaatggcgtaacaatgacgataacaaggatgtcatgacagtaaacaggcaaataacgctttgctgaggtcaggtgccaggttgtctcagcttgtttcctttccactattgtgtgagttatcttcattttatattaggtcattatatagatatttaacagttgggtagagctaattattcgcgggcctggcacaaccttttgagaagattaggtttcaccgggaatactatccaggtatgtcataaagtcaagagggtcaagtatgccttctagtaagtcaaaatgtggcgatgctccacctttacacaaatcgtgtatggaagtagatggattatgcgcaatcgatttttccgctgcttggtttgtatcctcggtgagcttattggaggcatagtcgtaaaatgaaacgaaaagattataatcactatactggtctgttggaaagatctcagtcgtgaataagctgttgagaccaatattgtggtcacattgtgtgggaactatgtggttccagaggtccatcatgtcaagatttagttcccctcccattttcttatattccccataaatcaacccgattaactcttggctcttcatactttccatattgccgctctgaatctcagcaaataagtagcgtagcattatgaatactgggtttgcagtctgctccagtatcttgtacttgacctttgcctcaaataatcttttgaatacctggtagtaatcgtagcctagttcattaaagtatagtgagcatagatttttgtaaaacttcataagtgttggcttaagcgattggtcctggcaagcacttgatatgcgcaatattaggcccgttagtatttggtataccctgtacatcgccacttctacgatcttattcgtgtaaaagcggccgtattggtggttggtcgtcggcgggtcatgaaaatacgtgataaagattccagataggtgaatgatcctctccaataactcctggtaattctttctgtgctcggcagcggatacattggatgtaggcccgatgaaagccgcgtgtaggatagagagttcaacaagctggaggatcaactcctgttcaaaagctagttcagactcggaggtgaattgccccaaacgctgccgtatttcgctgatgatcggcttcacttcttccaagttcacctctgatgggtcttcatttattcgcgtaagcaattgccattttagatagtccaatgatatcatgtccgcgtaccagttattgtaagaggacatagccgccggtttcattgaagtgccaattatcggctccagaccggtgagcatgcttacgttccggtcccagtgcaaaacaaccgcccagatctgctggtaaagcttcacaacactttcattcgcggagtcgacttctccgggttccatttccgcaaaggccatggtgaagcgagagttactaccacgagccttggcaaaatcatacttgtcgggctccttgaagctgagccagctcgcgccaatctccttgcaacaggcataaatcgtacccattaggacattgctatattgcaacgactctccgtcgccgtccatcggggaacaccaattatggaaccgcagcaatatgagacattggagctgcggcagtgtcaccttccggagcagtttatcccggggaagtagttcgtatgcgagtgcagcatacggctccgtgtcaagctccaaaattctgttatacttgacattcaccaccgagcatttgtcaaaccggatcgcgaggtacactaggcgcgtgatcagcaagattgtcgcgaccgtgataagatcgccgttcttggcagagaacttgccgcgcttttgatagtcatcgtatagctgctccaccgtcacgcacaacatccgctcgtcatatatcggtatcagcggcagcacatgcttcttaaacgccggtaacaccttctgcaggaatatgtacctttccaccaggtgctgcttcgctgcctcttccacatccgcaaactgctgccgaccctcgtaccggctctgcgcaaacccatccaccagcgactggtgcaccttcttgtgcttcgccaggatgtacggcgacgactcctgcagcatcccctcgtcctccatccgaatcacacgtttcaccgagttgggtagcgaagcctcctgcgcgcctacctgcgcctgtgcatgcagctgactcaccgtcttcttgatggccgcgtgcgaaaacacactcagtagctccaagtacaggtcgcggtatcgtacggcgtccgtgctcagcacccccgcaacgtataccgcgctgcgcttgccaaacaccaccgtgcgcccggcagtcaagtccacccgcccgcagctgtgcgcgcgcacgaactgccaccgctccagcgccccattactgcccgcagactctcccggcgagtccccgccgtcgccgcctttctcagagggcgaaataaagtagtggcaagtctcccggttgcccaatcgtatgcaatttccgcatgcaggcttccctctgtcgcatcgagacttccggcgcttgcagttcgaacagacaagcgtctgccgctgccgtttctttaatggcatcatagataaaccgataatctcagcttagattacgagttatcgctggcttgagctcgtgctgtctttgactcttcgcttgctcaacgctagacatctacattctggaaaaacatcaccacgatcttgcctcatcacatctgtggtgggcgacaggaagacctccttgtaacaggctaggcgcagataagcatgagagtggtaccttggcagtcggaacaggaagtgcaagagctgaagcggtggttttatcctgcaaagttcggcgatggcgatgataagcgttcacgggcgatgcaaagggtcaaggcttactggactcgcggatcgtacgtgccgcatgtgatagactcaacatcgcaactggtcggttgccaggtgtttgatcgggaaggggcacccgaggaaatagtgaagctgagctacagtatggcgctgatcaggtatgtgaacggaatgctggacccgacccagcagtcgcagtttgcgatccccctgcacacgctggcggagctgctgggcctgccgagctggttcgtggagctgcggcatgcagggacgcacgagcgtgagctgccgagcgtggagatgctgcggttggcgtgcgcgcgggcgctcgagtggctctgggagaactactgggacagcgacgagagaaacgaggagagcgaggaggaggacggcgagggcgaggaggagtgcaagtgcgggaaccacgcggtgcacatgcagcagctgcagcagcagctggagagctacgcgcagttcaaggacggcttcaaggagtaccggtacatgtgggaggagggcgccgcggtggcgacttctgcgttcggggacgagaccgacagcgggaaggagttcgtgcgcaagtggctggcggactaccgggatgtgtggcggtcgctgcgcgggtgcccaggcgcgttcgtggaggcactcctgacacactacgacagcacgctgctggagctgagtctgacgaggctagagtggttggacctggaagtgtgccgctggctgctgcagtcgtaccgctcctgcctcgagccgtacgaagaagcgccgctactgcgtcggcgcaccaagaattccaagcatctgctcaggttcaccaagcgcgtgctcgcgtggatcaacctgaaacgggcaatgcactactgggaccggtggcatcccatcttcctggtggagcagagcttcctgaccaggttcatgatcgagacgctacaaccaaggatcacggaggccctgaatgataaaaagtttcgcaaaaagctctacactagcgacatcaactcgcagctcgacgaggtccttgacgccctctccaagaagggcatctccgcagccgagctaagtgtctttgacgcagatgagcacagccccgcgtccgaggacgctgcgcacgagcccctctccccgaagcatccagctgacgaggtgagcggcctgctgcaagatctcgagtcggtcaagttgcgcctcaaaaggcaaaagacgtccgctcccaggggttggacgccgtacccggcctggcagcccaaaccgttcgggtgtttatagatagaactacgcatttaatttactcgcacaatcagacatcctaggaaggtctcaataagagcggtcaccgggagcactatacgatgggttcgaagcgtactcctaccgtggaaactgcgaatgttaaggaaccaattttcatcaccttgtgcggtaagagccaccgaaacctggaacgctgcccagtcgcactaacgatttctcagatgatctaatgtacataaatgtactggcaaaaagccgcatccggcccgagggccgaaaaggcgtggtagaaccccatatcgtcatggtcgaatcggactgggaaagaagtgtagaccgttatcatcattgaagttgttagtgcgagctgcgccagccctccatttctgtttcgatggtgccctcatacttgaggacgctagaaagagaatcagagtcccttcactgtgccgatgttgcgagacatcggcacgacttagaacactactgtcaggaatgctacgataagtgctagagagaagctgatcaactactttttatacctttcctcatccctctggtggccattacaaaaatttttcacatttctttttcttgcatctgttctcgagcaaacaggcattagggctcttgcgcgatgggaaacaaagccgcgatcgcaccgcgtcatccaggcccaatgggttggggatgcgcgtcctgcggtacgcccggaagctggcttcgcggggatctcagcggcaggcgcggcggcgcacggaacacatgtatatatccgggtaaccgtcaaatttttcagcatgtgcagcggggcaggccatagaacccaactcatcgcctcacaaggtcgcagtctcggtaatgcagcgttggatgagcaggtcctgaggcttctcgataaacggtttatatctacagatggtcagcatgtcgaacgagtacgtgagcgacagctccgatagcgagcgcgaggtggaagagcggttcgaggtgcctgccgggttcaagcagtgcaagcacctgaaggacttcaagaagcccaagggcagcaagcaggagctgtggctgatgaagctccccagctctgtggacatagggaagctgaaaaagattccggtggactttgccggggacgcgccagccagcttctcggtggatggcaagaagtacgttgtcagggaggacctgtcccaggaggacgggccgggcggcagtgccaaggcaagtcggtttgccgtgttggccccgcgcagcaaggacgtgctgaaggcggacgcaaagctacagatcgccaagttctttaacgtaagcgaaagcgtggagatcccggccatcgactacgatcgcgtgcggcagcccaggaaggatgtcaccaaggtgaccggcctgaagacgcgccactttgcgactggctacgatgcggaggacttcgccgacgccgcagcagcagagccgccgaagaagaagcacagaaagtccgacgacaaaaaggagaagaaggagaagaaggacaaggaaaagaagaaggaaaagaaggagaagagaaagcacaaggactagcctcacctaacagtgcctgacacctgtacaatagtatacctttctaaatgcattcaaatttatatcgttttttattactgattcatacacacggtacagccgttacaccctgtccgagtaatccttcaaaataccagccatgtgtgtgttggtaatctttccctttctctgtttgcgtttcttggcctccacgcgtgtgctgccctgtttcttgatggtggcaggatccacactggcaggtttgagccccaaatcctgaagcttccgggggagttccgaccgctgcggcaacttacagttctcccacatcttgacgaaatcctcgtcgatctctccgagcgggccgccgaagttgtaccacacaaatcgcggcgagttgtctttcttggtgcgcgacactagtatgcggtttttcttctccaactcatcgatgacctcgaagcactgcggccacccgtccttgagttccttgcatgagatgcccttgaaagtcacctgcgtgcgcgtcagcttcaagagctcctcggcagaatgcacatcatagatggagacgtactgtagcgtgtttttcttgggatcgaacttgaacttggcaagacccttgagcatcggaatgacgctgttgtccttcggcaacgacaagtacgactcaatctggtctatcggtacgggctccgcacgctcctgaatgtactccgtcgctataagcatctttgtcgacaagtgggtggagtctagagctccgttttcggagcggctgggtaccgccgccttctgcggcgaggccgtccccaacttcatcttcttcgccgccgacggctgccccgcgccctgatcgcccccatcccgcggcgtctcgcgcttcatggccttcgactgcctcgccccaccgctgtgcgagcccgagtcctggtgtgccacaaccttcctccttgtcgtgatcaccggcgctgtctttatcttgctcttgaatgcattcaggttggccagtaaatcgttactcataattcaaacgcggcacactccctggcctgccttctttggtccagggacttactgatgcataggataccgacgtattgcgctctagctcgagctataggacttagtgctcgagcaacttcgttacccgactttcgtacatagttatcttctgtggctatataagccgccgccgcgcgcgccatcttgaaacttgtcatctccttctcagaagcagcgcaccgcaattacaaaagcgcaccggcggctcgtcctaccagacaactccaccgccggtgctctctgcgagtgctgcgtagcgacagcacgggtccgtcagggcccgtcgcagaggaatatccaactttaaaaccatcgctgttagaggttgcttccattcggttaagcggcccatgaaacggtgatgacctgaggaatggaacatgcattacgtaaatagcgtagctttctagctgaggaagtttagcacgggctgcggtttctcaccgtccgcgcggtgcaactcgcgcaacagggcgccggcgccgtcccgcaggtgactgtcgggcgaaccgtcagcgacagcagccagcacgtcgtgcatggcgctagcgaacgcgtactgctgcacggacaccgctccaggcgcggtcatgtcgaccgcaagcttgtgggagatgctggcgcgaacgagtgcggccgcccagcgggtcgagcgcgcgctcgcatggccggctaacaggcgcatggccttgcaaaacagcagctggttgcgcgccagcgagacctccagcagggcgggcgtcagcagatgtgcgtgcgcatgcaacacttggtgcaccatgaccacctggcgcgcgtcgcacagcgcgcccaagctctcaaggcccgcgttcaccgccgccatgtcctcaagggccaccatcgtccgccacagcatcttctgcgacaggctgtgcaactcgccgtagcccgccagccagcggccgcgccactgctcgtaccacacgcgttcccgcgcccggtagcacagcagcagtgccaggtccgcgccgtgcgtcgcgcaccgccccaccgcgcccaccgccgcgcgtgcctgcgccgccccaaagtgcgcactcagaaccacctgcgccatctcccgcggccccgccccgtccgccacggcgtgctccagcagcgccaccagcgcggccccgtctgtcccgcacgtccgaacctgctccgctagcgtcccgcgcgcctcgtgctgctccaccgcccgccccagccggcccagcagctgcgcgtagtgctcccccacccgctcctggccgctcttggcgtccggcagcccccggttcagcagctccaccacgtgctcttcctctacgcgctcccgagacagcagcgacgacagcagcgacggctcccgccccaggtaccgcagcgtcgtccgcagctccttgctcagctccgccccgtggccccgtgacttggatccaagcgtctggagtatgctaaacgagcgtctcatgccaggaacaacgtattatctcgttgaacgctgtcctcgagcctcgagccaaatctgaccgtttttttgctagagcatacccaaaaagaaacatcttgatgcgctaaacaacatgacaatgattagcgcgaggatgcctttcatgttctaaattcatgcctcgaggtcccagtcggtgccgcatgtagtcctgccggccgattatattgcggcgtagctgtggtgaaacatcggcgctaattgacggataagcagctgtgtaccttattttcactatttcttttcacataccaacgactaaggttgattccaagaggtactgactgacccagtggacagcgtagttatcggagtaactgggcaatgtcgtacgggttctcggggagcggaggaatgggctgctcaaggccgacgacgccggagctgacgaaggagctcaacatccccaaggacgtggcgagcgccatgaggaagtcgctgtcgtacgacttccttaatgtgcctggcggggacgagcaggcgagccccatcgggacgccgacgacagcgacagctgaggacggcgcggacggactggagagcgaaacgggcgatgggcccagggcggcggacgagggcgggaagggggaatttgcggactaccagctgtggcaccaccaccgcgggtcggacgtgggggtggcgaagtcgcagtcgtcgacgtacgagagccttctggaggtgatgctgggatgggacttttcgggcaagcagacggggggcgacaagggcgcgccgcgcgggtcgtcggaggaggcgctggcggtgcggcagtggttgaacccgcgctcgtctttttccgccgcgtcgacgaatgagccggagctgtgcctgacggcatcgcgcaagagctcgctgatgacgctgtcgcggtcggcgagctctgcgtttgaacgcaagtgctggatcactgtgtgtacgagcctggcagacatgcagcccatcctggcgctgcgcaagtcgctgcaaaacatccaatccaagtacaggctgctggtgttgtacgatgcggaacagagcgacgtcgcggagtgcctggtgtcccacgacttctacacacttggaataactccgctggcgccgaggctctccgcggagttggcctcagacggcacgctgctgccgcgctggctgctactagccgcgtggcacgagctaaacggtgcgtacgatgacgtgtgctacttatcgccatacttgctcgcggtcgccagcatcgacgagctgctagattttaatgacgaaatagacaacgagacatgcacgctcgtggtaaacaggaccagaataccctcggttatcaccttcaagccccacaacgagatacgaatggtgttcgacgagtacctcactgtgtatggcgcggacttggagaaacttgaaaaactgcgcgggctgagcgactggggcatcctttcggagctgttttcggagtcatgtcatcgcctgagcgaccgttatggcgtcgacgtcggcgacgacagccttcccgttatgaggggcgtcaaggtactggatttcgggcatgtgaagccctggctacatgccgctgatgataaaaatgcatacgttcggctttggtggagtttctgggataacggtactgtgtaatgtattttagtggtcctatgtaatcccttattactttagaattcgttatccttagaaatggatgatgttgtaatgttagctagtattatgggtgcataagctgacattcggcgtcgaagtgcaacatgccgcaccaaaacagtacaatgccttgcatactaatgggagggggggcccaacaccttacaggcgggctctactctccgtataacggcagtgtgagtatgcatgtgctgcaccaaaaacatatatatatatcgtaacggtagcacgttcacggtagacccagagagcactctccgcctccactaatcaccgaagcctcaagatgccatcagacatgctacagttccccagcgagaacgaccgccagactttcgaaaggcttgtctccgagcttcccgatctcatccacaaacgatgccacgactacgacgagctgtacggccacaaattgctggaggagggcccagcggaggtagccaagttctacagcaaggaccacgcgcacgcattgctcttcaagttcctgaaggcgaacgcattttcgtacgagggcgcggtgaagcagctggtgagcacgctcaactggcgccgggagttccagccgctgaaagctgcgttcgcagaagaacacgacgagcgtctgatggccgccgggtacatctcctacgacgccagcgcggcgcccaacacccggaccgtcacgtggaacctctacggcaaactcggggcctgcaaggacctcttcgcagaccaggacacgttcatccgctaccgcgtcggcctcatggaacgtggactacaggcgctgaatctccttgacccagataactgcagcatgacccaggtgcacgactacaaggacgtgtctgtgtggaacatgaacgccgatgtcaaaaagtgctcgcgcagggtcatcgccatcttccaggaccactaccccgagttactctacgccaagtatttcgtcaacgtgcctaccatcctccgctgggtttacgatgtcgtgcgcgcctttgtatccgaggagactagccgcaagttcgtggtgctgaacgatgggaccaagctcgcagcgtatttcgccggtgtgccggccgcctacggcggcaccgcccccgccacgctcgcagagctccccaagcccgcgtccaggccttctccctacgccctcttcctcctacagaagcatatctccgaagagctagattaatcccgagcgccgagcacatcgccatccggtgccatcgcatatccgggctccgccacacgacgagccgcgctacccgctgacgcccgcacaagaatctgctcgagcattcggtcttcatgcagggatcgggtcgccgacgcgcactattgtgtcattgtggttcgctattgtcgctcgacagcgactggcgcttttcgtttcgagaaccttccgcaatgagatagatacgcatcgcagagcgatcagtcccctatcgtacaggtagacactatataaatgcaaccgttgctgggtgctgttgtcccagttgctgcaccgtgacgatagaaaccatgcaagtagcaggcagcaagtatgagacgctcaggagcgccgcggctgccaagtcgggcgtagccaagcagagacagaacaagagcacgctccagcgacgcctgcgatcgctgagcgggcgccagccgaagcgttggcactgcgagagcacgccgcgccaaggcgtggtcatcgatgagtcgcttgcccaccttgcgatgcaacaggaaaacaacggctttttctacatcatcgagctcccgacgccggggaccgtgctcgaggacgcgccgtcaccgcgctacgagacggaggagccacctgcttggggcacgggcgatcaggacgcgaggccagaccctgctcggcggctgcagcaggcttgcagcattgttgtcgaggagctgccggaccaggaagacattgagatgtccgacgtgtactagcactcccgcgcttgtgccccttcattcataccgagaacgcggccttcaacagggcgtgtaagtatacataccagtctatataccgtacttaaggctgtacatgggctcgttgggtagcgaagctgcctggcgcaccgggccccaaccgtcacgtgatcagatatatctaccaaaatttttcagcggtgcttaccatcacgatcataagaactcagactccagaggaaagagacaagagaagcggcctttcattgcgttggagtgtttgggttcttgctgtgcagactgaaaatactagatagacttcgagatgactgctgaccattctagagacccctgcccgctcgtggtgctgagcgactttggaggtgcgttcgccatgggtgtcatcggtgggtgtgtgtggcacggtatcaagggcttcagaaactcgccgcttggggagcggggatccggggcgatgagtgcgttaaaggctcgggcgccggttgttggaggtaacttcggtgtctggggtgggctgttctctacgttcgactgtgcggtcaaggccgtgcgcaagagagaggacccctggaacgctatcattgctgggttcttcacgggtggcgcgctggccatcagaggcgggtggaagcatacgcgcaacagtgcgatcacgtgcgcggcgctgttgggtgtctttgagggtgtcgggctgatgttccagcgctattctgcttggcaagccaagccgatggcgccgccgctgcccgaccagccgcagcccatgcaagcctaatgagctcgccaggatctatgtatgttatgaaagttgccatgggacgaaaatcgccgaatcacgatgtcattcctaccgttttatataatcctgaggatacacatcacctgtacatatacacgcagcgcccaagtagtgggtgtatcctgggtctcgcctgtggcagatcctacgaattattcattacttgcaagagaactaagcacgcctatctgctagttacgtatagaccatatagaaaacgaaggaaggcaagagccagatgcattattcacccagatgtagtttgttgagttctttggtagccccatcttgtagcgagggaagcttatttactttcttcggcagcgttccgggtggataccactccttgtcaaaaggctgtccagtaatgaacgggtgtaataacgcctgctgaggagtccagcgctccagcgggttcaagttcagcacgccaaacaggaagtgtgttagacattgtctatcctgcatttctctttccaacagctgtgaggaagcgcctattttttttgaaattcgatagtttctgatcacatcgtccaacttggtccatttaaagtactgcttgccgacttcctcgcttgcattgaattccacattgtactcatccacagttttcagggcccatgccttttcctgaggatgcagttttctgaagaaattgtatgtatttttgcccatctcacacatccaaggaggtgggacgcccagcatttccactatcctggtcatttggttgaattcggaggctcccggaaacactggtatgccaagaaataattctgccacaatacaaccgaaggaccacatgtctatgcttgtagagtagggaatccccataagcacctccggcgcgcggtaaaaccgcgactggatgtatgtgtagacggtgcgggcctcttcgcaggcggacccaaagtcgatcactttgagttccggacggtcgggcgagaccaacagcacattctccggcttcaggtcacaatggatgagcttgctctccttcagcacacacagggagtccagcagctgcttgcagaagtttttgatcaggttcatggaaagaccgtggaacttgttctgcttgagcagctcgtataggttgttactgagcagctcgaacaccagacagaggtggttcttgtgcacaaaggagtcgtgcaggcgcaggaagtgatgctggttgagggggtcgatgcgcttgttcagcagctccaggatcttggcttccatgatgctctggttcaggtactccgtcttgctcttgaccaccttcaccgccacgatctccttcgtctgcatgttctggcacttgaccacctggccgaacgtgccctgccccaggatatcgaggatcagatacttgcgctgctgctccatgcccagaacatcgttcacgtacaggatgtagtcgctgttgatgttgtcgtgcccgttgttaagcttgccctcgctgggcttcgtcagcagccgctttgggttcttcgacgtctggtacgagaactcgtccgagcacagcgagtacgtgatgatcagcgactttgtcaacgcgatcagcggcgacaccgtcttgctgttcagcgacgcccgccggaacttcggcatcgcgtgcagcaccggcgccagctcctgccgcgcccccactttgcgcatctgcggcaccgccgccgccaccccgcccgccgacccgcgcagcgtcgagttcagcgacgccgcgggcaccagcgcgccagcaagcggcgggtacgcgctcagcttgcggtacggcaccgcgtgtgccaccatcaggctcggcgacgtcgacggttgctgcgcgcctgtctcgaaataccccgggctgtggtacgtccccgctactgccacactctgtcgccgctggaactcgctcccgtagccccagctgtccccgtacgtctcccgcagtagcggctccggccctgccgcccgcgtgggcggcactatcaggctcgaccgccgccgcgcccgctcctcctccccctgcccctcctcaaacgtcgtcgccagctgctgaaacccggactgccgccgcccggccggcgacccaggctcgccccatgggtttcggaaactctgtcgccccagcaccttgccagttttcgccgcgcctgcgctcatgtcgaacgcggggttccatatacttttgcgctcctctttcattgaccttgctcctgcgagccctagttactccgctacttgtcccgttactgtacgtagttccaacgcccggctttatctagtcctgcttcaaccagttcaccatactcctcactcctgaacgcatggctgggggttatttatggcgtcgccatggaaaattttgtactaagcggagcaacacatgccatttggtgaagcaagctcgttaacggccttgaagagcgtcaggaacggatatagccagtggtcgcgcagggaatatgaatgtctccacgtctacaatatcgactaagcggcgcgggctgaagaaggtggtggaggaggagaatgctgcgacgttgcagctgggggaggaatttcagctgcgacagatcaaccaccagggccaggaagaagagctgatcgcgctgaacctcagcgaggcacggctggtgatcaaggaggcgctgcagcaccggcggcgggtgttcgggcagtggcgggacgggctggaggaggacgaggcggacggggaacacaatatgacgcaggagaaggagctggcgatgctggacaagctgctggagaagacgacggggggacagaaccaggcgctgaagcagacgatggtgtacctgacgaacttcgcgcggttccgggaccaggagacggtgacggcggtgacgcagctgctggcgtcgacgggactgcacccgttcgagattgcgcagctggggtcgctggcgtgcgaggacgcggacgaggccaagacgctggtgccgagcctggggaacaagatctcggacgaggacctggagcggatcctgaaggagctgtcgaacctggagacgctgtactagatagctacatagacaggaagaacttgccgccgccgcggcgccaccagtggtcgagacaggagtgcgatgtgtgctcgatgtcgacggcctcgcggccgaagttgcagacgcagcgctgcgcgagacgcgcgacgtgcgcggacgggcacgtgccgtagggcacgtggaagtagccgatctcctcgaagtggtgcacctcgtcggcgcgcaggagcagcgcggcggcgagggagtggacgggcgcgtcgccccagcgctcgtagtagaagccgccggcgcggtcgaggtgctcgaagaaggtcaggtacgccgggctgcggaagaagttgaggtcgccgatttcgaagttggaccagaagtgacacaggttgtattcgaggtctgcgagggcggagggggccgcgggcccgctggtgacgaactcgtgcaggttggtggcgaggtccacgagctccgggtgctcggctgcgaacgcgcgcacggcctgccacagcgtaggcacggtctgctcgtactccgtcagcgtgatgacgaagccgtacttcttgcggtgctcgcgcatgacgcggaaggggtcatacgggaagtcacagaagtattcgacgtttggctccacgcggaagtagtagtcgtagttgtccagcaactcttgccggaagaagaacccggagttgaatctgcacatgttgcggtacgaccgtgagccaccgtacgggacgtccttcgcgagcatatcctgcaggcactcctcgtagcgcagcgggtcgatccagcggggcgtgttccagtcctcgtcgggcaccagcccgtagaaggtccggccgctggccatcgcgctggtggcctccacgaagtccacgtcaaacggcacgtcgttcaggaacacccaatcgtagtggaagcggctgttaaaccgatcctcgagggagcgcatggagctcagcaccccgggaagctcccaattgcgacagagcatgagcaaggtcgcattttcgcgtgggccgtcggcgactagaggtcggaactccagcaggtctacgtaggaattggtcgacatcttcggcggacggaacaactggtcatatcgcctcacgttgtcgaacttgtgcaatatctcgtacgacctcgctgcgtaccattggtccagcgaacgctcgcccacatttttcagtctgcccaaaagtgcgaggatggttgcaccggcgaacagaaccaagagcagatgtgaccatctatttctcatccacctcgtatttcaaaaacggccccggtcacaggtgtgctaggccagccctgtatcttttcaactgccgttgccagatttatggttactggtgacaggctacgtagcacaatttttcacttatgtactgcgatcttactcactataggcgtatctgatcttcgaactccaccggcttctctgaagccttgtagatcggaaggctgacgctgttgctcgtcttgacaaacagggacttgactcctccgcggatggcgccgccctggggccgctggttcttgtcgcacaagaacttgacgacgtcctcgatgttgtggagcatttcctctggccggtggactcccacgacacctatgcggacggtcagacagttatccggagtgggaaggtaccatgtgttccggcagatgctgcgcagctgggcgcgcacgtacttcgggtcaacgtcgtccggcgcgcccgagcgcgatggctggggctgcctcgagagctggaccacgaacggcaccttcttgttcgagcggtagaaggcagagcccagtatgtgcggcagcaggtgctggacacggtggtcggcgaccaccatgtcgaactgccggaacagctcgctgagcttggcgccgcggtatttggttttcagtctcttgacgctgatgatatcggcgaagagttcggaagtggcactatccgccttcagagcattgcggtacggcgtgctggggtccttgacgaccaggagtattcgcaggctcgaaggcttctgtagtctgcaatgttgcagagggatgatcctggggacatagtcattcttggtgcccattggcttcttggtattgatcaccagctgcacgtgcgcgtctcgtgaaagcgccgggtccgctgcgcactgcttaagcagcgcgttcagcgccttggatgcgaggccttctgcgtcgatgggggcgtccatgctgatgcgccttttgtcgcgatgaggtgggatgagatggcatggaaaatgtagcgccgcgatatatgcacgaaaaaccgagcacttttgaataccgaatttatacgcatatgtggactatttatggatgacaaacacacgtatttatgatgatcaccatgttacagaaggacaataccgctacgtatctacatacgcccggaaaacagttaaaaataagtttttagattagtggatggtgtgggcttaatgctcagtcgaacaagtcagcaatgttggctggcagctcctcgatctgagtggagtagaatctctctagctctctcatgtcaccaacgtctctgtcggtaaccaagttgatggcaacaccctttctaccgaaacgaccacctctaccgattctgtggatgtagttctccttgttgtttggcaggtcgtagttgatgaccaaggacacctgttggacgtcgatacctctagccaacaagtcggtggagatcaagattctggaagaaccggttctaaactccttcatgattgtgtctctctgggcctgaggcaagtcggagtagatggcggagacagtgaagctgtcgtcggtcaatctcttggttagctcctcgacctttcttctggtgttgcagaaaatgacggcctgagtaaccgaaatggagtcgtacaggtcggacaaacagtcgtacttgtactcttcgctctcgacgttaatatagtactgctggataccctccaaggtcaaggcatccttcttgaccaagattctgacgggcttgttcatgaacttgtcggtcacgtccaacacctcctttggcatggtggcagacaatagcacgacctgggtggttggtggcaacatggtgaaaatcttgtaaatttgctccttgaagccggaggacaacatctcgtcggcctcgtccaggatgaacatcttgatgtggtcagtcttgaagttacgtctctcaatcatgtcgaacacacggccgggggtaccgacgacaatctgcgcaccggctctcaaggcctcggcgtcctcacgagggtccgtaccaccgatacaagcgtggaccttaacgtccatgtgcagcgcaagcgccatcacaaccttctggatctgtagcgccaactctctggtaggagctaggatcaacgcctgtggggccttgatgctctcgtcgattctctgcaacgcagcaatcgagaaggtaccagtcttaccggtaccggactgggcctgcgccaaaacgtcgtggccctcaatgataggcaagatcgcacgctgctggatggcagatgggtcaacgaaaccataaccgtagatacctctcaacaacacctcctttagctttagctcgtcaaacttgtgcacgatcttgtcgtagttggtttggatttcagagttctccggattggtaatactgtcagacatagtgggctcagaatatgaggttaattgtactgtcggtagtgagcaaagggttgagagggagtgaaatgatgaggttctttaataaaagcacggaaaaattttcactcattatatacggtaaagagagccagttggttacataagcgactgggcgacatcttaacgaatggccacggggagtgatgacttgccagagcgccaggaacaggtcacacagccatgtcttacggggcttgcgagcatcagacatggagctagggactgatcgaagaggcggcctggcgggtagacgttggtccgcacggcagggagtgaatggacatcattccgggaaaacccgggttgacttgggtttgtagcgctcccaggggaacaatggcggagcagcggcggcagcaggcgcgggactagctcttggagcctcggttggcgcgggatcagccgcaggtgcggcgggcggggccggtgcggcactggagctggcagcggcgggggccacggcgggcggctcgggacgcaggagctcaggcgcaggctgcagagaagaacggacagggcgcgggcgtgcgggcgctgccggcgctggcaagtggattcccgggggcctgggggcggcggcaggcgcgggccgcggagggccggggctcggattgcagagcggtagcttgtcagtggacttgcaggagtggaatggcgaaccgaggctggcggactccgccaacagcgcatcctcagggaccaaggtcggcgaggctgtgctccagctgtaggtaccgacgagtgccagcttgtacgcctcgggcggggcgtccttcgagggcggctctttggtcccgtcccaggcacatggcgccgagggcaatggttcggggcagctcggcacggcgagttgcggctcctgcatcggcgtccagagatgcgttttgggggccggcgcggggggctgcgggctgggtagcggcgcccaagactgggaataggcctggggctgttgctcggcggctggcgcccccgcatgcgactcataggctggcgccccagaatgcgactcaaatgccggtgccccggaatgcgactcaaatgccggtgctcctgcatgcgattcatagaccggtgtccctgcatgcgactcgcagaccggcgcggaagagtagggatcgtgggcgggcgcagcggggcgcgctgcgaaggcacgcgccgcttggcgcgactccggggcgggcgcccaggactgcgtgccatcggcttgcggagcagacacatcggggccctcgcttgcattgcctgtggagaatgcgggacatgagaaatggcgtgccaggaaacgattgtaggtttgccaccagagctcgcggaagctgtctgagacgccacgcgagatccatggcttctcgtggcctataaagtggaccacggcgatccgccggcggaagtagtccagcgcgggcgtggcctggtagcccgcgttcggcacggtgacgttgtacaggaacgggagcgtgcgccactcgttgggcagggtgccacgatggcaggcgcggttaaaaaacaggtttagcagaccctgatctgcgccgtcgatcgaaagtgcggtttcgacgtgggcagcaagctcgccgtgcaccgcaaggctgggcactagtaccatgacgccgctattgaacaggtcgggccagccgcagtcgggtacagcggcaagctggcgaggcgcctggtccggcacctggtctacggcttcgagaaaccctgagtgcagtgggaacgcgtcgcagtccaggtagagcaccttgcggaattgcgtgagcttccatagctgcaacttgtggaacgtgtccgcaagctccgggcggcccaatgccgctagattggtgcggtggcgtgcaagagctgtcttgctggccgattcatcccccgctaggcggataacctcgtcataaagttcgtgtagggcgcgcagtacgtcttcggagacgttgtcaagtacctccggtgtggccagaagtacaaggcggtgctcgcgtgactcaaccaagagctcacgcacgcgaaacgccagcgtgaacgctcctggcaggtagtccgccgagtagagcagtgttgcaatgcctaccaacatgaggtcaatgttgttttagatgctcgtggtgtgacgtgctcttgaaaccacttgcaagatctcttgtagatcgtaacagtaaataaagtaaacgcggcctgtgtgagtgggacctgcaatcggaccgctcaagacagagaaagctcggaagtgtttcgaagctctggaacttggtagcagggtgcaacgctcttccagaccaccgttctttgctttgtaccacaaccagcaaatataccgagaaagtacccctgactagatggaccgaaaatgacccgtcgcggttgcgcagctggtgaatgtgcaacacgtgtggtggctggtacgtgcgctgcgaccagcaacatactcgtgtctgctggccagcggtatgcacttcgcgcgagcatgcaggtaggttgtgtccgcgtcccggggtccggccagggccggtcgcgactccggcagagcgtaacgatggtgatttaaaaagaaactattaacgatatatgatgttctttctaagccgcttaacgggagtagctccagacgttcttcaacaagccgtccttttgagctagcctgttcatggagtcgtcggcctcacctctggctctgacgtagccggatagggcgtatgtgatgtactcacctgggacggcgtggccgttctcgtcgacctgggcaatgttgatctgcacggaaccgtggtccttagccttgatgattctgttggtggcagaacactttcttggaacgtatagttcaacctatagctggttagtacgggctcggctcagtcggcagcgcttcagcgcagcgctggacactgtgcaaacatactagttgacccttgtcgttttccatcttgactgactgcttgtatattgggcttctcgagctggcctgcgtgcaacttagctaactactggtattggaaaactaagcgaatactggtgagcttgcccgccgcgcgcgatcaggcgtcgaaaaataaggacgcgaagaaaacataatgtgtgggcgtgaatgtacgggtgaagtgactgctcaatgacctcggcggctagatgaacagggtaacacaaataaataagttggagctacgtaatagcctagtcgcgggagagcacgcagacgccctccacgtgatgagtctgcgggaagaagtcaaagccgcggatggagtcgaccttgtaccgtgcgccgttaggcgtctccttcaggaagtactgaacatcccgggcctgcgagtgaacgttgcaggatatgtagacaatgcgcgcggggttgtactcggcgagctgcttcaggaagacgtcgtcgcagcccttgcgcggagggtcgaggatgaccgaggttctgtcgcatggggtgtctatcgaggcgaagattttctccgcctttccgacgatgaaggtgcagttggtgactccgttggtctttgcgttgcgttctgcaaatgcgacgctatcggcggagacttcaactccgatgacgcggtcgacgcccttggacgcggtgatgctgaacaggcccgagccgcagtaggcgtccacaaggtagtgcttgtcctccggcccggagttagggatgcggacgttgtcgcggacgtaggctgtcacgacaggcaggatagagctgttgttctggaagaactcgccggcgctgaactcgaaagtacagccgtcgacgtactcggtgacgatctggcgagtgttggtggtgcatagtttgagcagcggcgggtcggcgtcgacacgcagatgggagacctggcccgagactgggtcgcaggagcccgggtctagctgctcctccacaggggctgccgggttgagcaccttggtatgttcgcgcaggaggatcgtggcgccctttttgtagtttttgaaggtctcctcgaatcgagcgcgctcattgcgcatgccgcggcggatgatctctgtgccaatcgggcagtcctcgatgtccaggatcgcggcgctgccgccggcgtcggagtggcgccacgtgggccggcccttttggccaaatcccagcggtgggcgggtttcgagctgcttgaccttccgcggcatgtcaaagtgcggcgttagtttggtcctgtaggcgaactgtagcggcgatgcgaccgtctcgccgacggtggggagcaggccctcggccagcagctggggagcaaagaacttgaacgcatttgacacggttcgctgtttgagctgcagctgctggtcatacgtcaggaactgatactggcaaccggagcacttcccgaagtacttgcagttgatgaggtcgtcgtggcgcatttcagcagaggtctgcacctccagcagagacgcttcggcgtagtgcgggtgtgtcttgtgcacttggatggtgaccacgtcgcctggcaggccaaatggcaccagcactagctgtttcttgttgctatcctcggggctgtcgacgatagccagtccgtcgccactcgacgtgagcttcagcacatgcacgtcaatcaggcgccggttgtacttctgctgcatcggcccgccgcggacgtcgttcaggattggagtaacgtccgtctcaacctgcacccgcgataggccctgctcccgcagcaactcgtctatctcaaattgtagaacgcctgcaggagaagtggggtccacgggcttggccttgtacttcttgggcttccgagccttctttttgggctgcgtcttgaggtctgtgggactgccgggccgcttcatctctgcggctgcgccgtcgatgcccacgttggcagggctccctgcggggaacgtcgccagtttaggatccgtagccatggtgtatcttcgtagtaaatggaattgcagcggaggaatactctttaggactgtcctccgtatgaacatgtaccagttaaccgccgggtcgctgccgatgagtgccgtttactattttgcagcttggaaaattttcccagtactctatcctaacaagatgctgtcgcaccgatcgatttaaactaacatcttggctcgctacgactagatgcctaactacacggtcacgcaggcctcgacagcggactaggcgcgccggcgcggcgcttgcgcctccgctgccaggaaccagggccggcgaaacatggctgtcacgtgcgctataggaccacacagcggtgcttgcgcacccgcttgtaagactgcgcctgcgggtcccgctgctgcttcttcttgaacatgcccttcaccccgcgctgcgggggcgcgcgcagctcgtcgtacagcgccgtgtgtatcgccgtgttgaacacgtcctccaggcactgtcgcgtcttggccgagcactgcaggtgcacgaaggcgcccatcttgcgcgccaccagttccgcgtccgtcgggtccacgagccggtccagcgcatcaagcgagtacaggtcgctcttgagccccaccagcatcatcggcgcgtgcgggcagaagtggcgcacctccgggaaccacagctcttccgcgttcgtcagcgacgtgcggttgtctgccgcgtagcacaccatcacgatgtccacgtccccgtaagacagcggccgcagccggctgtactcctcctgcccagcagtgtcccacagcgccagctcgatcaccttcccgcgtgggccctcaatgttcgtcacgtagttctcgaagatggtcggcacgtagtcctctgggaactggccctgtgtgtacgacatcagcagagacgtcttccccgtcgcgccgtcccccaccaccacgatcttgatccggtagtccggcgtcgcgtggtcgcgccggctgcgctcgtagctcgcaacctcgctcagcgtccggttgaatgccgccccgcccaccgccggccccgcgcctatcagtgctccgtaattcttctttggcgcagcttgcaacggccctgcgctcatttcgttctgtctgcctcttgacgcgctgtcccgctaaaccgaccgcgattgcttccactgcccttccttgccgcgtcctgaacgccacccactgcctgccgattttcacctactggcgccgtggtgatctgtttacctctttctaacaagggtgttgaaatcgggggatgcaggtgatttaaggctcttgcgctatgctgcttacatgtctcttgtttacagataacaagaccagagcgaggccacgagaacagactaagatcgcagaacggcattggaagggcaaacacgggagctgaagatgaccgatgatcaggtggcgcaggctctggtgggctacgttttcaacgtagcgaagctgtttctcaagctgggggcggaacaggacgcgttcgcacgcacgcacggggccaagtttgaggaatgggtgggcaacgggaacatgcggacgctgttcctggtaaaggacgaggagggggaggtacaggtgctggaggagctggaggggccggaggcggaggggccggagcagagtgggcggttactgctaatcaagaatcggccgttcgtggacgggagcgcgccgatggaaagccaggtgcaggtgctgcacctgccgccgcgggcgcactttgacgggttcaagtcgtttgtgagcttcggggtggcgacgatgttcgacgcggtggtgagcacgaactcgaatctggaggcgaagcaggagtcgatcaactctgcgcggcgcaagatcaaggacctgtcgctgtcgctgcagagcctgcagcagttcatcgaggtacccgacatcagcgcgacggcgcacccgctgatcaagaagatcattgcggagggcgcgaacccgcggaactacacgacgtacatctcggatgagcagtttgctgactcgcagtttctcaacagcttgcagaagattgcgaacgggtggatcaagagcgcgcagaacctgacgaagctgacacgcaacatcgaggatggctctgcgactgacgagatccggttctggatcaacctcgagcagtcgctgttggcgttggagaagcagatcgcgatcccggaagtcgagatcacgctgtccattttgactgctgccaaacggttccatgcaaccgtcacatttatctctgacaccggcctccgcgatcgtatcttggagacgcagagctacaaccagattatgagcgactttccacttgcggatctgcagactgcgacgtcttttacaaagttgggggaggcgattgagtccatctccattgctttgaagaagctgaaggtgtccacgtacccacttgctagggccgtaacatttgtggagaaaatatctacggagcttgatcagaaactgagagagatgctgccaaacctgatttcttccgacttcatttctttccaggaggactatgaccactgtatcaagattatcaaccagtgggaagcgctattaaaagaattcacgtcactcatcagagagctgatgaggaagaggtccgaaaagttcatctttatgaagatagatactcagacggacagtctgaaggaagtcctcaatactgttgctgcatttaggaagaagcatgatatactgatccatgtgctgaaaggtatcgggtacgatacattgtccgaagatatccaaagtatttatgagccggtacaatatcaggatcccttgcgcgacaatgcaagtaagtgggctaatgcagaggccgcatataaccaacgtgtaagcctgctcgagaacaagcttgtcgacatgttaaagaagaagttggacgattgcaagtcgtctgattccatgttctctatcttcgaaaagtacaggcctcttatgaagcgccccagaatacagggcgcagttagagaataccagcatgagttgctccataatgtgaaggatgacttggaacacatacaccagcagctttctttacagaagtggaatagcgagctttcacgtttaaatgacattcctcctgtttccgcttctattatatggtcaaagcaactaacaaaaaagttgcagaatttaacatccaggcttggtctgattctcggggaggattggataagcacgtctgagggatcccagatctttgtggaatgttcctcaataatgaaggttctaaacactgataagctattcgagacatgggtttctaacgtttcctcccaaaacttcctgttagacgaacctatctttaagattcttattaccaatgaagagtatgaattgcatgtgaactttgattcggtggtggggtccctgtttaaagaagtacgtaacctcatgtggatgggattcaacgttcccagtaacataatcaagaattcaaggagagtgcgaagcctatatccgcatgcagtgatggtttctgaacttctacagacatttgtgtctgctgtgcagagcttccaggagcggccacatacctggctcctactgaaagatgaaacggaaaatatttggcaattactatcagccatgataactgacacatgggattcagtgcccctctttgaagacgatgcaagccatgaacgcgcagaggatattcaaagggacgagccatcgattttgcgcttagaacattctattggcgaacttctgtccaagttccagcaattagatggactagagaaaggtctctcctcctgtttgcaacagttagaagtgtttgggaagctagacctacagaacctggaggttttaataaataaaatacagcttctcgtggatcaagccacattgcatggcttccataacatgtcgggcttcattgattacttaaatacgcggataagatcgtatttggtcagtactgtctctaagattttagaagaatcccaattatctccaaagaaacattatattttgcaacagggcaagaaagttaccatttctcccagtatagaagagaccaagaaagcctggatgagagatttccaaaagactctggaggtagcaaccaatctccctaagatcacagataagaagtttgatatcactgagggccagatggaaaactttactgatataggaactgacctatctgagtcattgatcaaagcatttctcaggatagaagacgcttgccatgcaattgatgagcattttcagaagtggaagaagttagaactattatggtgtttagatgagctgacgctgctagaaaggttgggttccgatgttgaagtaagctacagattcctcttagattttatggaagaaagaaaggctattgacatggtagattctgaaataacaattgcgggcgatactatgattaacaatgagcaggtttatgttcgcgtttctgctaaatacgataactggcaaagggtattgtgtgagaaattactcgagaattatatggatcacgcttcagaatttgacacacagcttgtacattctaggagactcctcgagactagtattataaacttgggttctctttccaagactactgagctaattgcatacgttgatgatataaagaacaacttagatttaatgttcacgaggtattctctacttttaaacacgcagaaattgctacaaaagctgcgattcagaattccacaaaactttattcatgcagaacaaattgagagtgatctggtttctctacgagaaatatgcttacgcaaggaagatttgatcaataagaacagagatgctatttcaaataagttggaggcggaactactaaaaatacaagaagtagcaaactctctatcgcaaagctggtctaagaagaagccattatcagttagtattcaaccgagcgaggctctttcagttttgaacacattcgaggattcgattgccaaggtaaatactgagcgggaactcataaacagagctgcaaaaatattgttggtgcctattaagctccaaaacgttctctcgccagtaattgaagaagttaacgactacaaggctgtatggtcttctgtagatggtctctggaattctttcaacgctacattatcggtgaaatgggctgattttgaatctactgcggtaaaacataggcttgaggctttgatgaagaaatgccaagatatgccaccaaaggttctgcagtacaaaatatttcaaaacattgcgggctccattgaggctacgttaaaatccatgcatttgctaaaggcgcttaaagaaccggctataaagcccaggcattggtccatactgttcaagcaattgggcgcatctcatattgtgtccggcaatatagatgatcagaccttcactttagaagatattttgcagcttaacattttgttgaacgaagtgagcgtgaagaagattgtaatcaaagctagaaatgagaatgtacttgaatcttcactgtcgcagatgaaggcaaggtggagggcgacaaagtttgatcaatttgttcattctagtggattggtattagtaaagggctgggatgtaatctttagtaattgcaatgatgatctgaacatgattacatcaatgaaaaactccccatatttcaaggtatttgaacaagaagcgttagaatgggagaccaaactttctaatttctatgatattgtgctgagttgggtagaagtccaaaggcaatggatgtatctatttgggatattggctaagaagactgaaatgaaaaatcttctgcccatcgaagcttcgaaatttgcatcattgacctcggagtataattccctattactaaagttatatggttcagagatagctattgatattcttcatgttcacagcacccttcctacgttaaaaagaatggcggaatcactcaccaagattcgcaaatccttaaatgactttttggaaacccagagacgtctattccctagattttacttcgttggaaatgaagatctactgcaaataattggtgctggcgacaatttctcggagttttcgcgtcatctgtccaaattgttttcgagcgtttctgacttcatttatgatgagtctctgattcaaggtgtatactccctagaaggggaaacacttctatttgctaatccagttagagtgacgccgtcatctaagttagatcaatggatgaacgaagtggacctcgaaataaaattgaccctatccacgctagtaaagaattgtcttgagagttaccgcaccagtgggtctttgaagcatattatagagaaatatcccttccaggccttgctacttgcgttacaatgtacttggacgaataaaatagagacatctatgaccaaggataactttgggtctatatgttccagcatcgatgaagagatggcaagcttggcagcagtgattgactcatacccaactgtcacggagaaacgtaaggtagaatctctaattgttgagttggtacatctgaagacaataacggagaccttgaagaatgttgagttggagcagatcgactttcattggaaacaaacacagaggttttactgggatgataactcaaacgatccattgaacagtataacaattgaacaatcttgcgtttcattctgctatggatttgaatatattggtgttccagagcgcttgatttacacaccattattggatagttgttttaacgctatggtacttgctttaagcgaacatatgggcggctgcccatttggtcctgctggtactggtaagactgaaacaatcaaagcattagggcaaaattttggcagaatggttttggtttttaactgcgacgattcttttgatttccaagcaatgagccggctgttgttcggtattactcaagtcggtgcctggggttgctttgatgaatttaacagattagaggagaagatattaagtgcagtttctacccaagtagaagccattcagctgtcactggttcaaggcaaacctgaaattgaagttctggacaagaaaggttcattgaatagcaatactggtatcttcatcaccatgaaccctggttatgctggtcggtctgaacttccagaaaatctgaaaaaaatgttccgagagtttgcgatgatgaagccagacgccttagtgatcgcagaggtgattctaactatacttggcctggaaaatccaagggtgctggccgaaaagattgtctcgttgtttaagttgttgaatgataaaacgacttctcaaaaacactatgattttgggttgcgggctttgaaaagcgtcttgcgtaattgccttaccattttaaggtctaccaccgatttagattcaacacaggttttgttgagaagtctaaatgagatggtcgtgccaaagttgatttctgttgacgaagcagtttacgaggaagcgatcgcagacttttttccaggatcacgaatcaagccatctaacgaacaactactttcttatctagcctcctattgtgaatctaatcaactcgttgcctcggatttgtttatcaagaaatgtagccaattttatgatatccagaaaactcaacaagcgattatattggctggtgatgctggtactgggaaaacatccgtttggaaatctgtcattaactcgatgaagcgttctggagcaaaagaaaatattgtatacatcattgacaccaagacacttaagaaagaagacctttacggaaagctagaccctgtaacttttgattggaaggatggtattttcacgcatctattaaggaagaccttactagatactatggggaactttaaaaattcaaacatctggatagtttttgacagcgacctggatcctaattatactgagacgctgaatagtgtacttgatgataacaaggttttgacgttgccaaacggtgaacgcttaaaaatccctcctaatttacacattttattcgaggtacaagatttggagcatgctactgcagccactgttagtaggtgtggtatgatttggtttgctaacaatactttggctgctcaggatatcttgatctcgtgtttgtcaagggaagtagcgactttacaacaggacgctgatgttcacgacaatatcatagcgacaatccaggatatttttgcgcaatttatacaaggctctaccttagggaacgtaattgaagctacctacaaagctgatcatattatgggtgtcgacttttgcaggtttattgaaacagctgtgactctgttatcttgtgacatcaagaaaaacaaaaaacaactttctagactaagccaagtagcatgtgtcaggtatatgtcaaagagattggctttggtgttgatttgggcgttcgttggtggcagtgatctcgaaaccagggagaagttctctgaaactatttgtgagcttctcggtatttcagatattcccacagggtcgaaatttttactagattatgatgtctcagttgccacgcaggattgggtacctgtctctgctgaggttccaaaaacctcactggagtctcatgaggtattaattcctgacttaataatccccacggttgatactgtaaggcatgaaacactgctatttgatcttctcaatgctgaccgaccattgatactatgcgggcctccaggatcgggtaagactatgacgctttacaatactcttaagcgctcagatagatttaatataatcggcatcaacttctcgaaggatacctctgtggaacttttcttaaaaacgctagagcagcatactatttgcacgcctacttcaagaggtatcatcatgcaaccaaaggcacatggtaagcagctagttgtattttgtgatgaaataaatctaccaatgttagacgagtacggatcgcagcctgttatcttattcctaaggcagttgattgagaagcgaggcttttggaatgtccaggaaagcaagtgggtgttcattgaaagaatccaaatagtcggagcttgcaacccgccaggacatgcaggaagagtatcaattacccctagatttttgaggcatgcttccattgttatggttgactatccaggtcagattgcaatggaacaaatctacgaaactttcttcaatgctatctttaagttgacgccaaagctaaagggatttgcctctgatttcacgaaggcctccctacaagtttactacgattgtaaggcaacttacacgtccgaagctcacagccactacatctattctccccgggaattgaccaggtgggtgagaggaatacattttactatttcggacagcggaaatatagatctggcatatatgctagaactctgggcccatgaatctttacgtctcttctctgatagactggtgtccagctcagaaaagaatatttttcagtccatcttgcaaaatgcaattacaacgcacttccctaaccagccccttggttcactagaatcatctcaactcttattttctaattggctttccttgaattattcgaaggttgttaagagtgaaatgtatacatttatcaaagagcgtctaaaaacttttgcagaggaggagcttgatacagaattaactatctatgatgatatgatcgataatatattgagaattgatagaatactgaaacaagtacagggacatggcattttagttggtccaaactatagtggtaaaactacaatcaccagatttgttgcatggatgaatggcattaaagttgttcgtccaaccattcaccgccattttacgatagagaattttgatgagttcttaaagcaaatgttgctacggtgcggcactgaaagcgagaagatttgcttaattattgacgagtcaaatattttagaaacgtctttcttggagcgcatgaacacattgttggcaaactcggatgttccaggtttgttcgaagcagatgaatatgaagcattactatcaaaaattggccagaggatttctcagcttggtttattgcttgatactgaacaggagatgtatgactggtttacttcggagatttctaaaaacctgcatgttattttcaacatcaatgaccccgataatcgtgagtctacgcaattgattacttcgcctgcattattcaatagaagtgtcatcaattggattgggacatggtcgagcaggtcctgtttgcacgtggtgaatgaagtgattaaaaatatgccacttgacagagcagactacacaatacctcatcatgctgcagccaacctgattgttccagatggtaacttggtcacgataagagatgttgtagctaacctattcgtcttattccatgagcaataccataggttgttgggaaactcacaaggttctccaagcgcattcttaacatcattaagacgattccaaagtctttacatgagcaagttaaaagagttggaagaacatcagagatttacattagtggggttggaaaagttgaaagatacagtgatcaaagtaaaacaattaaaccagagtttgtcgcagaagcaagttgaacttcaacagaaggaaaaggaagccagagatacgctagacaaaatgttggttgatcagaatgaagctgaaagaaaacaagaggcatcggttgaaattcaaaagatattggctttgcaagagaaggagattaatgaaagacggaagataattatggccgatttggccgtagcagagcctgcaatcctagaagctcagcggggtgtcaagaatattaagaaacaacaatttacagaattaaggtctatgttaaatccacccgatgctgtgaaaacaacactagaagctgtatgtgttatcttaggttactcgtgcaaaacatggaaggacatacagttggctatccgtaaagatgaatttgtcactgacatagtgtactacaatacggaaactatgatgacacccgcaatgaaacaagatattgagaccgattatctatccaggccgaaatttaactatgagtctgttaatagagcatcgctggcttgtggaccattgtaccaatggatagttgctcaaataagctattctgagatgttagttaaggtcacccctctaaaggaggaaatggtgaaggttgagaatgagatgctgcaaaataaggcgcggttaatggctgcaggggagatgatcaaagaacttcagacaagcattgaatcgtctaaggtttcctatagtaaactaataagagaagttgaaataacgaaaacagaaatggaatcggtacagagtaaggtggagagatctatcaagcttatggaaagtttaacgggtgaaaaggaaagatggataaagaatacggaacattttaaggactggaataaaaatctcattggaaattgtttcttgtcttccttgtatgaatcttactgtggccctcatgatcagtccctcaggttaaaactgttcacaatttggagcaatactttagctaagtttgggattgagtatgagccaacttattcatttattactgatatggttaatccattaacgaaagtcaactgggttgcttgcggtctaccggataatgagttattcgttgcgaacttccacatagccatgaatagctgccattacccttacgttatagacccaagctctacaatcgtcgatacttttgccaatttctatgggagaaagatgatgataacaagtttccttgatgtgggctttgtcaaacaacttgaaaatgctctgagatttggcggctgtattttgatccaggacggtgaattcttcgaccctataatatctcatttaattgcaaaggagtttaagaaggcaggaggaaggctaactgtgcaaattggtgatcacgaagtggatgtctccacctctttccaattgattattcactcaaaggaccctaatagctacatgagctcttttgtgaagacaagaatggcggtcataaactttacggttagcaaaggcagcattgaggcacaagcattgcagatcacattggaaaaagagaaccctgagttacaaaaacagcgcacagatctattaaagttaaacggtgagtataagttacacctgagatcactggaggataagctactggagtctttgaatgaaagcgatggaagtattctggaaaatgattctttaatttcaactctggagcaactcaagattgagtcctctgaaatcgctaagaaaatcgaagagaccaatacggtcattgtcaaggttgaagatctcgtcaatgaatataatgtgctaggggagcaatctgtcttaatttttaacctgctcgagtcaatcactcaatggcactggttttatcagataccaattgagcagtttatggagtgcttcagcagtatattcgctactaaaacacgagaaaatatgaccagatcagagcatttgctccttgccttgtatgaacacgtctacatgtggttttcccacgtctttaaagaccgtgatagaatggcctttggaatacttttattcgcttcttaccaccattccagagagagcaagttcttctcggagcatttctggaagatcattgaaggtatcgcctccgacacattaggaaccgttgagcacatcacagacaccaagctcgagcaattggtggcggcggccaacgagaaggattacctcaagggcctcaaatcgctgttggagtttctgccagaatcgagttggcacgactccgtgccgaaataccaaaatattatagttgcatgcgagcgtggtgtggatggcactttcaaagttcaacaactggctcaggaaatgggaaagaccgtccattcggtcgccttagggtctgctgaaagtatttccatggcggaacaggacctcatccagtattctggagaaggaaagtggttgcttttgcagaaccttcaaatgtctcatgaatgggccaataccgttcttccaaagaaattggagagtatcaaggccaatcccgattttagggttttcatgacatgtgggatccaaagcaagcctctagtggttcctttgctcagcagaagctataagatagcgtacgagggtgagcccggcgttctaaacacagtctgcgagctgtggcggactcagtcagaggaactgaagaatgtcaaaccagtagaaaaacttcatagcaagttcatcctcgtgtggttccactctattatcatggccaggtgccgtctcgcgcctattggattcaccaagaagtacgacttccacgatggtgacttccacgcaggtagcaagtttttggaccacatatttgaacagagcagtaacggcaaggagcatgtcgaccccgatttggtgccctggaagcttgtcagcgacaccatcggcaaaatcatatatggaggaaaggtggacgaccccgctgatttggactggtgcaagagatctgcgcggcggatgttcagcagcgacgcgtatctaaacaatttcgaagttgtccaaggcctgaccgttccaatagaccgctctagctattcccagtatgacaaatggtttaaatcgctagatgcagctgcagaacgtacaactgcctggttagagctgtcggatgcttcggccctgcaaaacttctacgctcacgaggccaggatgatctgcaaaaaaatcatccagaccaatggccccacatctttaattcactgagtgtaatgtccatacctccagtactcaccagtcttttgcttttttgtatgttagataccagactatgtactgaatagcgacaacattagatatctaaaaagtctgtcgttttacaatcttaaggtcgcctgaaagaagagaaacaatctacgaaaacaatactaaaggcgaatatatcaacgtaatatgaccgctcaggcttcggataacattccgaatatcagaggaagaagacctcgtggcgtgtctgaccattcgggagcaaaattgcctcagtatgatcccggaagccatccacctggatacttcaaaccgtatatgtcggcgtttcggttcaaatgcagagagtaccttctgccatttaccgctaatcaatcggattatattgcattgcttcagcgccaatatcgaacaccatggagagacagctactttgcgtacacagcacttcttgggtcccacatgttttatgtgattgctctgcccattcccaggtggctaggatacggcgttgtgaccagagacctagtctacgtcctaggatactccatttacatcactgggtacctcaaggactatttttgtttgcccaggcccgcgagtccgccttgccaccggatcgcgctaagcaagtacacaacgaaggagtacggcgccccgagctcgcattgcgccaatgcgaccgcagtgaccctgttgttccttgtttacgcttggcggtcacgcatggactgcagcgcgctgcagttcttcctgtgccttgtgctgctggccgtctactacgtgacgctgactctggggcgtatttactgtggcatgcacggactgctcgacattgtgacaggctccgcaattggagtcttctgctttacagtgcgcttgatcactagagactacctcagtttcgaccaggctacagcgcagttttcgtggtggttccccttcttcgcggtggccataggcctactgatgctcttctaccatgtcgagcctgtggatccctgcccgtgcttcgaggacagcgtcgcctttatcggcgtcatcacaggcattgaggccgccgagtggcttttcccccgcctgttccatgagaccaccagccagtatcttgtgtttcaatggtcctacgtggccattccagcagcctgcgcgcgcatagttgctggaatcctctgcgtgctgctgtggaagagcgttctgagcaagaaactcgtctacagcctgctctccgtactgatgacagacgatcgacctgctgcacacgcagaacaccctcgcaccggccacgtgcgtccgctggtgccccgcatcgatatacttggcagattttttgtctacatgggcgttccgatgactgttatcatagtgtgcccaactgtcttcgctcttttgggcatctaattggcgctaacagctcaattcgcccgtgcactcaacatcctgcccagctagcaagaaaggcacacctagagttctcgaccccaacctgctcgggaatctagtgttgcaagtcggctcagacccaatcactgactgacatttcgtgacggccttattcgccgaccttattccgataatttttcacacccggaaaaatccgtgcttaactcctgcctgagcgagtttgcatcaacttgttaaaaaatattccaaatactggtttgatacctggcgctgaaaaggagctctggtacatctactgaaggtgcgaatcagccataccaagtcaactggtggtgtttgcaactccaggatacctacacttgccggcagaattcacgcgggggaattagaacaggacggcatcccgggcccagtgtaactaccaggtaagctacttagagagacagtcgcaacctgtcttgtggggcaattagtggaagcaaaaacgaccgatggatcctccggaacttgactatgaggcacttccggagaatgcgccgcttgtgtaccagttggcagctggagcgtttgcaggcatcatggagcactcgataatgtttcctatagacgccatcaagacgaggatgcaggcagtgagcacgacgggttccagtgcggctacgaggctgccgagcaacatgttggcgcagattgcgaagatatctactacagaaggatcgcttgctctgtggaagggcgtgcaatcggtggtgctgggggcaggtccagcgcacgcagtgtactttgcgacatatgagatgtgcaaatcgcggctgattgatccggaagaccggcagacgcaccagcccctgaagacggcgctgagcgggaccctggccacggtggctgcggatgcactaatgaatccgtttgacaccatcaaacagagattgcagttgcacccaagtgattccatgacgaagtgcgccgtgcgtatgtaccagcgagagggcattgcagcgtttttctattcatatccgacaactattgctatgaacataccgttcgcagcgttgaattttgttatttatgaatcatctacaaaaatattcaatccgagtaacaactacaacccctggatacattgtctgtgcggtgggatatccggcgcaacatgtgccgccataaccacaccgctagactgcgtgaagacagtattgcagattcgcggtgcagattctgttcaaagtcagctgttcaaggaggctgacacattccgcaaggctgcatctgcaatccacaaaacatatggttggtccggtttctttcggggcctaaaacccagaattatcagcaacatgcctgcaactgctatatcgtggacatcttatgagtttgccaagcatttactgttcacgaacagcaacgcccatctggacaatcattaggcaccatacgcttagtttattattgttccattctcatgtaagtattgtttcttcgtgtaatgcaatgacgattgaagccccttggacaaatagtgcgtgtgaagatcgcgcctggtgtaggtttgaagtatatataagcatcctcgctctccctagggcactaaacgccgcattggtgcatggatgattgtcgtgtaatcccagtctataaaatgctcaacttgcaagatgctaaactgcagacgaagtgcgttctctgataatgttctcccggagctggcgaatgccgcgggtatacctgtacgaccgcgcatcccagacgactgggtagttctgatcctccgggacatatattgggagctcagaggcaagatcaacccaggagtcttcgtccatggacccgtaacgcggctgtttgtcattgatccagtgtctctcagccccgcagttcgtgtaccgaagaccgtcgttgatcctcttgatgcgtccctcgggattcgtgtttgcggcatcaaaattgcggtaagtatagtcgcttccaataaacgtagtcctaaaatcccagatcaagtccttccagccgagccagtctcgcaccgcataccagaaatgcattcgcgcacctagcgggatattctgcgcgctgtactcggtccacgaaaaggcccagcggtgtgccaacgcaaaggctaccatctccaaacagagcgccacattgtggtacacgtagcccatgttcgtgccctcgcagtcctgaatcacgttcaggtagtggagaagcgtgataaccataccctgccagtaggatgcaaaaatgatcaacttaacacataagaatttaggccatgggttgtacttgcgcaactcgttgtacaagcacttccagaagagcgccaagttatagagcgaccatgacgcgctcgcgttgtatacaagcgtcaaccacttacatcccagatcccactccaacacctggaacgcagacatccccaagcagtacaccggcttgaaccacacgtactgtagaatgccccgcttcacagccaaaaacgccttggggtcggccatatcgaccatgggcaacacccaacgtcccacaacgggaatcgggtgctggatccttttctgctccggcgcaaggttcaccaagatattccgctcacccccgagtagcaacgtcaacaaactgaaaaacgtgtagatgacgaaactttcgtatatttcccgcacaggatctatcagcaccatcgctatgtcgggcttgaccaccgcgatgaagcatgtaaggctaaatatcggtaccatcagctgaatgcgcaacacaagccgctgctgctgcggtttccggtaatttatcagctgcgaccacatcgtgtgtgcagacaacaccacgctgcatactgaggcaacgatgcacgccgtaacaacccacgaagctagacaagcagcactcatctatgctattcggcctcacgtagtcctgcctgcttttttgtcctgttcttcgttcttgtgatagttaagggcttacttatggggttaaagttggtgaagtttttgttaacagagcccaaaagcgtaggcatctctagtcacgaccgcaaagaacaggcgacatagcgttatgtcttgtcttgttagatctcgctagaaggttttaagagacgtctgaagcatctcaggcagctttaattgcatccccagctcggcaacctgcgaagcagagggtgcactcattcttgggctgaagcggggccgcggcgttcgaggcggcgtttcagcttctcagcgcgctgtaggcggcgctgctctttcaacgcatggcggtcaacttcctgtggggcctttggcaccagcttcagctcgacgcgggacgcagggtcgccggagcgtacgactgagcagttgatgtcctcgaggatggcggcaagctcatctaggagggagctgcggcgctgtagctcgcgcggtgaaacctggggggcggggcctgaggcgtctttgtttgcaagcagcaccagtaccgtgtggccgcgctccagatggccgcggatttcttttgacttctggttggagaaatccgtcggcgagatctgccacgaaatgcgcacttgcttgctatctggcgcgcggcgctccttagcgcctacacggcgggcggatacgcccttccgaagcagctccttctcgcgctctgcggccatgcgctccgcgtgcactctgaaggcttcgcgcactgacacccgtttgacaagcggcagcggccggccgccggcgtccgtctcgctcttgatgaatcgcaggctgtggacctcgaggtccagctggcgcgcgacgtcctgcatggatagctcctggatgcggttttcttcaggcaagatgaggcggagacgtccgtcgctgcggatgctcagcacctccgacacaactgtgttcgctatctcgcgcgccttttctgagccagtggtccaccgcacaaacaccttcttcttgcgaacgggcgaagagtgctgcggcttgcggtcagcatacttgctcggcgtcttcgcttccctcggtgcacttttctttgccgatacctgctccagtatagctgctagcccgttgctgctgcggacagcgctagtgctaaacaattggaggctactccacgaactagggactgctactatacgcctaaacatgcgatgacctctgctgtctgcgcagtgtagctagcaatcgcgtcaagctaatcaagctcggtggaaatcgctgcatctgacgccgggtaataagtaaatattttttcgacgttaaaatggagctgcaggcaaccaaaaacggtgagttacgaatgtcaatcaaaatattattatggtcatcacgaagcttaagcgtacgaagttaagtttataaagtaattgtatccgacataactaaaaataggacgcggctgcaccaagtacctgagtccccactgcaggtaagtgcgactgcgacgtccaaagctgataagtctataggttgacgcccataaccatggccaagagggccatgcggacgaacaggccatagcgcatctgcctgaaatatgcggcacggtggtcgtagtcgacctcctcgcggatttcgctaacacgaggtagagggtgcatgactaccatctgctgcttagcatgggccaagatcttgttatccacaatgtaggtgttcttcaggcgcaagtagtcctcctctctctcgaatctctcttgctggaccctagtgcagtacaggacatccgatctcgagattatttcgggcgtgagtgactcgctctcaatgcctagaagccctgcgtcgatgagctcgttacggagaccgtccggcaaggaaagctcctttggcgagaccagattgatacgaacctggtagtgcttcaacagacggcacaaggagtgcactggtctgccgtacttcagatcgcccatgaaagtcacggagataccgttaacggtacccagctcctcacggatcgtaaatagatccaggaaggcctgggtagggtgttcacgggaaccattgcctccgtttatgattggtactggcgagtacttggaggcaatgtgagcagacatctcatcagggtgtctcaaaacgatggcatctgagtagcaagctagggttctgatggtatcctggagtgtctcacctttcttcacagaggatgccgaggtgtttatgttgacggttctaccaccgaggcgctccattgccgcgataaaagaggaggatgtgcgcgttgatggctcatagaatatggtcgtcaagaggcggcccttcatcaattcgagaacgccctctctctcgacagccgcacgcagctcttgggccacagcgaacaaggcgtggaagtccgaacgtttgaattggttaacagataagatattccttcctctgaatggattgtgcgcacggactagctctctcagcgcacttgggggcgacagctcctttggtggccttgaagacatcaacctttgttccagcggttggtcgataacagcttcctcgtggtcaccagctgaagcaaacgagtttccccgctcgcgggagaaggagaaccgcttcttacccgagctagaaggtggaacaaagctgtgcaatggctccgcgttcaatagaggagtcgaagtgtaattgtttgaagtaggtacaacggcctcacctagagctgcagatgctactaggtcaccgcttaacacgacagtctgtccgtcgagcaaaacacgctcaacgccgcccgtcagcccacccttagtgtaaggagtccatctcttagtgtgcctgaaggtgaaatctaaatcgatctctactttggcatcttgttcaggaatgttgaatatcttagcgggattgtcatgtaacctctcaacaatgtcctccagtgttagcctgccatcattcacggctgacaacaagagcggtagagcctccttgatgccgagaccagtgaccaccttgttactggtaacagtggcaagaagagtaggcatagagccgatagaaaatgcgtcaatctcttgcaagttcctccagaagaaatcctgatcttccttagtaggcaagaacaaagcttctggatagtcatcctgagaaacaaacaaagaatggatgttaacgtcacaagtaacattattcatcttctctttgacggtcatgatcaaagctaaatcttccttgtgagaaaccccagtaatgtggataggtcttccctgtagagaggcaagcaagatcacagaagcgagatcagatgttttagcctcagcgataatttgtttctcaacaggccagttctttaggtgttcagccaccagtgaaaccttgttggttagttcccggtaaggtatgaagagtgcagtagcttggttggccaatgaggcaacttcttccacattattggcagtagcggcaactgtgaacccaaaatctgtgtacgcagagttctcacagacggattgtgctgccttcagcgaagtagcattggtaatgactgggccaactgtagatcttggcattatctgagaataggtaaatcccgattccacagacaagcgagtaacctctttcaactctgcagggccctgtgtaacgttggatatgtttggcacataggcagagatgttaatcagacctggtatagtaaccgtcctgtgggaggtctgggcatctctttcggaaacatccaaagtcaggttcctggccaatgcttcaattagcaatttcgcacacttcacgtttgttacaagtggaaccgagtagtccacagccatacgacgggtcctgtaccccttagaaacataggaagctggacggcggaatctgttagctgaaggcaagttgatgtataaatcaatcttgttgttagctagatgttgcgtcaaagagtattcagacttttcatcgtcctcatttaagaattccaaaaattgaactggaattccatgctccgatataaaatcagcagtgccagcagttgcaaagagcttatagcccattttgtataatttctgaactgctggaagcatttcctgcttttccttataggagccaatagacaacagaatgttcttcttgggcaacttaaatcctgtagacaacaaggatttcaagtacgcctcatacttggaatgtccaaaggtagcaacctcaccagtggaagccatttcgacaccaagaacaggatcagcgccggctaatctagggaaggaaaactgtggcactttgatagcaacatagtcatcgggcaacttctcgatagggtatggtgtgacaggaatacccatgatggcctttgtagccatctcaatcaaattgacgccaatgactttagaaataaatggaaaagatcttgaagctctaacattacactcaatgaccttaatttcattattcttggcaataaactggatattataagggccggttatctttagcgcccttccaatcttagcagtagcatcgacaattctccggacggtctctgggtcaaggtcttgtggtggtacgatcaacgtagcatcaccagagtggacaccagcgttctcaacatgctcagacacaacgtgcatgatcatctcaccgtccttagccactgcatccatttcgatttccttggcattttcgatgtacttagtaataacgacagggtactcacgagagacttcgaccgcctgattcaaatatgactcaaggtcatccttagaatagacagtattcattgcggcaccagaaagaacgtaagaaggtctaacaagcactggataaccaaccttattagcaaagtcctctgcttcctccatggatgttaattccttccacgccggttgatcaacttcaatctggtccagcatacgagagaacttgtatctgttttcagctgaatcaatcatttcaggcgatgtacctagaatcttcacattctcacggtgaagtgacatcgcgatattattcgaagtttgacctcccatagaaacaaccacaccagcagaagattcgacttcgtaaatgtcgagtatcctctccatattgatggtctcgaagtacagtctatcaacttcgtcatagtcagtagaaaccgtttcagggttgtagttaaccatgatggttttgacgttgttttggcgcaaagtccggactgcagtgaccgcacaccaatcgaattcaaccgaagagccaatacggtatacaccagaacccaaaaccatgacaccatggtcattaaactccaagtcgtgctcagaagcattgtaagtcaaatacaagtaattggtgaatgcagggaactctgcggcaaccgtgtcgatttgcttgacaaatggaacaatgccgtattcctttctgacacggcggattgccacctcattagagttcaaaaacttggcaatttgtctatcgtcgaaccccaactgttttgcttgtttcattagagaacgaggcaaagcttccttggtaccaaaagcttcaacttccctgccaaaggtgatgagagagtgaagtttctccaagaaccatctgtctatgttggttagctgccaaaccttctcaacagagtagtttaattttgcgaaagcattggcaatggcgaatatacgcaaatcagatggattagcaagctcctcatctatgttgagttccatatcggtctcattgaaacctaggttcgaatagtcagtggatctaattgctttctgaattgcctcttcaaaagtacggccaacgctcatgacctcaccaacagacttcatggacgaagatagcaaagtagaaacgcgagtaaacttcttcagatcccatcttggcatcttaacaacacagtagtctagagatggttcgaaacaagcacatgtagactgcgtaacagagttcttaacttcgttcaatgggatgttcaaaccaagttttgcagctgtgtaggcgagagggtagcccgtcgccttagatgcaagcgcagaggaccgagacaaccgcgcattgacttcaatgatgcaatactctttcgaaaatgggttcaaggcatattggatgttacattcaccgacgacgcctagatgtctgataacatttacggctgtagttctcagcatattataatcctcgtctgataatgtctgtgatggagcaacaactatggaatcaccggtgtgaataccaagtgggtcaaagttctccatattacagacagtaatacagttgtcgaaggcatcacgaacaacttcgtactcgacctccttccaccctttcatggagcgctcgaccagaacttgtggggatgacgcaaatgccacgttacaaaggtcaactaactcctgctcattagaagcaaagccagagcccaatccgcccaacgcgtacgctgcacgcacaatcaccgggaagccgatatctttgacagcctccaaagcctcatcaacagtagaagcggccttcgatttcgcacatttttcgtttatctcgtccatagcgttggcgaagagctcacggtcttcagtcgtaataatggtatcaattgaagtacccaagaccttgacgcccaaagcttcaaactcgtccttcatctcgataccaacagaaagggctgtttggccaccgaatgtcacgtagatggcatcaggacgttcatgtagaataaccttcctgacaaactctgctgtaaccggcaagaaataaaccttgtcagcaagacccttcgacgtctgtatggtggcaatatttgggttgatcagtatggtatagattccctcttctttcaaagccttgatggcctgagaaccagaatagtcaaactcaccggcttggccaatagacaacccaccagacccgagaaccaaaaccttctttggctcctgtcttgggtgcgcttttaggtggtcctcaactctacctccagggaattcgacactcttcaagactccagagttcttgtgctccaaaatggagttgatgaagacatcgaacaagaactcggtatcacgtggaccaggagtagattccggatggaactgcaccgaaaagtagggcagttcagtgtgataaataccctcgttagagccatcgttggcgttcacaaatagtggcttccagccatccgctagtgtatcaacatcgactgcaaacccgtggttttgggaagtgatgtagcacctaccagagatagtggatgtacaagggatattgtggcctctgttaccaaacttcaacttcaaggttgaagcgcccgaggctctggctaacaattggtggcccagacaaataccgaatattggggtcttcttctcgaggagagcccccgatagcctagatgcaagttcggttaggacggatgggtcaccaggcccgttggagatgaacagaccgtcgtattcctcctcctggaaatcgtagtcccatgggacaaccagcaattccacacctctttggacaaagcagcggatttggttgtacttcataccaacgtcaacggcaacgacgcgcagtattttaccgtccgggcctctgacggcagactctagccgcggggtgtatagccggggttcattcacagacaccttggcaaccaggttctgcacattgggatccacccactcaggcacatcgaagcaagcccgccattggtcaccggtggcctcctgcaggttggcatcggccttctgcacggccaggcggccgagcatggacccggagtcccgcagatgtttcgtcagagcccgcgtgtcgacgccgtagatcgcaggaacaccctcctcgcgcagccactggcccagcgacgactgcgccagccagtgcgagtgcttctccgtgtaatgcgccacgaccaaacccgcaacatggatccggttggactcaaagtagcgtggcagggactctacgagctcgtccatcagctgccggtccggcacaccgtagttacccaccatcgggtacgtgatcaccaggatctgcccctcgtaggaagggtccgtgatcgactcgggatagcccaccatgcccgtttggaacaccagctcgcccgccgcggcgaccggcgcaccgaaggagtatccctgcagcgctgtgccatctttcagctcgagcgtcatcaggcggccgtggtccgcgtcgagcgcaggcgtcaccggagcagtgggaatcagatcagtcaactttgcctgcatactgttagtatttgcctcgtgccgtcccgcagcctccgcacataccatctcgtctgtatatatctctcgcagctccgtggtcggggactaattaccagtgaagcgtgctgtatttccttcgccgcagatggggaccgctgagtctaagttatatagacactgagttcgctaacaagcctgactactaagaacaagataaaataatgactacgataaaactggagaagtaaaacaccctagaacgaacgtcgactccaaggcggtcgagccaacctatatttatatgcttcggcgatggctcatcgcagggacacgtagacatgcatgtcatgcaaatttttcactttgacagggacacggcgtcggcgcccgccggatataccggatctggcatctatcccgagctggacaatgtccctgtcctgccctcccgcggacatgcccctcactgatcaccgggtaacctttaccctcgggcacgtgcttagcacgtgacgaggcgtgaacaacaacacctggaggaaaaactgcgaggtcttagtattggagcatatttactattggaaggtatcaggaaaagtaaggcagaaaaaggaaggcagagaaccagttagtgccggtattccacctacgacgtagtcagcacgcactaaaaaacacgttcgcgcctcgaaggtaggaattcgatcgtctgcaggtgtcgccgaggtaacaacgttttcagccagacaagacaggccgtactcgcacagcgggaagagggaggacgcagcgcagccgcaggagcgattgattgcagagcatcagaatggcgccgcagtcttcgtcgtctgcgcccaccggcgcgggccaacacgactgctcgcacagagtgggtccgtcgcagcaaaaccggcaggactctatgtcaatttatacgaatttcaaccagcagcggctgtccacggacaactccatctcgagctttctgaacatcgacagccacggggagcgcgggggtgggggctctggcggaacggggggcggtggggggccggcgtctgcagggggcggagggagctccacggctggggaaatggcctacggcagagggtattcgattgtgaactcgtggccgacagccagccagggtgagccagggcggggcagtaacggaggatccgcgttcacgacggcacggcggacctcggagcaactggagccgtttgcaatgccccggttcaagacgccgagctactcgcaggggcggtccgcgagcggcgggatgggcgccatccagttggtgagcggcggcgggggtggccgcaatgactcgttgccgtcgtcgaagcggaactccattttttttgggtccgccgagtcgacggaccttgatttcttcaatcaagctgcgggctccgcgcatggtgcgtcggggaccggcggctctgcgggtgccgccaatggcagcaagatggggccgccggttttgaagcccggtcctgttccgtcgcagccgactcaccatcagagcgaggacatagatgtgttctttaacccgtccctttcgcggaagaattcgatcaagtttaatgctgacgactttgcggacttccagttcaagcggcgcgattcatccgtccgtgcgaccttagacaacagcaactacgcaccgggcccgccccctcccaacgcgaacccgaaacgcacagaccagtcactaagcccgataggtaaggaagctgatgagatgggtattgacccagaggttgctgtcgccgatgcctctggtgtcgacgacgtggaagagacgcttaagcgccatctgtctcctctgatgactggtggaagctccaatcatcgctcagtgcccgccgcctcggccactactggcgtggcggtgaacaaacatcctattaccaacgataggcgacacgaagtaaacgacgagccgaaattaaagcgacagcggacgaagaagtcggtaacctctatgtcccctgtgagctcttctgtctctgccgatcatcatatagccgcaaaactaaaagaggcattgagcgatgatgctgaaactgcaacgatagaggacgcgcggccgcttttaggcgcgacaaaggtcgatcagctaatgctggttatccaagcaagaaagaaaggagtaacagacaaggttcctaggaatccagatggatctctgatgttggaagacgcgccatcgattatcccgccgccgtcgcagctggtcggtggtgtcgaaaaacccaaatcacgtggcgtaaaacagcataaatgcccctactgtcacaagtgttttacgcagtcgactcatcttgaggttcatgtgcggtcccacataggctacaaaccattccagtgcgaatattgcgggaaacgcttcacgcagggtggtaacctccgtacacatgtacgtttacacacaggtgagaggccgtacgaatgcgataaatgcgggaaacgcttctctcggaagggcaacttggccgcacatatgctaacccacgagaactacaaaccatttcagtgcaagttagatgactgtaataagtccttcacccagttgggaaacatgaaggcccaccagaatagattccatttgcagacattaaaccgactcactcagaagcttgcagaaatggatccttccgaggacatgccaacaaaagaacgggagctgttagagtattttgcctcgctctataaaaacagcaaccgaggaataaagggtaggggaaagggcaacacacggatagtgccatccattgatacagacgaagattcaaaaaacactggcgtacaatctcacagtcgcgttcagcagcagccgccgcccttccaggaatcccaggcaggcgctgtgcctgcggtcacacatatgccggaccccacgatcgtcgccgcaagggcgctggggtcgctgaaacctatcgccaaaaagaagtcgttgtcggacctcaactatagtctcgagatggacgacccgaaggacccagaaacgaacgagttctcttttcacgagcctgcatttggaacccgcagaaacgatgcacccaccccggccactgaaaacccatccggcacagaggtacagttcaagaacgtattctcaagcagctagcgcgtatcaaaggctcccagcttacaatatatttcacaatatccgtggattcagtgtttgtttctttataactgtgtctatactatataggaaccttcgagaaaccaataatatgtattactatctgtttagactaattgcttctatattataggcggctacttgcccgcaatttgcacgttgaagttgacaccccgagggaactgatgcggtgtcgccacccgctccttcggcagctctacaaacgagacggtcacgctcaccgtgtcctcctcgccgaagcccagcgacgctagaatcccgcggatgaccccgcacggtaagtgcaagtacggctcaaccatgcgcagctcccgctcactcacttcgccctccagcgcaaaatcgcggatgggctggtagtcgtagtcgaacaggtagaacgtcccccgatggttcgtcttgagattatcgatctgcttcccaaacaggtgcttccacacttcccggcagatgaacttcatcacccccagtaggtccatctgcccgaagtgcagtcctgggttgttgctgaacaccagcagctccgtcaccttgctacccacctggaacccgatctgccctacacgcgcgctcacctccgcgcgctcgcgctcgtcctccgccaactgcgccagctgctggtgcgcggctgccggcacctccttcccctccagctcccgctgcactgccgcactcgtcggtaccaccgcccccagcagcatctggtatgccgcagcgctcactttagggagcgcctcctgaaacaaccggaactgccgttgcagccgcgcctgttcttctgcgtctgtctcagtgctcgtccttgtgcttccgtccatgctggccactaacgtcgcaccacagacacagtccttggctgatttagctgtcaccaatttaacatcaaccagatgccagcgacggaatttgagtattaaaaaatgcgagtgcttggggatcgatacttcttgtgcatcacctgggagagtgcaagctcgagactagaagcctcagagcgctaataagcaggagcagggatcagcagatgtctaatatttcgataggaaacgatctaaaagactcctatacggagacacgcaagtgggtgataggcaacaccaagtggttgcaggacctcgcatcgttttaccatgagcggtcgaagctagagcgagagtacggcgagaagcttgcggggttgacgaaggaatactttgggcgcaaaagcaacagtacggtggtgctatcggtaggggagacgccaacaatcacgccggggtcactcgagagtgcgtcgcaggtggcgtggaacgaggtgctctcgcagacggagaacgtggcgaaggaccacaagcggctagcgaaggagatgcagacgcaggtggcggaccagttggcgtcgttggagaagcggtgcgatctgattctcaacacgatcgacggatttaaccacgagttggtgaacaagcgggactacgcgtacagctgcttggagaaggcgaagaagcggtatgatgagagctgccaggccatggaggcggcgcgccagaaacagtccaagtccgggtcgtccagcaaggctcagcgcaaggtggacgagaaggagcacgaaatgaacatcgcgaagaacgactacttgattcagatcaaccagacgaaccggctcaaggacaagtactacttccaagatgtgcccgaggcgctggacttgctccaggacctcaacgagtcgcgcatccgcgtgctaaacagcatctggcggcgcgccagcgacttggagcgcgaggcacacaagaaaatcgacgagcgcttgtcggccgcggacgacgttgtcggacagaactacccacacttggacacctccatgttcattaagcacaatttccgcgagtggaaggaacctgatgattaccagtatgtgccttcgcccgtgtggcacgatgatgagaccttctctgttccgtccgacgttgagctccatgacttgaagatccgcttggccaaggcgcagaactcgtacaatcgcttgcagctagtggtgcacgatgagatgtccacgttgacgcaattgaacaagaagaagcaggagatgaagctcaatgcggcggtggacccctacgaattccaagagttgttgaaaaagtacttggcgacggtatcctccttcacaacgcacgagacgtcgaaactagaggcggaggtcgaaatcgagagcatccagaataatgtcggggatagtcatgacctcagcaaggagggccttgatatatctcgccgcttcaagaagtccagtatgttcgggatgttcaagcgtgccaccgccccgcgcagcactggcgcgaatgacgacatctctgagatgtccgtcgacgttgcttccaaatcatctccgaagcaccatggcttaagtctattccgaagtaagcgcattcgcgcccagagcactgagtcttctggtatgcagagcagcacgatggacgactcgagctccatgatgtcaatcagtaatgaggagcacaagggcggcaaccgcgtgttgttcccttacaccaagcaggatgaagacgaggtgacgatcgcacccggcaactcaattgttcttctacgccaggatgacggctctggatgggtcaagattcgcaacgccagcacacaacaggagggactagttccgtcgacctacgtcgaaatcaacgagcaccattccataggcaagcctgtacctcgcgctcctcctccacggaagggtgcagctcccttaaagaccgtcactgccatctacgattactcggctcaggatgacgacgagatcagcatccgtgcaggcgacgtcatcaaggtcttgcgcggcgacactggcaacggctggacctacggtgaggtaaatgggagcaagggcctcttccccagtaactactgtaactgagcttacgcagccgcatccgccggacgcataagagtgcattatttagtctatctttagcttcaacatgtagcttgctagtttgggctactctacgggatcagcattggaaaaacgttaagtttttgaataaaatatacaattttgcatttaaaaaacaggcacagccaattaacgacatctgtgggctaacgcccatataatcagatcctacagaatgccaacatcgtgtaagcaccgccggggttacaaggtgcgcagcctggcgtagagccttgacacaaaatatctttgtgcttttgtggtggttgaaaatgtaagctatcaggtgaagccatgggtaatgaaatcacatgtcacgtgatctaatcgcattttcgttatttgccatttccgtctgtgtaattggcgcagtggtatgtgtcaactagaaggtccgatcgatacgtgtaagaaaatgtcattttcgtgctgagcgccaatggatacggggataacagcaattggcagtaagttgcaaagttggatccaacaagtggcatgttgaggtcagtgttgggttccatagccctttggtcccgagggtcaacggaggcggcgatgtctgcaaattggattaggggagactcctgaaacattgatacaaccaaaaacttttacttgcaataacgtcgttacaaagatcggtacaatctaataacatttgtcgatagtagaaatatattaatttaggtagatttaaaccatggtgattagttagctcaacatctgtatatcctcctcattttcctcctgaatggcggcagctagcgggctgcgcgtgcgtgattctatagctgcctcttctttgtaatggccctctttgcccacctcgtcttcttcctcgtcttcggaatccaaactggcctccaggtcgcaggaagatctgcaattagggcatataaactgtgggtactgtgtcatcactagtcggcgtatgcactggtagtgccaactatgcgaacaaggggatatgaagatggcctggcagggcttaattttacataggcagattgagcaatcttcctcctcaaggcctgccgttagcttttgtaggttccgtaggcgggctagtgcctctttgttgaacgcgttggcccttcgcttccacgatttgttcaactcgactctcattttgacgcatctatatatctcctctgtgccgccacggaaatccattcccagctgcaatatgtcgccgtctttcaaggggtagtctttcgacataaccgatgcctgtgcaagccgcatctgattaaggaacgtgccggacgaggacttgacgtcgcgcacataccaattgccctgctcatccaccttaaacaccccgtgtgtgcgcgacacaaccttgctcttgaataccacggggtggaaatgatccgggagcgagccgatcgcctcgcgaacccgttctgtgtaacgcccgataaccaactgcgagctggggcctgcggtccgcacgatgggatcaaaaaagagccccggattattcgtggtcgagtggtcaatgaacggcgttaaccggagcgagaagagcccgttcttgtccttgagcatctttattgtattttcgtcttgctgctcaatcgtacgcccatcatgcgccaactctatgttgagcttattggcgtccgccggcggcaccgcagggtagataaagtgccgcacgttcttgagcgatgctagacccgagtccttgccctcgaacgcagcggacgaaacgttgtggttgccgctggcctccgcatctgactgcccgagcaccaatgtgatcggcagatgcgcgcctgcgcccacgcccgcctgcaccagcgtcgccgagtttgtcgagccctccgttcccgcggccgccgcctcctccgcgtcgaagggggtcgtcccgagcatgctcgccaggttcccgccgccccccgcgcctcctgctgcaaccgtcaccgtcggcgtaatattagatccgaggctcacctgtgaacccgttgccgctgctacaggttggatatccatgggctgtacgtgctgcccctgccctccgttcagctcgtttgtttgttgtctgatcccaaaagacgtcaatatcgagttgatactttgtccccttcttctctgtgactcccctgccatcctagtcgaccactatctatctgctactagaagcgcctgacctgaaacgaacagaactctttctgagctcttcctgccctcttgtatatagtcgttaatacctacaattttggtgatcttgtttttttttctgaagttgccattaacatgacacaacgtgaagctggctcaggcgaagctcgtggcgagcacggcggcctccgtagattgggggcgtagtgcacctcggccggggcagcagcgcgccggtgcagaggcagtagcggcaggagtgcgggaccgcggctgcaggcggagctgcaacggatagaccgtgcgcggcgacgtcaggagtcacgggtataggttatatttgtatatgtgtatgtagcatgtagcatgtcgcatgtcgcagacatcagagacgcgactttgaggcgtttgtgggggtcacgatctcgtcgtacaacaaggtggtgaggaagtccgtgaagcgctcggcggtaatctccggctcgaggtacttagcggccagcgcaaacttgttcgatgagccggcgcgactggcacgagccagggcgtcggtgcgctcgcgcaagaggccgcggacgaggtccggggtgacgttctcgccagtgtccgcgagcttgacgcggtggcggacccactggtgaagctggcagcgcgagacctctgcggtggcggcgtcctccatcagattgttgatggggacacagccgcttccgcgcagccaggcctccatgtactgcaggccgatgtccaggttctggcggatacccgcgatcgtgacgcggccgccggagatggaggtgttgacgaggtcgcgcgcgccgatgtggacctcgggcacaacgtggatttggttcggcgtgcccatgttgcggaagacctcgttgcagatgggcacgagcgcggggtgtgcgacccaggagccgtcatggccgttctgcagctcgcggatcttgtctgcgcggaccttggcgagcgcggcctcgttcgcggcggggtcgtccttaatggggatctgcgcggccataccgcccatggcgtgtacgccgcggcggtggcacgtgcggatcaggctcttgacgtaggcgtccatgaacggtgaggtcatcgtgacctggtcacggtcaggcagcacgtgctgcgactgcccgcgcagcttcttgatggtgctgaagatgtagtcccagcgcccgcaattgaggcctgcggagtgttggcgcagctgccagatgatctcgtccatctggaacgaggcaggcagagtctcgatcagcacggtcgcacgcacggtgccgcggcgcatgccgatgtagtcctgcgccacgttgaaaatgtcgttccacagcttggcctccaggtggtgctccatcttgggcaggtagaagtatgggcccttgcccacctccactagcttagccgcgttgtggaagaagtaaagtccgaagtccaggatcgaggcgctgatgggctcgtcgtcgacaagcacgtgcttgtctaccatgtgccacccgcgcggccgcaccagcagcgtcgccagccgctcaaaccggtcgcgcagctggtactgcttgctgcccaccgcaaagtccgcgcggctgcggatcaagtcgtacaggttgacctgcccgtacgtgatgttctcccacgtcggcgccagcgagtcctcgaagtccgtcatgtaggtgttcacgtccgcgttcagcgcgttgatcagcatgttccgcagcggcgggcccgtgatctccgtcgaacggttcaccaagcccggcgccagcggcggcccctgccacgtcgggtcctcgcggatcgcccgcgtctccggcaggaagtccagcgtcgcctccccgctgtccaaccgctgctgcagctcctgccgccgcgcaagcaggtccttccgccgcccgttaaacgtgcggtgcagcagcaccacaaactccagcgcctccttcgtcacgatgtccgccactgtcgtcgtcgacggcttgaaccgtggctccgcgtcgatctgcccgagcacctgcactctttctaagctgactgctaccattgcgctgcttgccgcccccgccgcctcccggcccgcgcccgccgcgcttatatagcttctcgcgccagccctcgcccaccctggtgcctgccttccgcccgcctcctgctgcccacccgctcgaataggctgccaagcgtcatcaggggccactatcaccgattcctgacctttgcgcccaaccaaccaatgatcaggacagtgattcatagtcagagcctttggtccgccggacctggagcgcccggccgagtggaggttacgtaatacggagcttacctaaatctcgcccgcgggcgccgcgtagagcccgcgttcaacgttgcgctgcactagctccggatccgccgcgtgacggaggacacccgcggcctgcagcacggccagggtggcgtcgactacggctgtgcggtcgtgcaacgtgcagcagggccgatggaagcgcaccgtagtgcgccacgcggccgcgtcctcggccgagtagtcgaaatgctgcgtgattagcgcgactgcggcttcgggatgcgcctcaaagtgcgcgatgccgtcgtccagcgcagccgcgaaggcggccagcgcggcgggctctagcgcggtgtgcttaaccagcacccacgagggccagggggtggggatgttgcccagcaggcggatctcgcccgcgtcgtggtagcgcttggaggtaaagtgctcccacaggaaagcgtccgcggcgccgtcgttgacggcggcgcgcaggccggcaaaggtgtggcacaccggatgcgcggcaaagggccggcggaagccgcgctgcagggcgagcacatagctcatgacgtacgagccgctgccgacgcgtgacacgccgacgcggccgccgtccagctggtccacgtgctccaggggcgacgcggcgccgacggagacggcccagttgagtggcgagcgcacgtaggtgccggcaatctggtagcgcggcgcggcgccggctggcgtgtctgcgatgccgcgcacgaacgcctcggtgaggccgagcgcgaggtcgagctcgccggcgtcgagcgcctggatcaggtggccagagccgctagggaagggcacgagcttggcggtgacgccgcgctgcgcaaagaagccgagcgtctgcgcaaacagcagcggcgcgctgaagtgctctgggatgtagccgacgcggacggagtgcattgagggctgcgcaggcgcaggcggcgaggggcttaaggccacgatctggatcactatatacgacaataaatcacgatgtacgtgtgagtaccgccgcgccccggcggcggcggcggcggcggcggcggcgggcggcgggatgcggcgggccagcgtaggggcctgcgcggtccggtgcgcttagccttcgcgcagtgcgctttctggtcaaaaaattttcacgtccgcggaccgccgtagtcagttttcaggctgtttttcggtgctccgcgctgtattttagcaacacaccaccagacaaaagctgcaacagcaggtgcaggagcatcgacggacgagctagacgagacgtgcatatgtcgctaccacttcgaaacccgttggactcggtgtccctcgagcgggcgctggaggacctgattgtgcggtttatcatcaatgtgcccccggaggacctggcgacggtggagcgggagctgttccactttgaggaggcgcagtggttctacacggattttgtgaagctcacgaacccgcatctgcccaacatgaagttcaagacgtttgcgtcgtatgtgatctcactgtgcccgcttgtgtggaaatggcaggacgtgaaccccgaggaggcgctgcagaagttttcgaagtacaagaagtcgatcccggtgcgcggcgcggcgatcttcaacgagacgctgaacaagattctgctggtcaagggcacggagtcggactcgtggtcctttccgcggggcaagatctcgaaggacgaggacgatgtggattgctgcatccgggaggtgatggaggagatcgggttcgacctcacgaactacgttttggaggatcagtacatagagcggaacatcggcggcaagaactacaagatatatcttgtcaagggcgtgccacaggactttgcgttcaagccgcaggtccggaacgagatcgagaaaatcgaatggcgcgacttttggaagctgtcgcgctcgatccacaagtccaacaacaagttctatctggtgagctcgatggtgaagccgctgtcgctgtgggtgaagaagcagaaacagattcagggcgaggagcagttgaagcagtacgcggaggagcagttgaagctgcttcttgggattgggacacaggaggaggctgcggacccgggtcgcgatctgctaaacatgctgcagtcctccgtggggcagaagaagccgttggtgttctcggacgacgagtcccaggcgtcgatttcgacgtctgcgccgacaaccgtgcctccggcgccgtccacggcgaacagtcagtctgtgcagccgattgcggcaggtgcgtatgctggctatcccttccctttcccacagtatcctattccgggtatgcaaacgatcaaccctttccaatttgttcaaagttcgcatcagggcgtgtttgccacacactccacttttactacctctcatcagtacccgcaggcgcaggcacctcaaacccagcagccggttccaggcgctgttgtgtatcccgtgcaatcgcagctacaacaggcctaccagcccccgcacactccggtggtcaagcccagcgttattgaagatagggcgccccattctaaacagttgctggagttgttgaagaacccacgcaagcctgaagtggaggacgaaagtactgcgaagaccctactgaaactactgaagaatcccacaaaggagaatagaacaagtgcgaacacagttccttcttcgaagggtgctgtttctgggccttctggtggacggtccatttcagggcagtcaatcgacactgccaatcttccctcgggaatggcttcaagcatgggtgcaaaaagcactgcgataccattgtattctcctcgctcttcattgtcggagatgacactaccagatgagccgttgggcgggtatgaggagtttgaaagcagttctgaagaagaacagggagaagaattggcctatatgaatttacaagaacctacctcaagtgttatggaaagcaacgccaaagtggaaaataacaccttggacaatatatctcacgtcgacaccagcggcaacctgtcaacacgctctttgcaaagcgaaaaaacagaaaagtcgaagcccactgcaaagccgaagattaagcttctcaagagaggtgaaacactaacacctctgacccctagcatatcgtctcaaactgcaaccagcgagtcctccgctgcaggacctacagtgccttccgagaaggacgtgtcttctcgaatacaaaactcgcaaggaaatgagttgcttgatgtactcaagtcaaaagcgcaaccagagccttcggtagcttccacctcccctgctaaagagctactaaacactctcaataaacctcaggggtctgtgtatcaaaaccttttgtttggcgccaatcaccgtaaatcggacgatgaatcttcccccaggcactcgccagtatcacaacaagccagaacccatgagtttttgaatcttttaaagcggcctcaagccaaggccgagaacgaagagctacaatctgtattgttaacacctcctgctaatagtggtatggtacaaaactccagcactctacctaatatcccatacgggaatttgcatcaagatcaggcagcagcgttattgtttccgcaacagcctcctcagtttcaacagccttatgctgccacgaacacaaattcgaaagaactgttggctatattgcggaagcccgcatccaaccaacagaagcagctgcatgaacaaacaccggcaaacccagttgaccaacccacaacgcttgcttcagaacagcagaacttggtgaaacagcaaatatctaatccctcacaatctttgcaacagggaactcctttgcaacagcctcagcctcagcatactcagtcaccgtccaatttacatgtaacaggaaatactgctgctgcacaggagcttctaggcatgctcaggaaatcacgcgtggttccataatagtatcagtatatatagttacagatagatctatatacataattttgataattctatatagtaatgcttaaagagcgctactcttcgtcggttaaagtaaattctgccagcacctgagaaacatcatgttctctcgagggccagtttaactccctgtccttggtttcattcaatgttacaacacatccgtaacataacggtgcttctgcggccgtcgaccaaatattggaacgagcctgatttcgtgcgagtgtctccttaccctttgaggaggattcccacatttgcaacatagacatgtcctcatcacttgccggaggatggcagttattcactgtaatggatttcaaccacttactcggatcaacatacaccctgttattacaaatcgaacagtaaatcacctctgtaccattagatatcggatagtctagctttgaagctgttctcacaatggttgagatcacattcgagtaatccttttccactgcatcaaagtattgtctagtcagttcattgatggtcatatttttggccatggggacagcccggttagcctgagccgcttcatcttggcttttaataaacagcgagccttgcagactgtagttataaatatagcgctggagtttagaaagactgcaataggcatctatttctgaaagtagaacgtcccgaagcggatataagttcttgaaaagcgcaccatattcaacatccatgcctgtactgtcgagagtagccgcaatctgggcaccgcggccttttattaccagcgacatgacttcatcagctaaccgagtaacggaatggccccacattataaccttgacttgatgctgactagcaaatttcttaatcaaatgttggcgtgcaaaccacagcatgtcatcacgggaagaccgtctcgagaactgatctagtatgctactcaaagtcgcattttctctagtcgcaattttgcgtgagccgtggttgtcatttgcaagaagcagtttgtgaatctcacaggtagaaaacgagcgatccaggtccaataagtagagcttaatacagtcgctattcatggcaagacgttcggtttgtagagactcagctagcctcttgagctcgtccatgtctgcagaaaaaccgcataagactaccttcacctggaagccagtccggttgtgtgctgcccgctgctcgcttaacgtttgatttagcagatccagcatggcaagcgacgaagatcccagagatagaggaacaagaaccaccgagcgcttattttgctcatcggcttccacagctgtgcggtgcttgtctgcatacagaactttaaacacttgctgacaatactcatccatcatcatctgcttacgaaacttcaatagcacaaatctagaaaagcattcaccgcaaaacgtctcatttcgagatacaaggcatccctcgctggttgtgcaccgcttgcatttcatgcttcttctttacttcagtggatatcgatgagcccatccaacaaagtggactgttatcgctgacggtcggtcttgtgtgaaaattcgtccagtcacgtgatagctaatttgctccatcatgaatatggccagctaaagtcactaggacacccttcacctgagccattggccccccttaatggccacagagctcgagctaggtttggtatatccgggcatgtcgctcaaacccaaatgccagtgtatacggagagccaaatgttaagcaaaggactgtctagcaagataaggtgtacgtgatacgttggggacttattactagtccgaagtgttgcaaatgcttcacggcccagaaaatggaggcgtgcatacttctgtcttttaaatagctgacaggagacatcatggtcaccaattgcggcgtcaaggatgacaatatatcattgaaatggtatataggttcaacctaaaaaatcgctagcagctacttaagcgtttatgggaagtctgggattggggcaccagcgttgttcaaagcgcggataccaatggcggtctctgagccctcggctggcttgacagacaagtcgtagctgttgccgtttgacactgggaagaagccagagttaccaacgtactgtaggtagccgtcggtgacagagaacccagaggacccgttctcctgggaagactcgacaagagcgccgttgtctttaacgacagcgtaagtcccgtcagaaagcttcaacttcccgtcatcggtaatgatcccagaaagggcctgacctggaccaccaatcttcaaaacgccctcttcggcatggacggcggaaaggtggaacttggaggccgatctgacgcccaagaaggagaactcctcagagtcagctagaacaacattagccaaagcggcggcacctaggaaaaagctggagatgaacttcatttgaattgttggatgtttgtgtgactgtcaaagactgcttaccgagtctgctaagcgatagactagagttgattcatctctcgctttatatacgtttgggacttactcctaaagggccctgtcgtggcactcattaaaaatagcacctcgtataatgccaacaaatggggcttaaccataagttggcggctgcggcatccctagggtggcctttgtcagctgtatacttgggaccatgacgcaatttatgtcccgtccttaagcaggcccttcgatgcaatgagaagttctaaataaagaaagcagttgcattgcgatcttgtaggtgtggacgggtgccttcacatcacgttgaaacacaacgatgtcgatacatggcatggtaaatctttcgtgcgctattgcaaacacatcaagatggcggaagtatcctacgaaggcaatctgagccaattggtcttccacggaaccgagttacttggcgctttcgtctgaaagtgtttaattgctctgccaattacaaaggaatactaagtgagattttggctctgctgccgtgcctttcggcgctaattaagccacaatattgcttgctacctgctattacatgggcggaagttatgttacatctatctgtcaccctatggcaatttcaggtactgcgccgggccgcacgtgccgctcaaaacactggaacagtaaccatgctgatataatcgcttacaagtaacattttcgcaggggtgcaatgcggtggagctgctcgtgaggtattcattctcatccctgtctatgagctctttgtttggatccaaatttagccctcgagatggcttccgcactgtagccgccccagcaaggctttactggtccctttgtttcgaagtggcggcacaggctgttcatctgtacccgtctggtagagacgtgtgcgaccacttccgaaggtaccccagaatatcatgcaatgcgcatttcaaggcactgccataacaattagatggcttaccgagcgctcacgtaagtaatcagcccgtgttacggcttgctaaccggcgttatgtcctgcgatacaagggtgcgagacaggaggcatcagaccttcacacacggcctgaccagtttctgtgggtgattaaccctcacatgggatcttagtagcttataatagaagttccgcacttggtaaccctgcaagtaccctgcccacaatggcggaaaatcaaggcttctgcatttacacatagtctgatagtcttgcttttcttcggaaccgttgtcgtacagcaggcacccagaggtatgacgaactaacagctcaatggcagtgcattttttcatctgcatgcaaaatgtaatggttgcgcgtcaggcaagcggggatgcattatatggaattgagacttaactaggcaaagactatggggaacggcgccaacggttgtctactgtcactcagaaggggagttgtctactgtcactcagaaggggacggtacagtttaggggcggttccaacaatagccatgttattttgggatcatgatgtgatatcaaccatagctctgaagtagtatatattcgggcaaagcacagcttgggttgcgagactctcagtggtagaggcaagcagttcaaacagctccaaccaaccaatcctcagacaaatgaagttcctgtccaccgttttcctaggtgctgccgccctagccaacatggccctagccgactccgaacaattctaccttttgtgtataaaatctgcttctcaattccattactcgtccatccacccagtgaacggtcagctaaaggtgatcggcaagcccgacggtctatctgcggtcgttaccgacgaccgcaagttgaagttctccgatggcacatacgccgtcgtcactcagaagggcccagttgttgagggttccaaggacaacgcctcgaccggtttctttgttgccgacggccacttgcagtacgctgacctgtcgttcatgcccgctcctaacggcgacagcttcgacctttccgtgacccctagcactgaccctcgggtcgttctcgccatccgcgctacaaacaacagtggcggtgtgattcctgacttcccagctcacaactaagactagttataattcttaacttccgtatgcaacaaatttaaagatactttccttcgtcagcgttgcgcgcggcgctgcttgctggagcatggccagtagtcattccgcatctgaagataatcttcgcataatacatgtgcctaaactggttctcttacctatgacctgcaggttggcagtggacttaaccatgcggttttcgtgtggattgtgcatccacgtcatctccgcccgtccacgacaacgctgctgacataaaaaaagtcggccttgtcacatgcctggacaactcataggagcatggatatacgtcctgcggcagaaaggtcaaaaacccatcaatattgaattgcatgggcatgtcatactacatggaaggagaatgagttagaaagtagcacgttggttgcgtaattttgtgacagaaagccgacggcctcgccatttttgcaggcacacggaaggcaggcggcacccagcgtaacaatagccaatggaacatatactatggtggcagcaggcggatccacaatgcagctgcagtacaagcccggtaactttgatggagtagctctcttttacgactaaaagatcagcggaggaggcaagatgatccaatcaggcaagatggtccgatcataagattatccgatcacaggatgatcagcttgcagatcagaaacctgttgaagtaagcataagactggcctctataaggtatacacgtacaaaaatgtaaaatgacggggcggcttcacctgcggatccatatttattacctacgtggtgcagatctcgcgaataatgcggatgaaacgatcctggcggttgagaattaaagcaaaagagtattggttcaaatctgggtaatttttagtcgccacggtccttccacctgcgttttaaagtgcgagagtgggggctttcttaaatttcaaccatgtgatcactatctgtatttctttttgagttggaaaattttatctggatagctacctcatcgcgagctcgaagtcataatagcggcaaactgcgaggagttggagtccctcaaaatatcaggcaatagtactgcaattgaacaggatgtcagcgttgaataaactttttggtgatgagaggaagcgcgacttggaaagcaatgtggccgcgctgttctcgcagtctagtggtcctgtggacacgctagaggtgaagagcaagccccggacactgttgccagtagtaagcaaaagacaggagaccgaaaccgctaaacctgcagagcctacggaaattgttgaggccgatcttccacgtaagagggcaaagaaggctaagaagaccaatgaggacgatgatcatctagaggagaagtacatgcagcaagtactaaaggaagactcggaccatgagagcgaagcagaagcacctaccgagcccgtggttgagttaaaaccctctaagcgtgcgtcgcgccccgacatgaaagaggaggagctggcaaaggccgagcgtacggtatttgtaggtaacgtccctcacgaggcgatcacggataagaaagtgtacaaggaattcaagcagttggttgcgcagcgaaagctatcgaaggaagacgaagatgatgaagagcagaaggctgagaagtacgccgtcgaaagcattcggttccgctctattgcatttgaagaggcgttaccccgcaaggttgcgtttgtccagcagaagttgcatcacaccagggattccgtcaatgcctacgttgtgtacgccgagaaggaggcggtcaccgctgcatgcaagctcaacggatcggtgttccatgaccaccacttgcgcttcgattctgtagcacaccccgcaccccatgaccgtaaacggtctgtgttcgtcgggaacctcgacttcgaggaatccgaagagagtctttggaaacacttcatgtcctgtgggccgatagagtacgtgcgcattgtccgcgaccccaaaaccaacgtcggcaagggtttcgcctacgtgcaatttgccgaccttgtttctgtgaacaaggcgctgctgctcaacgacaagaagatggctgtcgggaaaggcagaaagctgcgcgtcaccagatgtaggaatatgcaaaaggtgcagcgccagtctaacacggccgctctacccaagctaacggaccagcagaaaacaaaactcggtcgtgcccgcaaagtactcggcaaggccgaccgtgccacacttggaaagctcaccattgaaggcactcgtgctaccaagggtgcaaacaccccgaatctgcgtgtgaagaaggccaggtccaagacagggcgggtcaccaagcgttcgcaggccttcaagaaggcagaggccaataagaagcaaaaataaatcgacttccttgaattaaaataccacatagcgactcctacgtacagtttgcattccttgtataatatagaaagtttacaatattacagccactacggtagacctgggctgtacactcgctctcacatccgtttgactatatgggttccctgcttatgtttccccgttacgatttttaaaatctgtacaaaaccagccacagactccccctattgcgaaacctaccgtattcgaaagcctatattctgagacctgctgtggacgtgatggtatacatcttggagctgtcatatgagattgacaagctaaggaacttggtggacgaacgctctcgtttggttgaagtactaaagattcaaccctctgccaatgataacatacaattaaaaaaacacctgaacaaggtgctaggtatgctccgggaactttcgaaggatattttgcattcaagagatgaaggactcaggggtttggtagagaggtataatgactgcctttcggatataccagatgggctgatcgaaaagagtgattatatgtttgagctgggacggatgcctgattctggggacgacagccccccagatatgaagcgagtacgcttccaggacaagctggacgtccatgaggcgcaaaattatgaagaacgggtattcccgccctacaaagatgaccccgaggccgcgctagacagggagcgcgagcagttgttacaaggtggaactgccggtggaaggactacacactcgccttttaccaatcaggaccttttcatgcagcagcagcagcagctaatggagcaggacacccatttagagcacctggccgcttcagtgcatcagagtcaccgtatatctacgggcatacacagagaggtaacagaacagaacgagggaattctaacggatctcgagagcatgttgaacaactccggacagaggctggacagagctaagaaacggcttgttatatttgagaggactgttagagataaaggccattgtatattgatagtcatcttgatattcatattgttgctgattgtcatcgtgttttgaacaaaatcagacgcaggtcgcctttctattatcaaaatagattcttaaaagtgaatattaaacaggtatatacagatgttgaaccagtggctgacagtattgcgcgaggagaccccttatgttgctaagctgcccacctttattaaactcattgattaaacctgaaacaaaacttgtgctagcgctaggagaacagtagcggacacaggaacgctgtccatgcagacggaagattgttgcgagaaaagttcatagcgtaagattgcctcccaaaagacaaactcggcgggtaccggcactacctaacatcattcttaggcatattaccagctccggttactctggccctgcaattgcgatttagctcgcatttgatgataatgtctttgggtgtagggcgcttgtgctgtttgctggtccaaataatggtaccgagcgtacatgtctggggctgcaagcctagcggttcccgcctgaagctgcatgtagccgtgatgctgcgctgtgagccctgacctatctagaaagctgtgaacttggcctggcgatactatcggacttgatgcctgctgtgctatctggccctgcaagggcagcgcaggcgcctgataataaggttctacgaagaatatgggatcattcataaaggacttcatacaattcaactttgccctggcttctcgactgatattctgggttgacgtcaccgtcccgaccgttgcagagaactttgcaggctgtggctgttggtgctgttggtagcggatcttctggttcatgctgtttctgcggtcagcggaaggctgatttagcatgaggtagagagatgtgcaatgttacgagtgctactgagttctatcagctttaagtgagccagttggtacaagaagtggaacacaaatttttcaaggcgacagcgcagaagacttcaccaacgtcagtacataaaaggaggcgtttgaaacaaaagatattttatgccaactctcggcactgaaaaatgcagatatttagagtacttcaaactcagcgtatatagggatatgatcactgggatgtagctcgttgggtaaaccagtttgcgccgttgatgataattcctctgatacctcttttccgctaagaacttgaagcagtctaaagtcacggccatgaaaccatacgtagtcgaagatacccttgattttaccagagtagcaggtattatcgaaagaatccttagggatatagtcgtacagactcccattcaaaaaggagcgcattggattctggaattcaaggcccgcaaccttcaccacttgtccccgcagaaaacggactgaaagagcatcctgggaggagttcaagtcgccacttagtagcacttttatgttagagtaggaggtgtccttgcgcgtgagcagacgcttgacgatggccttcaggcgacgcatgattatgaagcattgggccagcttgacttcatcgtacttccagtacaaatgcgtattgacaacgacaaacagagaccccgttggcttgtgaagcagcgtaacaaacaagcacacctggttgcgctgagtgaggactgtctttaggctctgcttctcgaccacatgccctgtggcgtcggtcacttccacttgcgtctgcgccatccattccttttcagttggcgttaatactcccaaggtgtcactgagatactcgagatcagtggccacatgctcaaatttatcggcgttgtagaaggttcccacgccatccatttcctcctgagaccgcttccagtaagctggtgggggcttctgcgcatattgcgattcgaagttcattcgtcgtttcatctgcttgcgccagaacttctcatagtcctttcctgtcagttcctgcaggcatagaatatccgcatggtacttatggaacaactcgtactccaacagcttgtgtcggtattcccacttcttgaacggctcgggaacatacgtatagacctggggccacatataatagggcgaaagcatattataggtcaaaaggttaaatcgccgctcagacctgcaacctgcacttgctgatcccgagtatacaggtaacaactgccgattaatcattctggctgggagtgccttactaggcgccatagtcggaaggaggcgtcggggcattttaaagcctgacaaggcgagaaccagcaatgagaagacgaagatatacaatttggatgacgaccttataatcctaacgccattgccacacaatcggacataggtagctatgtttaatagtgcacgtatatggcaacgatcgtgaggcactaaaattcaaaaggctttaccgatggacataccgtgactttaggcgcagttttttccagttgatgatgacaatgtaagtcagacacatactgatattctattcaaatattaccaggcaaaggcatatctttagtatggcagttctcaggagagtgaagagaccaagagtagatatcgaggttgagagggtctcaaagtatttcaagaaggaagagtcgttgagtaccgaacttgctgatgtaagcgactcgcaggtgagcataaatgccatcaaggccatggaagcaccggagttcttcaactacgtggagtctaggacgattgatcttctgccagttgaccggaagttggaggataacaaccgatttccgcctaattttgtcgggatttattccaaggtgagactgatgaggtctaagatcataacccctgtggacacagtggggtgtgcctcgctgccgctgacgctgaacgagaagtatggaatcttgaaggatcaaataaagccgctacactatcgactgcagctgctggtggccctcatgctctcggcacaaaccaaagatgagacgaacgcaatagcgatgaataatttgatggattactgcatgaacaacataggaatcaaggagggaataacgcttgaagcactgttacaaattgaagagaagcaacttgatacgctgatacacccagtcgggtttcataggaaaaaggccgcatacataaaaagggcaatgccaatgctgcaggaagagtttggaggggacgtaccaacgaccattgaaggctttaactcgttaccaggggttggtaacaagattgggtttttagcactacagaagtcatggggaattgttgcgggaatcggtgtcgatgtacatgtggaccgcctttccaagatgtggcggtgggtagacgccaaaaaatgcaagactcccgagcatactcggaaggcgctggaagaatgggttcctcgggagctttggaatgaaatcaatccactgctagttgggtttggacaggtaatatgcccttctcggggtaagaggtgtgacttatgccttgctaatgatatatgcaataatgtggatcggaagctggtaaagttgcgaaattttaatgagagccctgccagtctgcgtggggatcacagccaactactgacacatcttcaacacacccttgttgcatctgggtccgctgccccgcgaataaagaaagaagaaacagaataaataggtgggatccgtgcggtgacttcttttaggtattaattcatgttctctacatattttacaaaacataaaagcacaagtattctagttatctatcggaataacaagcgctttgtactatttcattagtaataattttaacccaagatggacttgcacttttccaaactttggcctgcaaaatatctgacatcgacatcgttatcctgacatagcttctctaagttagggaggataacctcattgctgagatcagcgtaattcttgcctagcgcctccacaataacggcgtatgacttcgctgcgttgaatctgatgtttggaacaccgtcagtggacaaatggttgatgaaaggtaggatcttttcggtgataactgccgaagaaactactgggaccaattccgttaatgctgagagtaaggtaatcctgtaaacaaagttttctagtacctgcgaatcggattttaaaagacaggatatgatctgatcgcgcgaccaagctgaaccaaatatctctgttagcttcttcaggttgataactgcagcatgtctgatagaatacacggcgtcccatagccatgaaaggcagagatcagccagttgctgatcaaaaaaatccacgcccagctgctcagctagcagtggaatatactctattatggccatgcggaccctccagttatcatccttggcaagttccgtaatagctggcagcaaattttcggttaagaagtctatcccaatggcttcattgactacctttaactttgcaatgatattgagccggacatctgggaattcgtccttgagcatgtttaacaaaatgggtatcaagttatcgattgcttcctgtttgcttaaaagaggagctagaccggtaatttcagaagccaaggaagccctcactgtttcgttctcatccatgcacaaggtctgaaccactggaagcagctttttaagaatcactgcagagtttggaagtaacttggcaaatcctggtatttgcttagctatagcctttcttacatcgctctcattgtcttcgcatagcgccaggaacggcgaaatcagctcgtcaatatatgctgggtcagaaataaattgggaggccagatcttcaaacctatcagcagacatatatctgactctccaagcctcatcgctcacaagttgtattgctgaatgtaataaacccttcgtgtgggtagagtccttcttcttattgaaaaatttcaatatggagatcagcacatcaacggctaagaatttaacagagtcctgattatcgctcacaagccgctggaacatgttggaaatataatcccaatcaccgctcgtggataggtctatgttctgggtcagtaagtctatcaatgtgggcaagttccgtcccgcagcccgcctgaccatgggagtgtcgtcctgtgtcaactgcaagaaaagggcgagtagctccttcctaaacttgtcgtcttcaaccctaaccaaaacggccttaaataggccacaggcagacaccttcgacgaaaaccactcgttagttgccaagttctcaatcagcggtataaactcacggaacaactgctcctgagacaattcctgagcaatgttattcagagaactaacagccttatcccgaaccaatgtctcctcggtagacgcaagaatctccagagctggtaacaatagagtcgcgtacttgctgcctcccacgtacggaacgaacttgcctagttgctctgcgagaaacgcaaatacctcgtcctcgtcgtcctgagcaacctcagtcaagaagggcactagttcatctctcgtccgctgtggacccaatgcaagggctatcgtgtccagcttcttcatcgcctccacgcggttagcaatatcgtcgtgcttcagctcatccatgagcaatgccaatggatacaaatcctcgcccctctcgctcatcctgatgtctgccgtgtaactggtcttagcctaatccgaatttccgatttccgttcctagttaatctaaggacgcaccttctttaacttctcagtctatgagtgttcaaaacaactcgcaaagtttcggtaccactcgcactgccggcaaagctggtatgtattatgtctgcagcaactataaggggcgttcgaaagctaaattgccttgctaccgaaaagacctatgctgatagtgcttgctgcgccaactcacaattctgggggctggttgagttggttctctaagaggggacacgcgaaatcatcaacgctggtttgccaccttgatcgtcacgtgatagtcgccgggtaatatatacgtatgacgtgattatttacaacgtcagtaggaagactcttgatggttacatatagagaggtatttactgtaagtcgcctgaaggagagctcatcaaaggccacgggcagcgttgaatatagtccgaatatgaactaggccatggctcgatagtaatttaaaccagcgcaacttcctcaatgcgatggccagcattactacgagggcgatgaatctggagtcagtgaaatctgtcagccatttcggaagataattcaagatggctgcgtaagaatggcgtggcttgcgctcacaattctcagagcggtcagcagtcagcatgggcgagcccggggtcatgagtggcagattgggccgagcgacgcggtcctgctggcgcgcgccaggacgcggcggcgccgcagaggacgggcgggccacgcggcgttccgacgatgcatgcttgttcttgatggtcttctttttgggctggagctgcagaagaatgtgttcctcgcaagaaacgccgttgcggctttgtggcgagccggagagttttctactcattaacgggaacttgcggcagagggtccagtacaatgacttatccatctcgcgatggaggcaccgtacctggagatcaagaaggtagagttcaaccagcttcaccaagtagccgagctcctgctcgctgtgcacgtcaagtactaagcgcccgagttcacggcataggtttccctccactcgccgcaagtaatctgcgttttccgctgtatctaggctgccaaggcgcacagccgaccggaagtagcttaacaacaggcgcgcacgttccaacacgctgagcgcgctaaccacatcatacactccgccgctgctgcggcttaactctgttcttagctgccggagaacgctggacggtatttcattggcggagcggagtccattcactgccgcaagcacccacccccaaacatcggctgtataacgctgagctccgtcttcaagcaatccgtactggtacacctttacgaggaacccgccgaagtgcgcctttaggtataggtctctgcactcgcgtagtctctcttcctgagagtctaccttccctgcccgtgcatcttggaacagctcatgctgcagcagagaatccagagacagacttggtttagttataaccttggacatggaataacctgaatatcaagaccttccacggctgtcggctcctcgacaagttgggcttcctcgttacacggcggaacatgaagttgcgaagattacagaaaatgcgggggaagagacataccgtttgccgtaatcattcgttatatatgatatttcgactactagctgctgggtaagacggcgtctgctataagaacagcagcggccttggccagctacgcctgcatgcggccaggaatgcgtggcatttgcatgcgactgtagtgaattgtgatatccagtcattaagaacgctcctatgggcgcattattgaagagatagataaccgcttgtggactgggcatgccacttgcgcatgcacattcgctgcaataatcattcgtatgtcataatattacccatctctactttacttaggtacgcaatgtggatatgatgaaattccttcttagtttatcaacgctcaaccgtcataacgcaaatggataaagagaaaattgagaaaaccaacgttaagaacaagtaaaacggattagtacgtaagaatcgggtcagtctccaagatgtgctaagacagactagggccagctcaaataccaagccacttgtcaccacagatatcgtccactgtcggcctgcggttgacagaacggtttaaaatacgggtgattaaggccacgcactcctcgctcactacaactgctgggctgatacgcaagtcaccatctaggatttcgtcaatgttgtagaagggattctccttgtagatgatagtgtagagcagaacgccgaccgcccagacgtcttggggtttgccttcgtacggatcaccgccgagaacctctggggcggcgtagtcaatagtgccaacaaaaacatcaaaaggacctcttttcacgtaagcagcggagccaaagtcaattattttcacccggcctctgttgtcgacgatcacgttctcgtccttgatgtccctatgcactatgccgttttcgtgcaagtgtcttagtcccgaggctacctgcttaaagagcagttttgcctcgtgctcagtcatgttggtctttagctcgatcaaatcgaataaatcgatggagcccgtttcaccatgcattggagactcgatgtaatagtattcatcatcttcaaagaagtcaagcaggcgcatgatgttctcatggggttttttgtttaatgtagccatgatctgtatctctgagggaatggtccctaattttctatctcttacccatgtgtctactagaatccgctccttaaaaatgagcttaatgactaccacatacttctccttcttatgcatgcatagatcgaccttcccataagcaccttctcccattttttgtaataccgtgaagtcagaaaatttggtaacatgcttagaggcaccgatctcgcgctccggggcaatattcgagttatcgaaagatgcgctgctttcactattgagaggacgtaaaggagaatcactgccttctcggaaagaggaattggtgtgtagtatcagattctcatccaccttgaagttatcgtcgctgacaaattgcgacttatcttgtgtgtactttttggcaatttcccatttgctacaagagtcagtggacatcattgaatctttagcctgcacggccatgctgcttgtggtggtattgacatcagtttcctcggcaacagcagtggacatatcatcagaaagaacgcattctgacttcgctactgcgttagagttggattcccgaccatcaatatgcaacgttagtgtctgtagttctgatttcagcttactcaattcttcaagcttaaatttatcagtggtgtgtttagaggacgttgctgagtttgtcccactgctaatagtggctatctctctttcatttagaatcttcaactgcgatggatttgtattgtagtttttaaaaaacacgtccctcgagtgagttatccatagcaatatatgcgacatgtttagaacgcgaagttgaatgtcaactttgatggtgcaaccatccctatggacagcgtcaatacctatagagctgtaaaaatcttctgcactcctgttcatttggctctgaagtttcctgaaataatgctctgtaagtactagacctttattcttggatagattgatgttcaaatggggatacatagtgttgttgtatttcaacaaacttggaaaagacgggatgatctttgtaatcggttgatttattagttcaatgtaatgtagaccgaacatgtttttggaaattgatttattgaaacttattagttgtagtgtcttagagttcacaataaacatgccggcttggtatggtaagctgtgtatctgtaacttcaaatcgtcctccaaaattgatgaagtaacagcacatggaatattgatggatagatgatttaacgtgaagtaccgtactgtattgatatgatcgttcacgcgaactggtaccggtaacaaatcatcatgtttattcaggagttctccagacttcactttctcaataaggttggccaatgaacgactgatggctgctacatcattgatctcattggcaaacttcacgcttttggttttcggcgtgatggtgggtggtggtatagacgatgtgatctccggctgcaattgtaagccttctcctccggagatatcccgcacggagaagtcgtctaaatttaacattacgttcatgtaatcacagggcaccttttcaaagacacagacgatcatgccattcttacgctttgcccacatggacgcccaaatgaatttctgtgtatgcgaggatgctgacgatgcagctgaagcaggagacgacagcgatgtgacgcctggttgtatgacgcctactatttcacctgtgaatacttgttcttggccctctgtagacataatcttgttaaggacaaagctcctgctgtcggtgtgtatcaggtcaagtaaagtaagcgccttaaatgccaatttggagataccgaagattaagcatgccaaatcgttagccgccctaaactgccatgggtgatgctgggaacaggtaaatatggcctgaggtgctgtgtacttacctgatataaaagtatgcagtatgcggggcgcttcgtacgttctgctgtagtctatcggatcctggatagatgttagttcatcggtaaatggttggagataattttcgtcctgcgaggcctgtatagtagtttcctgtgttgaatattcatgaaatggttgggctaagctttcaagcagctgcttctttagttcttgctcattactgactttcttcgcaggatctacgccatccgcgttggtgctgaccccaagcgacagcttattgatgtttaagagggatatcatcagtaaatcagatgccttatcattatccttgttctctagtgtatcattcaacagcgtcaacagcccttcgagttctctctttttctcgcagataaactccgagctatgacttggatgatggtcatatatcgactgcggaggaggttgctgctgcggtggctcgggtaaagacgccagcgagggcgactcatgaaaaaatcttcttacttccaactctgaggcagtctccggactgtccgaagtatcactccctatctcccatgctatcggcagagtgcccaattgctgctgcctgaacgggtagctgccgctcgccgaataagcaggcaacgttcctagtgacggtgacagcattggggggctctgcgtatccagactctggcttgatggtaccgtggtagccacaggcccgttaaataacgcagagagagccgcggaagatgcgttccgtagctgctgcgggggctggtccattggagaccgcttcaccgatgcagagtaggttctatccatactgtatcttgagacaatcgatggcaagggagctatgtcatctgagctagtcgtgtctctcaggagtgaggggttcttaatcataatttctaacgaacgctttaaaatggaaagacgcaccgccagcgaattcggcgacaaaggattatacgaatacgcgtgggttgactcattggggaaggtcagcagctcttgcgtatccagctcttggccatggcttgcggctgacgacaccgagacgctccgcagtttgggcgcgttcaggtttcccggtgccttatcgtccccccgggaaacggcctccagtttttcctccagagcactgctagcgctgccgctcgtggcgtaccgctccggagtgtctgcctccatcgacgtcaccgacgacgccaccgaaacacccgcatgcccgcccccgatggcgtgtttttctttcagatgcctgaagatatcgttcgacgtgtgcgacgctccaataaagggcatactgtcggtctgatgctgtagcgcgtgctgtgcactggttaagcttttgaacgtgcactactttaaagccctatccactcgttcttttgcctgccctgcagaaacgtgtgctgcccttgcttccgctggtagggaagccactctcagcaaaaagaaaagtgctttctgcctgttcgtccgaattccgcagctggccgtgtcctgcttattcttggtaactcctcttatttgctgcgactccgcgactactttggtcgtcagacacttgctacctgtggctccgtatgctgggcaatcactatgacgctatctaactatggactatgcaaaattggtgaggagttggagcggccagccatccagcgcaaaacccaagcacctgtgtcacgtgcgcaccgcgtgattatcacgtgcgtgatctggagcgctgaatcacgcggtccgcacgtgtggagggcggccggcggctggaggaggccgagggggcggcggagcgacctgaggtgaggacggagcgtgtggagagcgcacgttccgagagggcgcgcgaggagccggctgcggaccacgcggactgcgaggcagcgcgcatagactgcgaggcggagcgcgaggccggctgtgcgcgcgcggagagaacggcagaacggggggactgcgcgaggcgacgcaattcgcgcgcagcgcgctctgcggccgccgcatcgcgcgcgttcgcggccgcttccgcagccaacgccgcatcctgggcagagaagaccgcggcctgggcggccataaccgtgcgcgaggtgggggcggtctgcatggacctcgtagcctcgcgggccaggttagcagctgcacgcgcggactgcgcggcctcgcgggcggtctgcgccgcgtgtgtgtagtctgcgcgcaccatgcggcgtgctgcaacgagcgtggtggtgtaggaaataccgccgataacgggcaggaactcgagcacggcggcagtgctgccgaacatgaacaggtcgacgaacttctcgcggcgctgcgcgtgtgtcagctcaaacccctgcgcgcgcgcgtagtacgcggcgcccgtggccttgctgttgagcaccaacaccaccagcggccccacgtagggcacgaaggtcaacacgagcagcaggatatggaagccccaaaagctcaggtagtgccagatgaagagcggcatgtcgcagtaccagaaccgccaccgccgcgaggccatcggcgaaaacaggaactccccctctcccgtcacgagcaggctcgcaatgtaggtctccatgtactccaggtggtagttgcggcagcacaccgcacccaccagacaaccctgccacaccgcgtgcggcagcacaaatggcagcgcgggcgggaatgccaggcccaccgtcgacatccagaacgccactgctatggcgactgccgcgccctgcgcgaacgcgtgcactagcacattcgccagaaacgtgaaatagtacgccggttggacaatcagctgatacagcgtctgtgctgtgttagtatctgggtgtgcgcaccgccggctggggacataccgtgacagggaggaactgcgtgctgagcgtgcgccgcactcgccgggcttgccgtctatggaacgcgacgctgcggggcgcctcctccgcggggagctgcatggtttcggctcgaggcattactggcactattgcctctatgtgtgacaagctgggtggccaatatggatatatatggattttcgccacgggacctgggcggctattcaagcgatacgaggacaaaaagaacgcctccaagttggatatcaacagcacccactcgatttaaactccagtatgacgttgagttggagcctaacaggaaatctgaaagctctatgggagcaatggcgccgtttaatggcgttcaagcgcaatatgtgggctgctaccgtctcaatgtgggagatcgccatgcggagagctggactatttctgcatgcgctccctagtgacgcatcgcgtttgtttacgctggttgtgccctgggtggtatgtatgaaacagcaggttgggacggacatatactaattcaggcagtcgatggtggtcgggatgggccacgggcagatctgggttcaggcggtgactctggtgatcctgtacatcataacgtttgcggcgattttggtatttctggtgctgttgtggacgccgctgttcctgccgatctcagtgatcttcgggcccgcggggccgctgggctacgtgctgacgctgtatgcgaacgcgcagttcttcacaaccatgatcgtgaactcgcacctggcgacgccgctgttggactacaccattgcgtcgctgatgggtatccatattgagtacaagcgccataaccctgaattggtggagccggaggcgttcagcgcatacgatgtgctgacggtgctgcgcctggtcatgagcgttgccgtgatggtggttctggtgaccatcccgattctgggacctgttctactgatgtttgtgatgaatgtaaagttttcatacgacttctacgagcggttcttaattctacggggactaaaccaggtgcagcgccgtgacgtgttctaccagcatatcttacagtttgcatacttcggggggtcgtacacggttttaaatttcgtgcctctattctcagtctggggctttgtgtgctatccgttggcaatcaaaatgtgggcgacttccaacatcatccactttacagcggaagaggtagagtcaatcactgaatgaaatcattcatttaacatgtccatctatacataaagatagatatagccagaatcaataccctgcccattagtaaagtaccatgctgtcgacacagccgaatcccgccgcaacaccgccctcgttggacgaaggcaacttggaacgcagcagccatccagcgtagtcgttactgtatatttcctcatctgaaaatagtatggtaccgtaaatacctagctcactgatgagaggctcctggaaaagctcctggccgcgaaccaggacgttttcattgagttttggattgatgagctccattagcacgtagccattccattcttcttcgggaatggtgccgagaaatgcagggatgtcctccttatatatattgttcccccctccctctctctgtggcttcaaaacgtagcgttctggcatttctagcgcgaggcgtttgccctctttccccaaaggggagtcatctaggggatagagattgacaaaagtagcaccaatgtcactccggcgatctgctggaagaaatttggcgagtacagcttcctcagaaaggagttgctgaactttcttggtaccagaaagctgggttaaaaggtttggtgccttgatggcataacttagctccagagatagtctattcttccaatcctgctccgaagcaaaatcctgtggcgagtagcatgttctgaaatagacaactgctatttcttggcctgttgaagtcaggtatagtcttttcgttattgggtccaacctagtgcgctcatgcacctcatggagcatcagcctgactgatttcacgccctgtcgctcaaagaggttgtactcaagaatgcgttgatccacaacattgcgctcgcctctttgcacgatgaacgcaacaattgtgtctctgctacctgtcaaagagttgtacttatccgcagcactggccaaagcgcgaggcaataaaaaggctgattcggaaataggaacctcagactcataaaaccgccccccgttcctagaatacttgcccgattcatttagaaagttgtgtaccgcccccactttagtagatagaccggcaaaagatacactgactgtattgaattccacctgcttcaggtcccccgagtctgcatcgagcaggtaatctgaccgaaatacacctaggcctattttctgcgatatcccaatagcttgtgcttctaggtaaagcttccaaaggcggccggtgaagttggcatcgaagttggccagctgctccgtcacttcagacagccagccattcttgtcctgcgcaatccgtgcgtacaactcattgtaggtcgtctgcacccgcacagccttttctagtgcctttcgtgggaggggcgttgggaacagggtcatcgtaagagcttcagcctggttgatgttgaagcccggaggataaatggtcccaccattagccagagaccactgcaaaagttccggcagcagcctctgctctacttcttctgcactccactctggtaaagtaggtatagtatttgtcattagtaatatgcctccttagtagaacttccgacagtgcgatgtaaatgtgcatatcataaaaacggtgttgagttaccacccccagctaggtagcgctttttttttctgtgaatctcgaggacgtctggtgtataaaacctgccaaatttatctcaaatgagagcccctgcgaagtaggataatatgcttacatacagattaccaattacaaactcttaaaggggagtactcaacctcaaaggagcgatcaggcttccagagcgtcggtatcaataaaattacatgcggcatagatactccattttattagacgcgtaggagtgtaaattaatcagaaaacgcattccgaaataagattcataattcggtttttttttttgttttactgtacttcactagttgtaaccttggattaatgaattaaaattattagacaatatcgttataatcggaatagaacaaatggaaaacctagccaggcacttctagagggactcccaatagttccaattccaaatacttgatccggcttcacccaggccgacacctagaccaagaccgatgggaggctgtgcgttcttgttatccaacatcatgttggaggtcatgaagaggtcgtcgggggagtcgaccttgagcttctttgagtcgtttagtagagacgaatcagattctgcggggctgatctccagggagtcgtgtgatcttttcttgttaacctgttctgtaggtggctccgcagaagagctgtcaaagctgaggctagtgcagtcacttaatccgtagagatcgaggaaacacgagcttatgtctctgtcgtggattgagtaggaacgctcatcggctgagaatttgctcgacatcatgagcttgttgtctttaacatagcactcaatggagtcctgttcccgcacacgttgctgggcttttgtgaacttcttcttaccagttccgttaatctgttctaccatcagcgccggaatgggcgccaatagttcataagatccatccttgattcccatacaatcagctagtgtgcataaaaagagatctactggtgagtgttcaaatatttcctgccgatgcttgaaacgggacataatttctgcttttctgattgctaagttcttcaaccgcaactcatccacttggtaaggattgtcagctgtaggggcctgtgcaaaatctgacttcgttggagacaacttgtgctgtggcaccatggtggcagctaagatttgcttcccagcgacgggcgatggcccagaagaattaacaataccaggtgggacaggggttacgctatcaatactaaccggtgcgtcgccagtttttggaatattggcggtattagaagatacaggagaagcatgttgaggtagagtcgcagcctgtgtggccatgaccgtttgcacgccagccaatggcattgactgctgcacaggcatatggccctgctgcaactgctgagcttgctgttgttgttgagcttgttgttgagcttgctgaagctgagcctgcttgacctgctgctgtctaatctgctgttgcatctgctggaacgaaccttgcactctttgctgttgcatagcaatatcagtgttggttgttacctgcggattttgtggagctcctacagcattctgaccaagcttgatttgaccagcttgttgttgctgtacaacttgctgctgcatttgctgctgccgcgtgctgaaaagctgctggtgtctcctcaatagttgctccttgataaattcatagtacttctgatacctaaagataaccttgtcgacaacatctggaggtacgatgaaaactcccttcgatgcatgctccattatttctttggccagcatccgaatctgtaagagttgacgaacgttttcttcatttctcgttatcaagtaaagagtgggaatgaagttatcaacattggatagaagttgctggttagcttgtaatttgttctttatcatctgcttctgctccggtgttagctggttagtaatattagatagccttagaggagatttcgcgacttcactgttgatcctcttcaagatcatcatatcttgttcagttggcctaggtaatgtgatcttgggtgtctgctgaggcagctgcacttggcgaagcttctgctgctgagactgctgctgctgctgctgttgttgttgcgattgttgttgggcaggctgtgaaagttgctgaggctgtggttgttgttgagactggacttgctgtggttgttgagactggacttgctgtggaaccggttgtggttgctgtgattgtggtttcaattgtggttgtggttggtgttgtgtctgctgctgtgtctgctgctgctgctgctgctgctgctgctgctgctgctgctgcgtctgctgctgcgtctgctgctgcggttgtggttgttgcgcctgcgcctgcgccagttgtggctgatgaggctgtaaaccaagctgttgttgttgttgtagttgcggttgaggttggggctgctgctgctgttgtggttgttgtggttgttgtgtttgttgctgtggttgtggtggtggtggtggtggttgctgttgttgttgttgaagtagctgctgctgagcttgtgaaccttgttgttgttgaagtagctgctgctgagcttgtgaaccttgttgttgctgaggatgagattgagagagagcggttggctgggtttgctgctgcgcaatcgttgaaacgttagcagatggttttgcaagtgttggactggtgaactgtctttgagaaaaagagtccgcaagctgtgtgtgttgtggatcttgttcttgagtttgctgcaattgcgactgctgggcctgctgtaccttctgggtcaattgagcttgttgctgagagatcgattgcgaaacctgcgattgaacctgtgcttggttgcccgtatgttgctgctgtgcaaattgactatgctgcgccataccaggcgtaaatctcgcaccggcctgagccgccatctgcgactgcgtgttcgcagagttcgctgcaccgatctgctgcgctaaccgaatgttctgctggagtttcttgagcaccatttgattaatatatttcttgatgtatagaatctgctgctgctgtgtcaaggaagctggaagcttacctgcgagctgcagatcctgcacaagcttctttccattttcatacaatgccttctgttccgcaggcgagaaaacctggttcagtttatttaaaacgttaggtacttctcgcgcctgctgtggacccatctgccttggttgctgctggccctgttggagcgctgcggcagactgctgcgccatcatgtttttctgctggtaagcgttcggatgctggagctgcgcctgagccgccgcatgctgctgctgctgctgttgttgttgttgttgttgctgctgctgctgttgttgttgttgttgttgttgttgttgttgttgttgctgctgctgctgctgctgctgttgttgttgttgttgttgttgttgttgttgttgttgttgttgttgttgctgctgctgctgctgctgctgctgctgctgctgctgttgttgttgttgttgttgttgttgttgttgttgttgaggcttctgagcgggcacctgctgggactgcgcgacctgtggcgcctgcggcggtgcagactggctctgctgcgtcgactgctgccgctgctggagctgcgcgcgctgctggggggtcagctggttcagactggcctgttgcatcttcgatttcaccatcatctgttggtgcatctggtagacctgtttcgcaatctggaggtcgctctgcgtcaggcgcttctgctgggcgagttcggtcacctgctgccacgtcgtgacgcctggcgggatgttcgggatccgttgcagcagctcgcgcggaatctcggcaaccttcatctcgttgatttgctgctgctgttgcagcgacagctgcgcgcgcttcgcctgcgataccgccacgcccggcggcaccccgtgcgccacgtgcgccggcaccccgtgctgcggcatcatcatcaccggcgactgccccccacccacgcttccccgcatcggccgcgcctgctgccgcgcctgcgcctgctggttcagaaacatctgcggattcagtgtcggcgccagcccgaagcccttgcgctgcgctgccgccttctgcttctggttcgccagcgtcttcttctttgccgcgtccatcgcggctatccgcttgcgcatcgcgtccaggtacagctccttggagctgctgctcgcgtacagactcgtctcgaactgctctgccgtcttcttgagcttttccaggtcaaagttggcgcgcgcccccccgttgatctggctaatgtccgccagaatctgcgccagctccgtgatgtacttggaccgctcctggttcgacagcgtgctgcgccagtcgagctccatcttgtatgcctctctttgtgcgcaaaatttgcccgctgccgtccttgtgcgttgctgctactcggggctggtgcgttgagtgctggttccgaccctgaattcctgttaaatacgtcgacctatacaaaattgtcatgtgctgctcggggcgagaaaaggacaagagggctgcctcgtatctcgccgaacggacggaacgctcggccggtgggctgtacgccgcgtgcttggctgttacttccgtctgcgcctttgcgtacgaaagggtcggtgccggtggtgcacgggggcgaaaggcggttaggtgtgctcttcgtagatgatgtcctcgagcagggcggccaggcggtggtccaggtcgtcggctcggcggtctgagacagacgagtcgagggccagcttgtggcgggcgagctggagaatcttctcttccacggtggcgcgtgacaccagggtggtgactgcaacctcgcgggtctggccgacgcggtgtgcacggtctgcagcctggcgatcgtcgtgaggattaaaactctggtcaaagatgatcacgtgattagcgcagaccaggttgataccgaagccgccagccttagtggagagcaggaacacggggacgtcagtatcggtgtggaagcggtcgatgagggcctggcggtcgttgacgggggtcgagccgtcgaggcgcaagaaggcgatgccaagggaggaaagcacgagctcgaggatgtcgaggacctgggtaaagagcgagaagacgagggtcttctcgcggcgcgcgatggcggcacgtaggaggggctggaggcggtggaccttgccagaggccatccaggtgggctcggagagctggaaggaggcgagtgaggggaagcggcagcagaggcggtgcagctcgaggtcgcacatgtagctcatgtcctcgcggatgtagtcgcggttgccggagtcggcgtactcgggctctgcgaggatgcgctcgctcatctctgcgatgcgatcgtccgagtagtggtggcggaaaagcagagggtggatggcggccttgcggagcgccatgatgaggttcttggaggtcgattgtgcgaccagggcgcgctctccggcgtcggtgggcaggacgccgtcgcgcaccatgcggcggtgctccatgacgaggcggatctcgcggttgtagatggcctgctgctcgggtgtcatgtcacagtactcgatgtggtggtgcttggcgggcaggtgctttagcacctggtccttgcgccgccggaggataaagggcttcataatggtctttgcgcggtcgatggcctcctgcgcgagcagtgggttgtagtccttgttggagtccgaggtgcgcgcgcgttgcttgaagaccgcggcgagctcgtccttcttggacacaaagagcgatggcatgatgaactcgagcagcgacatcaactcccgcaggttgttctgcaggggcgtgcctgtcagcaggagccggaagttggcgtgtatcttcataagtttcgtgaagcgttctgacattgagttcttgagcatgtggccctcgtcatagatcaccacgttgaactggcgatttttgaggaacgatacgtcggctttgttgccggatgcgaggttgtaggtggtcacgatagcgtcgtactggccatcattctcttctagtatgtcacgcagctctgcgcgttcttgttgtgagccatagtatggctcaatctttagctgtgggcagaacttcttgaactcgcggagccagttttcgagtgtggaagaaggtaccacgaccaggtgcggcccggtgtggttctgctcctttagatatgctaggaacgagatgacctgacacgtcttgcccaggcccatttcgtcggccagaatgcaggagaggttgtgttgatacaggaggtttatccaattgagcccggtctgctggtagtccttgagttcgatgtccggtgcaagcaactttggcttgcgcttgaagaatttaacgttcttcttctcagggcgcccccgcccacgaccggagggatgcctgcgagtgacttttccaaaatcgtcgtcgtcgctctcttcttcatatacgtcctcgaactcctcatcatcctcgtcgttttcgtcgctgtagtcgccatcgctcgcgttgtcggcactgccatccttcttgccatcgccgttaggcacgagctccgtcgacgcggtggtcggtgtatcgctttcgctatcgctctcgccgtgcggactgcccttcgtgtccatgaagttcagctcgctctcgttctctcccatttccacgccccatttctttatctgatctgcaatgagcctgcggtacgatgagcacttcttgatcagcgattcaatcgcattgtagcccttcatcgactgcataatcttatcgagcatcttcgcgccatccctcttcgtaggcccgcgcctgcggctgcccctcttggcgttctcgcccgtggaggcaacctcatcgtccgcctcaaagtccattgcgccaaatgcctccagcgaacgaaagggccgctttgccaccacggccgccgccttccctatggaggtctccgcaaggtcggctatgtcgccggcatccgcctcgttcagaaacgtcagcacctggtcgtcaatatccagctccggagtccgctcctcgtactcgtcgccgctcgcctcgtccgcgctgccgtccgcgctaatcgcgtcctcctcctcgtcgctcagggacacgcgttcctcaggcttagccgccagcaggtcctccgcgcgcaccagcttgcgcttcttcgtgggcgcgctccacaccggcgccggcgcctccaccttgccgcgctgtatcacgtgcgagtaccggtcgaagatcgacgtcgtctggcgctccagcgtcaccttcgaggaccgctccggcgatgccacggcctccgcaccgtaccgccccggcttcagcgacggcagccgcgcagtcgcgcccagcttcttcgacggcatcgcccacgacttcgcgctcttctttgcgcgcagctcgtccaaccggctcatcgtcagcggcaggctgaacgaattggacttgaacaccgcccggatcagcgtgtccgagaaatccgggtactgttgccgcatcttctgcatctgctcgtccagcccgttgccgccctctgcctcggctcctgcccggtactcaaaccgtgtccgcagctgtgcggccacggcctccgccgcctctcccgccccatagcgcttcagcggcgacgactccgcgcgctgctcacctggcgatgaccccacaacctgcgctcgttcccgctcgtccgcctgcccgtatatcctttctggtgtgtcaggctccatcctgctgcactcacaatctatcaaatgaaccgtgcgtatgctacaatgcactcgttgtgatgctctggaaacgccattatagaaatttttcttttcactacgtcctggccaaggataccgcggcgcctgcgctgctggcggcaggggtggcttctcgcggtcacctgaggaagcgacagcagcgacaggagcgtcgcttctgtcccgcgatgggcgcggcgtgacgcgcgacgcagctgcacgcgccctttaggaggtgggcgcgtgtttttggagtttgccctcttactgccagttgtaacatcattgaacacaaacagttgcagaaatcgcaataacaagacaagacatgtacaagatatacgcactaggatctaacggcagcggtcaacttaggcatcggtcactataaagatgtgatggtgcctcatcttacgtttgagtgcgcaaaaaagccgatcaagatcgcgtgcggcgggaaccactcgctcatgttgatggaggacgggcagctctgggcagcgggggacgggcggcaggggcagtttgctagcaaggacacgaagtgcgcgttcgcgtggagcgagctcccggggacgttcgaggacgtggcgtgcgggtgggactactcggtggtgatcgacgagcacggcaacgtgttggcgtgcggggcggggttgaacggggagttggggctcgggcacgtcaagtgcagcggggcttggaggcgcgtcacgacgtgcctcaaccccagccgtgcggtgtactcgtcgttccagaacgtggtgctccgcgacggtaacaagctctacgggtggggcccgaaccgcaagggccagctcaaggagccaaagaacaagggtttcgacacgccgacgctcatatacgagggccgggacatcacgcaggtcgcgatgggcaaggacttcatcgcgatcgtagacgcgggcaagctcgtgatctccgggaccatgaaggaccgcatcaatgacatcattcgcgacatctcctccgaggagatcatcaagattgcggccatgtggtcctcgttgcacatctggactaagcgtgacatcttctcgtacggcaacggcaactacggccagatgttcgtgtgggaacgcccgcccaacatgacccacttcgcggccggcagcgagcacggcgtcatgtcgctcgccgacggccgcgtcttctgctggggctggggcgagcacggcaattgcgggccctcagcaaagggccacgacgccgcctcgccgttcaacgacaagagcaacatcgtcagcccgctcaactgcgtgctcgagacgaacgagaagatcatctggatacagggcggctgcgccacctcctgggtgtgcacgaaatgttgagaagcacctttcccgtgctcctggccctgcggctcgcacgggaaatatgtaaagactccttcgcttgctctacggcgcgtgtatcgcgtggcggccgtctggtgcattgctgcctgccgcccacgcttcttggcgcctgccgcacgccgccagcggggcctggggccccgctgccaggcgcgctggccgttgtaagctctcgctctcttcctcatagtacttggctttatatagctggaaaatttttcaacactatgttacccggacattttctacctcgtccaagagcccgccgcaaagcgcagcaccagcactagctgcaagccctgctgcagacatggcaggtggtagagatagctatcgtagattgtgtagactggttgggcgcggtcgcaccgtttctgcaggcgttggcggtagaatggcgcgaagctcattgagtacgaggctgtagatcaaggcctgcggacagcttccagaaaagcctagctcccagtagtggtggcaaaagcaggaccaagtaaacaagtcaactagagcccttgcggctgagagagagtaaagacaacacaatgaataatccaccgcccatgatgggttatcaaccttcaggcggcggcagcgtaacacagatgctggggacgcctcagccgctcgcgcagccgttgcaccagacaggccccacgcaacaagcacaacagatgctgcagcagccgccggggctggtcagcagcgggacgcggcagatgctggggcagataggacaggtagggagtaatccgctgtgccacccccaccagagcgacccgacgctggtaaacaacccgatctggaagctacagctgcagctggcggcgatctcgcggcagtcggtggggcaggcgaacgtctatgcgcggcagaatgcgatgaagaagtacttgatgacccagacaaacgggagccagcagccggcggacatggcgaagtcgctggtggacttcacgaaacaatacctgctggagatggcggcggatccggcggtgcccaacaatgcggcgctggcggcgagcgggcagcagatacagcggccccacgggacgcctgtatcgacgccgagcacgccgaaggcagagctcgcgaacaacgcacagacaacgccgtccatcctgctgcagcagcagcagaagaagctgtcgcagttcaacatcgacgaggatgacgaagtggagcatcgcatgatggcgccggtaaataccaaatacgacgaacagctttggcacacgatcgacttgtcgaacctttcggtctacaatctaaacgaaaacctgttcaagtacgatttcctgacccgtctttacctgaacggcaacaatctgacgcatttgcctgcgtctataaagcagctacaaaatctgagggtgctggacgtgtcccacaacaggctgactgagctacccccggagctaggcatgtgctaccaattgaaatacctctacttcttcgacaacatggtttcgactttgccgtgggagtttggcaaccttttcaacttacagtttttaggatgcgaaggtaatccattggatagacaattaattaagatccttacggaaaaatctgtcaccgggctcatcttctacttgagggacaacgcgccagaaattccgcttccggagcctcgcagattcatcgaggtcaacgcagatggagagtctgttgagacttacaggtgtattgaggagtctaccaaccacttgaacgaagaacttctcaaaaaatcgtttacattgctgtcgtacaacacactatgccagcactatgctactccgaagatgtatcgctttgttccatcctgggcgctcagttgggattatagacgtgaaaagctaaaggatgaggttttagcgtaccaaacagacattatatgtctgcaggaggtggaaagcaaaacatacgaggagttttggctaccaatattagagaaacagggctactctggcatattccatgcgaagacaagggcccgtaccatgcagtcgaaagatgccaagaaggtggacggctgctgtatcttctacaagaattcggaattcactgcggtatttaaggatgcaatcgatttcagcagtgtttggatgaagcacaaaaagtttcagcgtactgaagattacctgaatcgtgctatgaataaagataacgtggcattaataataaagttgcgtcatgagcgcacaggggagcatgtctgggtagtcactacccatctccactgggatccgcacttcaacgacgtgaaaacgttccaggtcgcggtgatgctcgattatatcgaaaaactgctcaaacagcacggcggtgtcggcagcccccaggacaagaagaagattccgctggttatctgcggcgacttcaactcgcagctggactcggcggtcgtggagcttttcaacaccggctccgtccgttcgcacaaggacatcgagggtagagacttcggatatatgtcgcagaaaaacttcgcccatgggcttgccctcaaatccagctatggctcgattggcgagctgcctttcaccaacctctcccccaccttcaccgacgtgatcgattacatatggtattcgactcaagcactgcgtgtgcgtgggctactgggagagattgacccagcatacgccgccaaattcattggattgcccaacgacaagattccgagcgaccacattccgttgttagctcgctttgagtttactaaaggttcatctgccactattaacacgaatggtaacaaaactgtataatttttcaaggagggcacttggctttactttccacgttggtccataataacgtatctttatgacatcacgtgcagttccattcagtgctgctcacgattgttaatataaaactctactagaaggtgggtgcatgactattcactaggatttgtatattataggttagttctcacgtgttcatttttatggacgggaaccatccccgcacagccaagggaggcggcgacgaggcgtccatgttgcctggtgcgcaccaccagcgcaacaaaatcctggctatccactgcattttatatggacgataggcgtcaacttatagacaatactgggacgctagaaagctccggagatggcacaacagtgtccggcttcaatgcttcgggcaaaaaggaggagaaccaggcgttgactacctgtctcgcaatcggtattgcgctgctatggccatggaactgcctcctgagtgcctcgctgtttttccagcaaacgctcttcacggactccacggtatacgcagcgatctacactagtacaatgatgactactagcacgggtgcgagcctagtttacaatttctacttatcgcagaggcagtctggctatgtcaaccgcgtgagtcgtggcttggagtgtcaggccggcgttttcggggctctgtgtgtgttggtactggcgcatcgcgcaattccgatgccgctcacatttgtgctgctcatggcactggtgttgctaagctccctcgccaccacaatgacgcagaatggcatcatggcaatcacgaacatctacggccccagctacagcagggcggtcatggtcggacaggcaatagccggcgtgctaccctccgtagtcatgttcgtactgtcgctggctacccagcaggagcgccagagttccggcagtgccatcgtgtactttctgagtacagtaggcatatctgtcaccgcattacttctttaccgcagcagctccctccatgcggggcttgtgactcccgcccaggccatccacgtaccattccgattgctgtactcgcgcctgcaggccgtcgtactctctatattcatcaccttcctgttctcactgtctttccccgttttcgccaatgcgactttggctgctgttctccttcctaactcgcaatttatcccactggccttcaccatttggaacgctggcgatctcttcgggcgcctggtggcagatcggccatgggttcaggctgctagcataccccacaggctactcgcagcgtcggccttgcgtggcttcatgattcctgtgttctttcttttcaatatcaatggcactcatcctcactccggcctgcttttggaccttctatatctcttttggcatctcttttttggcctgactaacggtttatttattactttggcgttcatgagcgtaagcgcccttctcgacagcgatgaccagcgcaaggcggccagcggttttactaacctcttcctggccctcggtctaacctgcggcagcattttcagctaccttgttgttttccttctgccctcggtccactaggctggccgtcgtatgtctttccctgtccacatgtcaaccaacaccttgctagatacgtccctgacgccagtcgcaaactgctgcgctcggtgtccctatataactcttgatagacgtttagttgtgccgcaggcggctaacacctcccaaatggcaagatactcctctgttgtatgcttgaatcgtctggcaccattcaactcatcgtcaatatctgtccggttcttctgtccggcgctgacactggccctgtccgattccgtaggaaacgaggtacattttggtaatcgaacacgtataattttccttttttgaaggctttctttagcatatattacatttcagagatggttacagcacctagtgcggtatttatttagaagtctcctctgtattagctacagtagcgggtccgagcaatatgcaggtgaacaccgcaatgcacgacagggacgaaatgtcgacgactggctaccagaggcacgaggcagggccagctaacaaaaggggaaaggcaagcgcggaggacggcgcaggggtgcaggaggaggatgtatccaagttacgggaggtccagcaagaacgcaatccgctatacaaactggaggcgtttgtgatgccggtgctgttcacgttgttggcgctgtatacgcggatgcacaagatcggggcgaacaaccgagtagtgtgggatgaagcgcacttcgggaagtttgggtcgtattatctgcgccacgagttctaccatgacgtgcatccgccgcttggcaagatgctggttgggctctcggggtatattgcgggttacaacggatcgtgggacttcccgtcgggcgaggagtacccggaatacatcgactacgtgaaaatgcgtatgtttaacgcggtattctctgctatgtgcgctccagttgcatacttcactggtaaggcgattggtttttcgctgccaacggtttggctgttctcgattctggttgtatttgaaaactcgtatgcgacgttgggtcgcttcattcttttggattcgatgctcttgtttttcactgtatgctctttctacacatttgtgctgttccacaatgagcgccatcggccgtttgggcggaagtggtggaagtggctgttcttcttaggcgtctcgcttggctgcacgatatctgtcaagatggtgggcttgtttatcatttcagtggtggggatttacactgtggttgatttgtggaataagcttagcgagcccaatatgagcgtgtcgcgctttgctggtcatttctctgctcgcgctctctgtctcatcgtggtcccattcatggtctttttgttttgctttaagcttcattttgaatttctgtccgtcagcggtaccggtgatgcgatgatgccctctcttttccaggctggtttgtccggttcaagtgtaggtattggcccgcgtgatattgcagtcggcagctctcttgtgtccatcaagaaccaagctctgggaggtacgctattgcattctcatgtacaaacctatccttcgggttccagccagcagcaggtcacaacttatggacacaatgattccaataacaactgggtcttcgatagaataagaggacttccagcatggagcataaacgaaacggaacatgaatttgtgcaagacggccgtccatacaggttagtgcatgcgaacacaggtcggaacttgcacactcatcctatccctgcacctgtatccaagacacattgggaagtgtctggttatggagacgctcaggtcggtgatccaaaagacaactggatcattgagttcgttagccagcctagcgacgaggacaagtctgttctacacaccatatccacctccttccgtatcaagaacgtagagatgggttgttacttggcgcaaaccgggccttccttgccagaatggggtttcagacagggcgaagtcgcttgtatatctaacccattcaagagagacaagagaacctggtggaatatagagacaaacgtgaatgaaagattgccgccgatgccagaggacttcaagtatccgaagactagctttttcaaagactttgtccatttgaatttggcaatgatggccactaacaatgcccttgttcccgacccagacaagttagaccagttggcttcgtctgcatggcaatggcccacgctaaatgtgggtatcagactgtgcagctgggcagatgatgtcagaaagtacttcttgataggttctcctgcgtccacttggccttctactgctgcggttggtgtattttgcctcatcacggtttactacctattgaaatggcagagacaattggtcctattccaggcctccgatgacgcaaatattttcctaatgggaggtatctatccgcttttgggctggggtttgcactatctgcctttcgctgtgatgggtagagtcacttatgttcaccactacctacctgcgctgtactttgctttattgatcttggcatacgtgtttgaagcaagcctcagagctgcaaggcagagccagaagtcctactggaagattttggtttacgtcgtctacgcggtttattactgcactatcatttgtggtttttactatttctaccctatcaccgtcgggatggaaggtccatcatctaactacaagcacctgaactggttgaaaacctggagcatcgcttgaatgtacatatacagaacttggatagtaattcctgtttattttgttgcgcctttttttagtacgaagagtaattgcaattatgtccaattcttataagcgtagttcggcggccttgggcgtatcgtcaacaattctcattgtgtaattcgatccgtatctagtagttcagagacttttcgcacgcagacacggtgcccgaggctcgcatcctcaactgccggcagagcagaggggctttccccgccgatgcagagtgtagaagattcacttatgaacatcatgtccctcgcagcgctgccagatgtccctagggaagaaggcccttcgcggactgcgggcggctgggtcgggctcgcagccacaggcgcacgaacagcaggattcgattcgggaccagatacaactcgagagctgccggacacttcacttacactcgctgaaaccgcctcatcgtagcttggaggatacaaaaacttaacttgctgatacttgggaggcacctcatcgtcccacgatatacccaggcccgagcgctcggtcatggtcagcttgaactgcatcctcaacacgcgggcagcgccggtcggcgtgcccacgatgcgcttgtccgcaccggccgtggatccatccggctccagacctggagagtgctcttccgcggaggcgcggaacatcgagttgttccggttcgcaaacatcggcgacagctccgccagccgctggtcggcatggctccccgccaggccggccggtttggcctcggccagcgcctcgccctggccctcgccctcgccctgagcctcgcccttcgaaagcagctgtccgttggtatagtgcagcatctcctctgcaacaatgatctccaccagcagcaggtggttcacggagatgcccagtgtcgggtcctcaacgtcgcacgtgacattaacgggcgcctgcccgcgcgcgaggtacgggctcgtggtcgagaccatgttcaccgggttcgtgacccccgagttcagcttcatgcagtcgatctccatcaccagctcgatcttgccggagccgctgaagtcgctcttccagccgctgcggatgtccgtccccgcgatcgtgcgcacctcctcgatgtagtgcgacgtctcctgcttgcgctcctcctctagctgctgctgcctgatccgcgcctgcagctcctgcagttcctgctgcatcgcgtggtcgctggggtggatgaacgcgctctgcgtgtccgcgtcgtcgtccatgttccccacgtccgcctcctgccgcgccgccgccgagcccgcgtcgaacggcagcgggtcctctaccgtcgccaccgacaccgtcacctgcgggcccatgtccggcgtccgcttgattggcttcgccggtttcttcaggttgcgcgccgtcttggcgcgcacctcctcctccagagcccgtagcctcgcccggtgcgccgcgcacgcgtgcgaccgcacccgcaccttctcgtcgatccgccatgtcagccgccgcatccgccatcgccggtccgcgcagcacacgccacccagctgcagctccagcgggatcgtcgaccgcgggtagatcacgctcggcagcaccgccgtcgcggtcacgtccgtcggcgggaacacgcgcagcgagttgcggtccggcccacgcaggatgctgcgcgtcaccagcaccggcagccgcagctcccgccgccgctcctccccaccgcccgccctgtacaccgcgtccgccaccagctcgtaccggatctgcgtcgcccccgcagaccccagcgtgctcgtggccggcagctcccccgccagcaggtgcgagaacgggtacgcgtgccggccacccgccagctccgccgcctgcgcaaccacctcccaccgcgccagctcccgccgccgttccctgcacgccgcgcagctgccgagcggcccggccacaaacggccgcccgtacgtcacctgctgctccaacaccagcgtcagccgcgccaccacgcacccgcccgcctctgcgcccgccccttgcacatgcactgttacgagcccgctcagaagcgcccctgccgactccgtcggcggcccgtacagcacgcaggggggggactcgatctccagtccgagctccaccacgtgatcgctgccgcccgcgctaccgcgccgacccgtcgctactagccgcgggaacaccatcttgctgctgtctgcggtgtgctcgctgggttcgccgccaccgcccgcttgtgcgctccaccttggcaccacgcaaaaagaaacctgcgtagctccccgcgcccagcccagccgcgcagctagcttcccgcgcggcccgcgatactccgttgtaccttgggccgagagtcacaaagcagcgggctgccgcacggcgagcaggcacttgggccactgtctgcattgtgagcggcgccaggcctggtgctcgcgggccgcctttcgtgcacggcaataagtaaatacgcggcagaggcgtaaacgcgaaaacagagctacaggcggcccgggcagagagcaggcagccgttctgggtttgtttgtttgtgttccacggaatgcgcttttcctgtacgagagcgcatgagcggtggcctcgcctgtagcaagtacttattgttgagttctcatcggcgagttgcggtacctgcacccgtggtactgcagtagacggatcaccgttgcgggctccggcagtatataacgcagagccgaacgccagcatgagagcggagggcaacgacatggcagagagcggcagggcggtattcagcgccgcagactactacccggcgccgtcgggacgtgtgatcacgtacgcggcgggcgggcgggggcgccagataatggcggccgacgtgacggcgctggtggcggcgctgacgtcgccggtggacggggtggagtacgagctgttcgcagacttctttttggtctatcggaacttcctggaggcgcggcggctgctggagctgctggaggcgcggttcgattggtcgctgggcgagatcggggcggggcgggcgaaggcgcgagtggtgggggagatcacgctggtgcggacgtttgtgctgctgcggcactgggtgatcaactactttgcgcaggacttcctgccggacgtggcgctgcgcgagcgtttcttggcgttcgtgaacgggctgggcggggcggcgggcgggacgcggccgaagatcgtggcgaatatcgtggtgagcctcaagaagacgtgggcgtacactgtgcgtctgatctgggacgacctggacctggagcgggagttcgagctgcgcagcgcggacgcgtggctgcagttccagatcccggacgtgacgcagctgaaaacggaggcagggctccagcgcgacagccggctgagcttctacgcgcggcagagcagcacgaacccgagcttccgcaacgaaagcgtgctgtcgctataccggcccaaggacaacttccagctgccggtgcgcaacaacgactacaacatcaagcaagggacgcgcatcaagaagcgcacggcgagcatgttcttgtatccgcaagacagcttgaacgccccgtccggaaaccaaaagccgcaatgctcgctcgagccgccgtttcccgctcatagtcatgtgcggaaaatcagccacatctcgaaggtgaccaacgtgtccaatgtcatcaaggaggttgcgtatccgacctcgcccgcagtggagagtttttttccgccgacgccatccaagaagctggagtttaccgtgaattcgacctacgtgccacctgccgctgcggaatgcagccgcgaacccagcgcgcagaagaagccgaggagtcccaatgggtatcgtgccgttacggggctgctttcgaagtggagaatgaatcatttgtctagacacaaagcatgcgaccgcaccagcaccgtagaaccggctatggacaacctgatcaagtatgtgttttcgatctcctcgttggagagcccgaagggcgatatccaagaagagagagagatctcgccgtcaaaatttgacattctcagcgcacgcacaatagaagaggtagagcatctgatcacggtggagaacgaggttttgcagaaagtgacagcgcatgaaggtaaggttccaatcacttcgtcatcggcacgcgaggcacgttttccgcccttactgaacgaggctccattgctggaccaggctccgctcggaaacggccaagagtacagtgtgattgataatctaaatttgtacaggaccgtgagcaccattgcgacatcagtgattaaattgactcgcaccgcctctcagagacagacaaaggttactctacctccgcctccaccattacgccaacggcctacttctttatctgcatttaggggaagtagttcacgaatgctgctatcggactctcttcgtagggatgggtaccaaaacagcaaagccagcctccacctacggcctctagcatccgctgacgagaacgcagagggttcttccgttcaagcctcaaatcctccccaggttatcttccacacacatgccctgatcaaaacgccaactgataaagtatttgatgctaaggctgtggaagacacgtctcccaagacatctctcgtcagtacgcaagtgacagatgcgcggcctccatcgtatgagtcaaccattacctatgattcggatctgcaggatattaccatgcgcgactataataccagtaatcaaacggagaaccacaacgatggcactctagataccaaccaaccaatcttgaacagaaagacgaaccattccaacctcagggaatttttatttgaagcgtccacttcagggtccccagcagctcatacgacgcaggagccgactgatgagtccactggcagattaggcgcttgtcctacagtaatgcgctccatctcagaaccgatcccaactgttatgaggtctaataatggcgatacgcacactaaggcgaagccggagtttaatatacagtcccatgatgatacctttagcaggaaaccgatgcggccatccctgctatcacctcccattaacattagaggttcttttgataccctacatcgtaagaatgtgcctgccccgatatctgttcctccaaatccagtgacgaaaaacgcctctgtaagcccagccagtggaaggatcagcattataaagaagtcggggaatcgcacctctccgactacccgatcgccattacttgataccacttcagcgttcatggaaaaaactgattccttcgcaaaacaagaggcgagcttaaatgctttggaaaatgatttacaggcgatactgatcactaccggacgacgctctagcacattttccaaatctgggacagattcgactatagcgaccaatgtattattggaatccatccagacgagtccacagaaaaatacccatctcatgacaaatatctccgaagatgattctgcatcaaatacagataccaagcctatggaattttcgtctgttggcattgaatcgagtgccagtaacagcagttcgtttgcagatgccttgtgtgaaccggcaaacagaagttcgccttcccataatccatattcagggcaatgcactacgatagaagaccgctatagacgctcccggtttgctagtcaaccggactcattacttggctacatcaatgagaacggtaataaatacatcttttcaccaggagagaccgcagaagatgcatcacctaaaaaggatatggaaacgctgaaaacaaaattcatgaccactaaggaacctccggtatgcccatcaggcaatgatgcagaccttgcactcattatttcaaagctgaaagagacaaatccttcagctgagagaatagaaacagagaatccgaacgatgatgcaaataatttaacccctccagcaacctctagttcaaataatgaaaacagttcagatccagttgcagttgcacttatgaaattagaagggacatttgctaagcccgccaaagaggacaatactgcttcgaaattgaacagcccacgtagtagtgtgttagcaaaagaagtcgaaaagcttgatttccaaaaatggcgatttccctcttctaagactatgaataaacgacaatccatgtttatcgaaagaaggcgtactatgacggacatattttcctctgctacagaggacacttcttctgaagaacaaagccctaaactgtcagaccgtgaaatacgggagttgctagaaacctacaaactgcaagatccgagactaaacataaagaatgttgaacaccatgtcccatttattttaatgtatgattcatgttccatcgctaagcaaatgacgttgattgagcgagaagtaatgaatgaaatagactggaaagacctccttgaccttaacatgaagaagtccctaccaagggtgacgagttggcttcagttgttattgcataatgaagagttgtcaggcatagatcttgcgattgctaggttcaatcttactgttgattggataatttctgaactggtcatgactacggatattaagctacgaagaaacgctattcaaagattaatccacgttgcggaacattgccgaatgtatcaaaattataataccgtcatggaaatagttcttgcattaaactcggtcgttgttcagaagtttaccagctcatggcgcttaattgagccagctgacatgctcacatgggagcacttaaaaagtatcccaagcttggaccgcaattatcacaacgtgcgcaacctactcaacagtattgatcctattaaggggtgtatacccttcttggtagtctacctctcggacctggcattaaactctgagaaacgcgactggattgtcccaaatgaaattgttaactacaataagttccagactaatgttcaaattgtgaagaacttcatacagcgagtccagtgggcaaggttttatgatatacgggccgacgaggacttattgagcaaatgcgtgtatatcagtgcgttgtctcatgaggaaattggatatttaacttccttttaataatgctggatggctgtcactccttttgtaaattcattcatatgtgatgtctatgaccgtcggatcaaatttagagtactttatttaataatatatatcataatataataaggacaatacaaatatatatatgtctttgtaataaagaaaacttcaagtttctagaagaagttccatgaatcacgttctgtagcaataagagagcttaaagataccacaaatgaagcgtgttctgaaacttaccaagttctttgacgttcactagtgtctaaaattgtctagccttctttaaaagacgcaagtacatttcatgcatgtatatattgtgtttaggctaagcatatatagcctatattcatatctaaatgtgtttaggcacagatcaaaaatacataaatcatctcattcggtgaaatagtccacttccgcttggctcgtgtaataatccccatcgttcagatacttcaaatcctcaacgggtctctcgccatgaggagtgattctgacgccatgtctagaaacaggctcttcccaatcaatgatggccgaatggttaacacgcctattgtcccagacagttacagtaccaggttcccagcttgcccttaactggagatcatgcgtgttctcgatgatattatatataaaatctagcagcagatcggattcagtttgcttgagctccacaatctttcttgtaaaccctctattcacgaagaagctttttgtcttgagcacaggatggacacgcactaatggatgaatgtgtgcgaccggttctctccgttgaattccaccctgttcttgcgcattctgggcttgctctttagcgctatgcagtacgtgtagcttactcagaaagtcctgaagaggaggcgaaagcctattaaatgcttccgtggcatcgctaaacaaagtatctcctcccccatcgggcccttctagaactgtgaagaatgtgtaagacggtggttgtaactcatatgacacatccgagtggaaacgtatggagctatggtggtcacggaaaaccctctcaaattcctttctgtcggggcgtctaaatgtgacatgtagatatggatggcctgcaggagcgccagaggtttggtgaacatgtaattttccgaaatgggaaccatactgctcgaagtaacccgggcccttggatgcaaagtcctggtctctaaagactaagactcccctttgtgaagccaacagtgccaattcgtcctttccggcagcatccaaggaggaaagttgcaagccacgaacctcgcttccgaaccggggcgttattttagaaatttggacgttctcattcaaaaacctcggtaactgaggatctgctctgagagcaggatccaaatacttatggaatactaagggcgggtacttttgcgaatgatcccaagttggaagaaatttggggaacttcgaatttaaaatataacgatttgccaatcttaatattccgtcgtcgccaacctcatcctgttcagcaaaaaaatgggtatcaaaattaccattagcaccattcccagctcctactctaactgtcatcttgtctagtctactctttaaaatgaaggccggcaactactgggcctacatcagacttatatatctgcacgtattacatatttgatctgtggttggtttgtcttgcgatagctagtaactcataacaaagtattccgaccatggctctctgtgtcttccatgcagacacggagactcggtgcttcttattgctcctccgcatgaacgtgacagcggtcaccgtcttcaagatagcagtattatcacgtgacctatatatccacaattacctacaggaaattattctgtgggctaagtcttcagtaatagacctgctaagcaactacgcagcagtgctggtgttgcgtgcgttgaacgcaggagccacatcgtgacccaaaattatgaaaacgacaaaatggctaccataagctagcgactacaaatgaggtatgcagacaaaaaaagtcacagcagcacagtgacttcgaggactactcgtaaggtccacgttgactacggtccgtacaatattttacgacaagtgcagcctgaaaccgcatttgcaactggaaatgttgtttgaccgacaaaaacctgaacatagactacaaataaagcaaatttgtatgcacccactcttacatattacttacgaaccggtttgcctctgcagcaattaatagccttccctctgtcgctagccttcccttagtcactagctttccctgagtcgctagcgtccaagcaccagaccccccactctgcacagtgcagcctaacaaagaggtgaaatttgccccccccccccccccccaaactcgtcacaaaccttacacccagggacacaagccacagccgagcgcatacatgacattctgcactgcggctcattctgcaggtgataggctgcccgagatttcttagcaggaatcctagcaggaatcctccggccgatctgagaagcatttcgatacagctttttctgaccagcaggcaaatacaggtcacggccggtgcatgtccatgcttagagcttctccttttaggggccacgaacaatgcccaggtggtttcgcacgtcgtacagcacgaatcgcgtatggtaacgggatgaaacatccagtaggcgcagaagggcggtatctgataccggaactgttgtgtaacaccgtatgcagtaggggcgttgccagcgacctaaacagccgcgcgagtgtacggatccagcttatcatgctcaagtggtgagatgtctacaattctacctgggttgccttccacgaattagctacacacacacaagtagctaataaaagcgcgtatacaaacgttggcaagcggctaggtgacacttgtctttgtagcccaagctctaccccgcagcagttcgatattcttctgctgaaagagctgtgaggatagctttcggaataatggtgcttctcgcaagaatagtaggtgggcattgttgcaccgcatcggtgcgcacgttacaaatatcgtctgcgctttgtatgacctgaagatatttgggcgtgaatgcaagcgctttattctcgacatcagcaagcaggacaaagctgcggtcgatgaattcgggtcgtgtgccgattttggtttgctttctaagttgcggcgcagcggcttgcaacccacaaattggtggggcttatgaaccgaagctaagtccgcaacagatgactaaggtctatagagggacatgttcctagctttgcgcgatccagctacaggcttccgcatcggcaaaagagcacaggtcatgggtgatagaatggtccggatgcgaaaagatacacatgcgccttggatataaagaatcataatccaacaacgcacaggcgacagcctgctggcgtctgttgatcaacgacaatgacaatcgttaagatcatcgtatgcactcagttgtattctagcatagcccgtgcgattgccgtgatttcgaacgatgatgacaggcaaatcaccatgaggagccgaggattctccgctaaattcagctgcatttgcaacaaagatggcgtgtttctatgcgagccccttcacacgggcgtaaaacatgttcgaaatgctgctcgctctgccttgcgctgcgtgtgccctcagccagacggtctgtttgcttctaatgtgggggagagtcgttctactcacgtgttcagcgtgctgaataacttgcctatccttacagctgctgacctgaggcaatgcacgtttccaagtccaatagtctacgggcccgaaggttgtcgcgaatgcacagtgatcggtaatctattactacagcccactgcaagcgtacagacaacctacaatgacggcgcgttgtacaataaaatcaattccgcttgctcgaccgttaacccaaagctataccgtaccttgtgtccttccctgtttccattagccgttgcatgtgcttttttactgtgattacagagcctttctgtagaatgtgtacgtgaatttaatactagagagctataaagctctcttgttcttgtaatgtctgtttcagaagataaaaggtaacaccagaaaacgaggtacgacccaaacggctattggactacgaactggacaaaaactaagagtcgtaagtaagaaacttgcttggatcttacaagataaagcacaatccatgaagcagatttccccaatagtgcatcacgctgagagccaccatattcggcgagtgttatggtattttacagatgattactctttgccgcgccagaattttctttaacgcacgaacgtcagcgtcagtgtcattgttctgcacaccatgctagaaaatcatcgatagactgaagagtagcctgtatttgtacccgaaaattagtttgtccttttatttaatttacacgaaagacaggtttcatgaactcggaaagtaaatctgccttcttgtaaatatagcgtttttaaaagctacgctaataggaatcaaatgagatatatttagcccttagcctatatattatcaacagcacaaaatcccctgtagaaccgactataacataacatactgtagtgaatatgaggcaagaagtggtgatcatcaacatgtttttgatccatccccatctctactttttatgtcagctggtttattggtagttatacattggaagcataaaaaggtattaatttaagttgcctcttatttgtattaccggaaatattcattttcgcttcattttccgggcttacttccattcagatatgagtcttgatactttattagggcgtatatgacctcctgtttgaaagttagtaaaaacctacataattataatcattaaatacttattaattcatttgattcaggtttatgaacaaatctataggcctttggctataaccaaggcgtttttgaattaagactaaagctctagagacggtaatatcctggcctatatgggagaataaggaggtttcattagtttaggctacgtatattttagttcttgacaagatctttctacagttgcaatctgagaacttagacgcatcttactttatatcttgcagataatatgggcggagatatgctatagtacgatgtatgcctagtgcccgggactccggttgtaacctgctaattgaggggagctccaggtattattaatggggcattgaggtttctattctcatcagttattgagtagtaactaccgtcaccttgagcttgtgattaagtgactctgactcgttatttttaaccgaaggcattaagttgcttatgaggcatgtctttccgagtatgcgccccggcattataggtgcctatgaaaatcctacgagatcatcttggaagtttttgtacggatatttctaagagatttactttatttatgaaggcacagaagcgcatattttctcggggttacgcgacataatcttccgcgaagtgtccggcttgaaaggtgaacccgaagagggcctcacaacacctcatcaaagcattagaaagttaatattcttgaggagggataatattcctgagcgggctcgatacggtcaaagcaagatggtttagtgccgtgtaccaaactgtttttatatcatcagctatatattactactagacccaaatattaccaaagcgctaggatgcctgtccgacaccagatgaagtggcacatcgacatctccctatctgttggatgcctatggactggaagcgataaatatccaatgttcatacgcgctatcttactggccattcagtatgctcaactatttattggggagaattcacgaagagagatttacaatttgatctcagggaaaatagagccgctccttgatacctgggctcttccattacacacctatctctttttgcatatctgttactactttacactttccatcgtcagctttgtgggctgacataatactgctatatccactacatatgatctcaagaaatacacattgctgctcgtgcgcactaaacagagcaaattaacaaagtagaaacccatgcccatcaaatgctagcagttgcagaagcttccaaagaatagagaaaatatagaaaagatactgtcacaatctattttcggtttacatataaatgggacataagtccattgtttttgcgtttcttgggaggttattgtctacggttgtcattttattgtagatcccttgtaatgccagataaaaaccggcttcaagaaattaggcctcatcatcgccaccaagtctgagctaaggttgttgctcctggccgtcgtcgccaccatagtctttccgacattctggatgccagcgtccatcattgcaatcaggtttctggtcacggcgctcaatgttaccatcataaggcctttccactccaatgcctagtcctttttgcaaagcaggtcccagagcgaggatagagcttgcacttgttaacaaaaagatagcactggataatttcatctcgcacactatatagggatattcaatttagaaatctatcccccaagaaatgcggtgcttttatgccattcattgtaaaatagacggcttcctatttcatatcgttgcctgcacatgtggtggcgcaatggtgaatcttcataagccaggctaaagtgacccatctgatgcacccccaatggctttactcattcgttattcttgcccggaaacagcatatattccagcccttcatagaactcatgtaactagcagtttaaaggagtccagcattccctgatgaagcatacatgccactctgcttactccagtaaattatgtataacatcaccacattttcatgtactaaaacctggcactttccgatgcgaaaatcaccccagctgttttaccgatcgaaaaacaatggaacttattatactggcattggatatccttattatggaggaatacacaaatttgctacttcgcgcaccctaactcggaatccacagtgctgaattacggacactatagtgcggcgagttcatctggtataaatgggattatcgtttcacaggtctcaaccaagacggcgatttaaaaaacggttagtaattactattaggcgacctgcattctttatcggggccagggcgtgcacagaacacataggacgccaataagaggtgtctcgagagccttaaatcatttgctgcacacaaatatactggtcgtttcgggtagtgaagagtcgcttgctgatagtcaccattcgagtactggcgaaaagattcttgagaccgcgccgggccttttttgattcggaagtttaattgaaggactggtatggattcggcaatgatgctgtattataagaccggtttttccgggaaattcgctaatttgtatcttgttctaaatgggaattacgatatcgatttccttgcgactagctagcactgaatctagaataaaaggatagtcatatgcagggcactcgcaagtcgaaatctaaaaacaataaaattatgacacattcttatgtaaactgaatatagataatataaatatattttctatgttttctctctcctctggcagcttctgcgagtcacccccgtctggtgcgttcccttccaaatacagatgagatcgcactacaaaacatggggctctcagcgcttagacatccaaccttaaccagcaggctcgcaggtacttcagttactcacttcccaactctcaaagcgattttttactagtggtaaggatacgaggtagcatgggtttctactttgttaaagctcctctgttcagcgtgcccgagcagcaatgtgtatttctcgcgatcatatgtagtggatatagcattaatttatcagccccacaagcctgacggtggaaagtatgaagctgtggtaggctttcaaaaagagatacatgtagattgaaagggtccagatagaaaggaacggcccttccatgttctttgagatcaacaggaaaaaagtgtggagcagtgtgaaacgcaatgctcccaaacaagagaatgcagtttccacaagtacgcgactgtacagtgcagacttgccaaaactctcacttttaaccaagtccaggtatgacctgacaaccataaataccaggagaggatagtaaaatataaagacaaaagggaccgccatgactagtttccgttcaaaagatttgaaccggagctcagcatccgtgtcagatacacgagcagaaccctcgaaagaggatgctgcctctttctctttatgcagcacacgtttgaaggccagtttgaaggttgcaggtaccgaaacccaggccacgaccaggcacatagcacggacctcccaagtagtatgttttgcaatagcatccagaggcccgaacttaactgatggaaagaggtttactaagcaaccactaacacacagtaactctggatcaattgctagcgggtatattgaacatagtaccaaagccgtgaacttccatcccttcatcaggcgcccagccggcaccatcagcagtatcattaacccaaactgtatgcaactgcaaaatatataaggttcgaagacggaagtgaactccttcacatgttcatcttggggcagttgccggggtatggccaaaactaagtaacagaaagcaacatggccgacgcagaagaatagccaggatatggccagtctgtaatggaatcgtttcagagaagtgtcttttacttcatcaaccttatgcttttcgatgaggggcctgctctctatctcgcgcagcatgtcggcgattgcgggcagcgggccagtgtaaatagcagattcagctggcagtttttatggcgaacgcggggtgactgccgcgccaggaaacgcacgatggtgtcgacgtacgaatggcgcacagtccgcctctccaagtctttctcgttggtgcttccccggaaccctcagacgtgtacgcaggcaccccaccacatatatctcgcagcgggtggcttcgagaaggccgcgcagcacgcagcccccagatatctcgcatcatggcgatccggacagttactccggcgcgcgcactccggaaaaactagttgcacggtagtgaattgacagacgtgcaggcttggcatgtacacccactcgctattagtccgtggccaatgtagcttgcgcggcacagctgagcgtatctctgcgtgcgcgactgaaagataggagacctaacgcaccatctatgtagtacctgaaccgatatataggttaattactataaaatactatactttatgacattagattttccaggcggaaagtgccgtttgcggttcaagattgactaggtgtggcgaggctacaaaaaaccaccctaacgctctggaatgtggagtttatggggccgttagcgaagactgcgggggatggcgtgggccgtggtagcgcgatgacacggcggtctgccataacggtttggtttcggtgtatggagggacaaccccggacaaggcctgcgccgtctacgctgggcactgtgccttcactgtgccttcagatgcagggtagttctccacagagagctctgcacaggctacttctcagatttcaacgcagggcactcctgccggcggctagtttttccgggcggtgtattcgtgggcagggctcgccggacaggggcagaggcagagtcacgtaagaagggcagatgatgaaggcagggtggagatagagggtgcagagaatagagggagggcagaggcagacacaagcactggcgcgcaacaggcggagagaggacagtcgcagaggcaggacgcgtgagggagatcgcgcgcgcgtggaggcgcgcagcaggcgggtctctcagtggtgcacggggtgcacactctggggagcggcgtgcgcactccgcacaacgagccgccggggccttgccggacaacggtatagcagtcctcagaggtatagcggcagtcctcggagatatagctacgactatgatgatcaggaagctgagtacgagtaaggcccagacacggtttcggccgtgatgatggcaattgcctttggaaaggagcgatattggtgatggatccgcaccaacacacttcaaatgcttggattccttctatcttcaataagatgacaagcatggacagcgcgctctcaaaaaataaatataaaccaataaatctatgacccatttatatgcaagcaaaacatagattatagcaatatatgttgtctatgtttggtctgttctccgaagcctctgcaagcggggttcgatggccggatatatgagcagtattcttcgcgggctactataatgccctgtccgacaaacagcgctcatcgtagaatacaaggcctgctgagagctacgcggcgcgcagcgcgatatgagacagccgagcgccgtgtcgggtgcaacagtaacttgcgaaggttgcgaagaatatgccgcggcgtgcaccactgtagaatacctagccctgcgtgactcgcttgcatggataagccaataaatccgcgaaaccacgagaaatatgcctgtgctcggtgtgacgtatggtatggataaggctgcacgagcgaaaatctgagcgtagctctaagcgcatctggcggagatgcgacctagcgcatgcccgcaggttagcgaggggcggtgtagcaaggggcctgtgtgggactagtgtaggacgtaaggaacatatgctggctaacggtataaaaggggctggtccgcggtagtggccgctcctggatgtaacagagtaagccgctacaaagagagatgaaagtattccaacttgcagctttaactggaatgttagcgacgagcgtgtgggcttaccctcatgagtgcatcgcatactggcgggctcaagggatgagcgaggaatatgtctatcgccggtgcttcgagatttggtgaagcgccgagaagcgtggcgcacagctatgtagtacctgaaaccgatacatagataattactataaaatactatgccctatgacatgagattttccgtcagtgaaagtaccgtttgcggcggtctgccataacggtttggtttcggtgtacggagggacaaccccgacaaggcctgcggggtctatgctgggcactgtcgccccagatgcagagtagtctgcacagagaactccgcacaggctgcttctcagattttgacgcagggcactcctgccggcggctagttttccgggcggtgtattcgtgggcagggcaggtgcaggcagaagcagcagcgcgcaacaggcatatgaatgtggtgtatgggtctctcagcggtgtggtgtatgggtctctcagcggtgtggtgtatgggtctctcaacggtgtggtgtatgggtctctcagcggtgtggtgtatgggtctctcagcggtgtggtgtatgggtctctcagcggtgtggtgtatgggtctctcaacggtgtggtgtatgggtctctcagcggtgtggtgtatgggtctctcaacggtgtggtgtatgggtctctcagcggtgtggtgtatgggtctctcagcggtgtggtgtatgggtctctcagcggtgtggtgtatgggtctctcagcggtgtggtgtatgggtctctcagcggtgtggtgtatgggtctctcagcggtg

SEQ ID NO: 66 - DNA, 5781 bp, Ashbya gossypii
atgtcgtacccgaacgaccctaaccagcaccggtacgagccgggcgagcaggggggcgtgccgcacggccagtcgccgtacgggcagcagccccagtatgaccagtacgggaacgtgtacgacccgcagcaggcgtacgcccaggatggcgcgtactacgaccagacgggcaacggctactatgatccgcagcaggcatacgacccgcagcaggcatacgacccggagcacggcgcatactacggccagccgcgcggcgtgggccccgagggcgagaacttctcagacttcagctacgggcccccgggcacgccgggcggctacgacagctacgcgcagggcgggggcgtggaccagtacaccccgtcgcgcatgagctacggcggcgacccccgcacgtccggcacgtcgaccccgatctacggaggggcgggcttcgacccctcggcggctgcgatggcgctgcccgcagacccctacccggcgtggacggcggacgcgcagtcgccggtgagcgtcgagcagatagaggacgtgttcatcgacttgaccaaccggttcgggttccagcgcgactcgatgcgcaacgtgttcgaccacttcatggtgcttttggactcgcgcgcgtcgcggatgtcgccggagcaggcgttgctttcgctgcacgcggactacatcggcggcgacacggccaactacaagaagtggtactttgccgcccagcttgatctagacgaccaggttgggttccggaacatgaacctcggcaagctgtcccgcaaggcgcgcaaggcaaagaagaaaaacaagaaggccatagcggagaacgtggcggacacagaggcgactttgagccagctggagggcgacgactcgttggaggctgcggacttccgctggaaggcgaagatgaataagctgacgccgttggagcgggtaaggcagatagcgttgtacttgttgatctggggcgaggcgaaccaggtacggttcacggccgagtgcttgtgtttcttgtacaagtgcgcgtcagactaccttgactcgccgctctgccagcagcgcgcggagccgcttccggagggcgactacttgaaccgcgtgatcacgccgatataccgcttcctccggagcgaggtctacgagattgtggacgggcgctacatgaagcgtgagcgtgaccacaacaaggtgattgggtacgacgacgtaaaccagctcttttggtacccacagggtattgcgcgcatagtatttgaggatggaactcgtttgatcgaccttcccgctgaagagcggtacctccgtctcggggatgttgcgtggaacgatgttttcttcaagacatacaaggaggtgcgcacgtggctgcatatgattctcaacttcaaccgtatatggattatccacggctcggtctactggatgtacaccgcttataacgcccccactctctataccgcccattaccaacagcttttgaacaaccgtccagtgccatccttcccgtttgtggcatgttcgttcgcaggaacttttgcatgtatcgtccagctactggccacatttttggaatggacgtacgtgccgcgtaagtgggctggtgcgcaacatttatctcggcggttcttcttcttactcatgattacggcgatcaacatcgccccaccggtctttgtgattgcctattctggagacctaagtacctactcgaaactcgcatacgcaatttccgttgttggttttgtcattgcattgatcactgtgattttcttttcgattatgccattgggcggcttattcacatcttacatgaagaactctacacgaaagtacgtggcttcgcagacctttacggcatctgttgcgccattgcacggaatggacatgtggatgtcttacttgctatgggcagccgttttcgctgcgaagcttgctgaatcgtactttttcctaactctatcgttgagagacccgatcagaattctatacatgaactactccagatgcgtaggtatcaaatacctaaacaataggctatgtccatatcagggccaggtcgtgttggtgctaatggtgatcacagacttcattttgtttttccttgatacctatatgtggtatatcgtctgtaacacagtcttctctgtgggcagatcgttttacctaggtatttccattttgaccccttggagaaacatctttaccagacttcctaagcggatatattcaaagatcttggctactactgacatggaaatcaagtacaagccaaaggttttgatctctcaggtatggaacgctattgtgatttccatgtacagagaacatttgttagccattgaccatgtgcaaaagctcttgtaccaccaagtgccatccgagatcgagggaaagcggacacttcgtgctcctacattctttgtctcgcaagatgacaataactttgaaactgagtttttcccagcgaattctgaggccgaacgtcgtatctcgttcttcgcgcaatctttggcaactccaattccggaaccgcttccagtggacaacatgcctacctttaccgtgctaactccgcattactctgagagagttttgttatctttaagggaaattatccgtgaagatgaccaattttctcgggttacgttgctagaatatttgaagcagctacatccggttgaatgggactgtttcgtgaaagatactaaaattttggctgaggaaactgccgccttcgaagggggcgatgaagaggatcctgagaaggccggcggcctaaagtctcagattgatgacttgccattttactgcattggtttcaagtctgctgctccagagtacactctgcgtacacgtatttgggcctccttgaggtctcaaaccttgtatcgtacggtttcgggtatgatgaattacgcaagagcaattaagctattgtatcgtgttgagaacccagagattgtacaaatgtttggcggtaatgcggagggtttggaacgtgaattggagaagatggcgagaagaaagttcaagtttttggtgtccatgcaaagattggctaagtttaagccgcatgaaatggaaaatgcagaatttctattgcgtgcttacccagatttacaaatcgcttatttggacgaggagccgcctttgaacgaaggagaagagcccagaatctactcggctttgatcgatggtcactgtgagctgatggagaatggtcgccgtagaccaaagttccgtatccagttgtcgggtaatccaatcttaggtgatggtaaatcggacaaccaaaaccatgctttgatcttctacagaggtgaatatatacaactagtggacgccaaccaggacaattatttggaagaatgtttgaaaattagatctgtcttggctgaatttgaagaattaaatgtggaacatgtcaacccatatactccaactctaaagtatgaagaacgtgaaaacaaccatcctgttgcaatcgttggtgcccgtgagtatattttctcggaaaactccggtgttcttggtgacgctgcagccggtaaggaacagacatttggtaccctattttcgcgtactttggcgcaaattggtggtaagttgcattacggtcaccctgatttcatcaatgccactttcatgactacgagatgtggtatctctaaggctcaaaagggtttgcatttgaacgaagatatttacgctggtatgaacgctctcctacgtggaggccgcatcaagcattgtgagtatttccagtgtggtaagggcagagatttgggttttggtacaattttgaactttacgactaagatcggagctggtatgggtgagcagatgttgtcccgtgaatactactatttggggacgcaattgcctatcgatcgtttcttgtctttctactatgcgcaccccggtttccatttgaataacttgttcatccagctctcattgcaaatgtttatcttgactttgatgaatatgaacgcgcttgctcatgaatctcttttctgtgagtatgacaagaacaagcctatcaccgatgcattgtcgcctaacggttgctacaacttggcacctgttgttgactgggtcagacgttacactctctctattttcattgttttcttcattgcgtttgttcctattgttgtccaagaattgattgaaagagggatttggaaagccattcagagatttgttcgtcacttggtgtctctatctcctatgtttgaagttttcgctggtcaaatatattccgcttccttggttagtgacatgacttttggtggtgcacgttacatttcgacaggtcgtggctttgcaacctctcgtatacccttttctattctttactccaggtttgctgggtctgcgatttacatgggaggtcgctcgatgttgatgttgctcttcgcctctgttgcgagatggcagcctgcacttctatggttctgggcttccatggtcgctatgattttctctccatttattttcaacccacaccagtttgcatggcaagactttttcttggactacagagactttatcaggtggttatccagaggtaataacaaattccacaaaaattcttggattgcgcatgtgcgggttgccaggtcccgtgtgaccggttttaagaggaaactcattggggatgagtctgaaaaatcgtcgggtgattcggccagagcacatagatccaatattttgtttgcagaagtgcttccaactttggtatatgctatcggttgcgtaatagcctatgcatttatcaactcccgtaccggtttggtaagtcgtgctgaacctcctcctaaaaccattcccatcggtaaccctctcataagacttgcaatatgcacactactgccagtcgtcttaaatgcaggtgttcttgctggtatcatgggactttcgtgttgcgctgggccacttttaggcctgtgttgcaagaataccggtccagttatggcagcaatcgctcatggtgtgtctgtaatcgggcatattatcgccatccttgcaatgtgggtattacaacgtatgaacttggccagaatgttgatgggttttgttactatgatccagtgcgaaagagtgctattgaaattgttgactctgattttcctaacccgtgaattcaagaatgatcgcgccaacgcctcattttggagtgggaaatggtacagcgctgggctaggatatatggcttggacgcagcctgcaagagagtacgttgtgaagataattgaactttcagaatttgctgcagacttcttcttgggtcatatcattctattctgccagctaccagtattgtgtgttccacagattgataagttccattctatcatgttgttctggttgcggccatctcgtcaaatacgccctccaatttactccctgaaacagactaggttgcggaagcgtatggtaaggaaatacagtgccttatacttcttgattttaatctttttcgtctgtctcatcgctggaccggctgttgctttcaagcaaacggaactcaaacacaaagaaaaggatactgatggtaatctaggtgaaagcacattcttcaacgggtttcttaatgataaatttggccccggaggaatgtcaatgttagccaatgtgttacaaccatatcagtctagcgatgctaccgacgatagttcacctagctttacttatgatacaggtggccaccagtacttcagcacgatcctaccagatcagatccatactacctggtcaaccaaggctccttag

SEQ ID NO: 67 - DNA, 5763 bp, Aspergillus clavatus
atgtcgggatatcaacaagggggtggccattacaatgatggctatggccatcaggagcatggcgactcctactatcaggacgatcatggtcaggcatactacgaccatgagtacggtgatggttactatgatcgatctggtcagtatggcgcggacggcaacaaccatggcaacagcaacaacaacaacaaccacaataataacaacaattaccagcatgatggaggatactacgatgccgctcaacaccatgacgactactatggcgaccaatattatgaccaaggaaatggccaggagggctatgaaaccaggggaagacgcagaggtgattccgaagaagactcggagacattcagcgacttcaccatgagatctgaaaccgctcgtgcggcagacatggattactatggccggggcgacgaacgctacaacagctacaccgacagccagtacggtggacgcggctacggataccgtccaccttcatctcagatctcgtatggtgccaaccggtcttctggggcgtcgacccctgtgtatggcatggattacagcaacgcactccccgctggtcaacggtctcgggagccatatcccgcctggtcatctgatgggcaagtccctgtttccaaagaggagatcgaggacattttcctcgacctcgtgaacaagttcggtttccaacgggacagcatgcgcaacatgtacgatcatttaatgacgatgctggactcacgcgcctcccgaatgacgccaaaccaggcccttttgtcgctgcatgcggattacatcggaggcgacaatgctaactacagacgttggtatttcgctgctcatctggatctggatgacgccgtgggctttgccaacatgaagctcggcaaggcagatcgcaagacgaggaaggcgcggaaggcggctaagaaagccgcgcagcaaaaccccgaaaatgtagaggagacactggaggcactcgagggggacaacagcctcgaagctgccgagtacagatggaaaactcggatgaaccggatgtctcaacatgatagagttcgccaactggccctttatctgttatgctggggtgaagccaaccaggtccgattcctgcccgagtgtctttgcttcattttcaagtgcgccgatgactactacgcctcacctgattgccaaaaccgagtagagcctgtggaagaaggtacatacctgaacgatatcatcacgcctctctaccagttctgtcgtgatcagggctacgagattgtcgatggaaaatacgtccgccgggagcgtgatcatcatcaaatcattggttatgacgatatgaaccagctgttctggtaccccgaaggtatcgagcggatcgcttttgaggacaaggctcgcctggttgatatcccgcctgccgagaggtggttgaaattgaaggatgttgtctggaagaaagctttcttcaagacttacaaggaaacgagatcatggttccacttgatgaccaatttcaaccgtatctgggttatccaccttggtgctttctggttctttactgcttacaacgcccccacactttacaccgacaactaccaacaacaaatgaacaacaagccccccggttacagacaatggtccgctgttggtttcggtggtgcccttgtgtctttcatccagatttgtgccacgatatgcgaatggatgtatgtacctagacgctgggcaggtgctcagcatctcagcaagcggctaatgttcctgctcctcgtcttcatcatcaatctgggtcctggtgtgttcgtcttcgcctataataagagcatgggcatcagcgcgacgattcctctgattgtcggtattatccacttttttatcgctttggctacattcctctttttctctgtcatgccacttggtggactctttggcagttacctgaagaagaatggacgtcagtacgtggccagccaaacgttcaccgcaagctttccccgcctccatggaaacgatatgtggatgtcttacggtctctgggtttgcgttttcggtgccaaactcgcggaatcgtacttcttcctgactctgtctatcaaggaccctatccggattctttcaccaatgcagatccactggtgtgctggtgtcaagtacattcctaacgtgctttgccacgctcaaccgcaaatcctcctcggtctcatgttcgtcatggacttgactttgttcttcctggatagttacctctggtacattatctgcaacactgtcttttcagttgcgcgatctttttatctcggtgtgtcgatctggtccccatggagaaacatcttctctcggttgcccaagcgtatctactccaaggttcttgccactaccgacatggaaatcaagtacaagcctaaggtcctgatctcccaagtttggaatgctattatcatctcgatgtaccgcgagcacttgctggccattgatcacgtccagaaactcctctaccaccaagttccatctgaacaagagggtaagcggaccctgcgtgcgccgactttctttgtctcgcaggaagatcaatcgttcaagaccgagttctttccccctggcagtgaagctgagcgtcgtatctctttcttcgcccaatcgctttccacaccgatgcccgagccccttcccgttgacaacatgcccacatttacggttctggttccccactacagtgagaagattctcctctctctgcgtgagattattcgtgaagatgagccttactctcgcgtgactctgctggaatacctcaagcagcttcaccctcacgagtgggactgcttcgtcaaggacaccaagattctggctgatgagacttctcaattcaatggtgaaaatgagaagaccgaaaaagatgccgctaagagcaagatcgatgatcttcccttctactgcattggtttcaagtccgccgctccggaatacactctccgtactcgtatctggtcttccctgcgctctcagactctttaccgcacagtttccggcttcatgaactacagccgggctatcaagctcctgtaccgcgttgagaacccagaggttgttcagatgtttggcggtaactcggagaagctcgaacgtgagctcgagagaatggcccgccgcaagttcaagattgtcgtctccatgcaacgctatgccaagttcaacaaagaggagcgtgagaacaccgaattcctccttcgggcgtatcctgatcttcagattgcctatctggatgaggaaccccccgtcaacgaaggtgacgagccccgcctgtactctgcgcttattgatggacactccgagctactcgagaatggtatgcggaagccgaagttcaggatccagctgtctggaaacccaattctgggagacggaaagtctgacaaccagaatcactcgatcatcttctatcgtggcgagtacatccaggtgatcgacgccaaccaggacaactatctcgaggagtgtctcaagatccgtagtgttcttgcggagttcgaagaattgaccaccgacaatgtctcgccttacacgcccggcatcccgtccaccaataacacccctgtggccattcttggtgctcgtgaatacattttctcggagaacattggtgttctcggtgacgttgcagctggaaaggaacagacattcggtaccctcttcgctcgtacgcttgctcagatcggcggcaaactccactatggccatcctgatttcctcaatggtgttttcatgacaactcgtggtggtatctctaaggctcagaaaggtctgcatctgaacgaagatatttatgccggtatgaatgccatgatccgtggtggtcgcatcaagcactgcgagtactaccagtgtggtaaaggtcgtgatcttggttttggctccattctgaacttcacaaccaagatcggcactggtatgggtgaacagatgttgtctcgagagtactactatctcggcactcaacttccccttgaccgcttcttgtcattctactatgctcaccctggcttccatatcaacaacatgttcatcatgttgtcggtgcagatgttcatgattgtcctggtcaacctgggagccctgaagcatgagaccattatgtgccgtttcaactctgacttgcccatgaccgatcctctccgaccaacctattgtgccaatcttctcccgattgtggactgggtcaacagatgtatcatctcaattttcatcgtcttcttcatctccttcgtccccctggctgtccaggaattgacggagagaggcgtttggcgtatggccatgcgtctagcgaagcatttcggctcggtctcattcatgttcgaggtgtttgtctgccagatctatgcgaatgctgtccatcagaacttgtctttcggcggtgcgcgctatattggtaccggccgtggctttgccacagctcgcattcctttcggtgtcttgtattcgcgtttcgctggtccctcgatctacgctggttcacgcttgcttctgatgcttctgtttgcgacatccaccgtttggactgcgtctctcatctggttctgggtgtcattgctcgctctttgcatttccccattcctgttcaatcctcaccaatttgcctggaatgactttttcatcgactatcgtgactatctccgatggctttctcgtggtaactcgcgttcccatgcgtcgtcgtggattggattctgccggttgtcccgtactcggatcactggttacaagcgcaagcttctcggtgttccttccgaaaaaggatccgctgatgtgcccagagcccgtatcacgaacatctttttcagtgaaattgttgcacccttgatcatggttggtgtgactctggttccgtacctttacatcaactcccggacgggtaagaccgataagaacgaggaagcgtcagatgcgattctccgtatcgcgattgttgcccttgggcccatcggcatcaatgctggtgttgccggagctttcttcggcatggcctgctgtatgggaccgatcttcagcatgtgctgcaagaagtttggcgctgtccttgccgccatcgctcacgctgtcgctgtcattgtgctgcttgctatcttcgaagtcatgttcttcctcgaaggctggtcctggcccagaatgctcatgggcatgatcgctgccgctgccattcagcgtttcatctacaagctcatcattgcactggctctgacccgtgaattcaaaaacgatcaatctaacattgcttggtggacgggcaaatggtacagcatgggttggcacacgctttctcaacccggccgtgagttcctttgcaagatcacagagttgggttacttctccgcggacttcgtcctcggtcaccttctcttgttcatcatgctgcctgctttgtgtgtgccatttatcgacaagttccactcggttatgcttttctggttgcgaccaagtcgccaaattcgtcctcctatctactccttgaagcagtcgaagctccggaagagaagagtcattcgcttcgccattctttacttcgcgatgcttattctattcctcatcctgctcattgtgccacttgtggcccgttccatgggtctggcgaacaacttctcaattcccatctctggcctgatgcagcctctcgacaaggacaacaacgataccaaggcgtactacactggcaacaatgttccgcctggttttgagccggtcatttcgtcttcagcctcggccactgctaaatag

SEQ ID NO: 68 - DNA, 5697 bp, Aspergillus flavus
atgtcaggctacaatcaaggcggccattacgatgatggctacggccaacatggtggccatggggattcctattaccaggatgagcatcatggccaggcttactatgatcccaatgactacggcgatggttactatgatagaggcggttactatccggatggtggacatggttacaaccaggacggtgggtactatgacgccggccaccaggacgactactatggcgagccttactatgaccaagggaacggccagcaaaggggacggcgccgcggcgattcggaggaagactcggaaacattcagtgactttaccatgagatccgaaacggcacgtgcagcggacatggactactacggtcggggggacgagcgctacaacagctatgccgacagccagtatggcggacgtggatacggctaccgcccgccctcctcccaggtctcttacggaggcaatcggtcgtccggggcatcgacccctgtctacggcatggactacggaaatgctttgcccgctggtcagcgatcccgggagccatatccggcgtggtcctctgatgcccaagttcctgtttccaaggaggaaatcgaggatattttccttgacctggtcaacaaattcggtttccaaagggacagtatgcgtaacatgtacgaccaccttttgacgcagctagactcgcgtgcctctcgtatgacgccaaaccaggcactcctttctctgcacgccgactacatcggcggtgataatgcgaactaccgtcgttggtacttcgcagctcaccttgaccttgatgatgcggtgggcttctccaacatgaagttgggcaaagccgaccgaaagaccaggaaagcccgcaaagcggcccagaagaaggcgaaggagaacccggagaacgtggaggagactcttgaagcactagagggcgataacagtctcgaagccgccgagtatcggtggaagacccgcatgaaccgcatgtcgcagcatgaccgagtgcgtcaagtggccttgtaccttctgtgctggggtgaggccaatcaggtcaggttcttgccagagtgtctctgtttcatcttcaagtgcgcggatgactactacagttcgccagaatgccagaatcgggttgagcccgttgaggagttcacttacctgaacgaaatcatcactcctctttatcagtactgccgcgagcagggctatgagatcgcggacgggaaatacgtgcgaagagagaaagatcacaaccaaatcatcgggtacgatgatatgaatcaacttttctggtaccccgagggtattgagcgaattgtgctggaagacaagacccgtctggttgacattccaactgctgagagatggatgaagctgaaggaagtcaactggaagaaggtgttcttcaagacatacagggaaaccagatcttggttccacatggtcacaaacttcaaccgtatctgggtcattcacttgtgttctttctggttcttcacggcctataacgctccgactctgtacaccaaaaattaccagcagcagctgaacaacaagccacccggttcctactactggtctgctgttggcttcggtggtgccctggcatgcttcattcagatatttgctactatttgtgaatggatgtacgtcccgcgacggtgggcaggtgctcagcacctaaccaagcgtctaatgttccttctgttgatgtttatcatcaacctggccccgggtgtggttgttttcggcttcaagaagcagatcggcgaaacaattgctcttatcataggtattgttcacttcattattgctctggtgaccttcttcttcttttccgtcatgccgcttggtggtttgttcggtagctatctgaagaagcatggtcgtcaatatgttgccagtcagacgttcactgccagctgggcacatctccagggcaatgacatgtggatgtcctacggtctttgggtctgtgtcttcggtgcaaaattggccgagtcttatttcttcctgaccctgtccttcaaggatcccatccgtattctttctccgatgcagatccagcggtgctctggtgtggaataccttggaaccaagctgtgttacattcagcctcagatcctgctcgggctcatgttcttcatggatttgacactttttttcctggatagttacctctggtatattatttgcaacacggttttctctgttgcgaggtctttctacctcggtgtttctatctggtcaccatggaggaacatcttctctcgtctgccgaagcgcatctactccaaagttcttgccaccacggacatggagatcaagtacaaaccaaaggttctgatctcgcaagtctggaacgcaattatcatttccatgtatcgcgaacatttgctggctattgaccatgtccagaagctcttgtaccaccaggttccttctgaacaagaaggtaaacggactttgcgtgccccaactttcttcgtatcccaggaagatcagtcttttaagactgaattcttcccacctggcagcgaagctgagcgccgtatctctttcttcgcgcagtccttgtctactcccatgcccgaacccttgcccgtggacaacatgcccaccttcacagttctgatcccccactacagcgagaagattctcctgtcactccgtgagattatccgtgaagatgagccttactcccgtgttaccctacttgagtacctcaagcagctgcacccccatgaatgggattgtttcgtcaaggatacgaagattcttgcagacgaaacgtcccaattcaacggcgaaacggagaagactgagaaggatgtcgccaagagcaagatcgatgatcttccattctactgcattggcttcaagtcagcagctccggaatacactcttcgcacgcgtatttggtcttccttgcgttcgcagaccctctacaggaccatttccggctttatgaactacagccgtgccatcaagctgctttaccgtgtcgagaatccggaagttgtgcaaatgttcggtggtaactctgagaagctggagcgcgagctggagagaatggctcgtcgcaagttcaaaatttgtgtttcgatgcagcgttatgccaagttcaacaaggaagagcgtgagaacaccgaattccttctccgtgcataccccgatttgcaaattgcctatctcgatgaggaagcgccggaaaatgagggcgatgagccccgcttgtactcgtccttgattgatggacactgcgagcttctggagaacggaatgcggaagcccaagttcaggattcagttgtctggaaaccccattctgggagatggcaagtccgacaaccagaatcatgccattatcttctaccgtggtgaatacatccaggtcattgacgccaaccaggacaactaccttgaagagtgtttgaagattcgtagcgttcttgctgaatttgaggaactgacaactgataacgtttcgccttacacgcctggtctcccttcgtcggacacccacccggttgctattcttggtgctcgtgaatacattttctctgagagtgtcggtgtccttggtgatgttgccgctagtaaggaacaaacattcggtaccctcttcgcccgtacacttgccgaggttggtggtaagctgcactacggtcaccctgatttcctcaatggtattttcatgtgtacccgcggtggtatttcgaaagctcagaagggtcttcacttgaacgaagatatttatgccggtatgaatgctatgatccgtggtggccgtatcaagcactgcgaatacttccagtgtggtaaaggtcgtgatcttggttttggctccattcttaacttcacgaccaagattggtactggtatgggtgagcaaatgctgtctcgagagtattattacctgggtactcagctacctctcgatcggtttttgtctttctactatgcgcatcctggtttccatctgaacaacatgttcatcatgctctctgtgcagatgttcatgatcgtcctgatcaatctgggagccctgaagcatgagaccattacttgtagatataacaaggacttgcccattaccgaccccctgcgcccgaccttctgtgctaaccttgtgcctatcattgactgggtcaaccgctgtgtcatttccatcttcatcgtcttcttcatctcctttgtcccactggcggtccaagagctcacagagagaggagtttggcgtatggccactcgtctcgcaaaacatttcggctctttctcgttcatgttcgaagtctttgtctgtcagatctacgccaatgctgtccatcaaaacctgtcatttggtggtgctcgttatattggtactggccgtggtttcgcaaccgcccgtattccattcggggtcctgtactcacgtttcgccggtccttccatctacgctggtgctcgattgttgctcatgctccttttctccacatctaccgtatggagtgcggctttgatttggttctgggtttcactgctcgccctttgcatctcgcccttcctgttcaaccctcaccagttcgcttggcatgactttttcattgactaccgtgattaccttcgctggctctctcgcggtaactcacggtctcacgcgtcttcttggatcgctttttgtcgactgtctcgtactcgcattacgggttacaagcgaaagctcctgggcgttccgtctgagaagggatctggtgatgtccctagagctcgtattacgaacatctttttcagcgagatcgtcgcacctttggttttggttggtgttaccttgatcccttacctgtttatcaattctagaactgggactatggacaaggacagggatccgaagaatgctattgcccgaattgcgattgtggctttcggacccattgctatcaacgctggtgtcgctggtatgttctttggtatggcttgctgtatgggtccaatctttagcatgtgctgtaagaagttcggtgcggtgctagccgccatcgcgcacgctattgccgttatcatcttgctcgttatcttcgaggtcatgttcttcctcgagggttggtcttggcctaggtgtgtgttgggtatgatctcggcggctgcaatccagcgtttcgtctacaaacttatcatctcacttgccttgacccgtgagttcaagcatgatcaatccaacatcgcctggtggactggaaagtggtacagcatgggctggcactcattttcccagccgggtcgtgaattcctgtgcaagatcaccgagctcggctatttcgctgccgacttcgtccttggccatctgcttcttttcatcatgctgcctgctctctgtgttccctacattgacaagtttcactctgtcattcttttctggctgcgcccaagtcgtcaaattcggcctccgatctactctttgaagcagtctaagctccgcaagagaagagtggtccgtttcgcaatcctctactttgcgatgttgctcctcttcctcattcttctgatcgcgccgctggtcgttcgcaaactgaacatcaatctgcccaacattccaatgaacctcttacaaccccttgacgagaaacacaacaacaccatttcacagtataccggcaatggacttccaggtggctcgagcgggatcccggcgtcggttctagcttccgctacgtactag

SEQ ID NO: 69 - DNA, 365 bp, Aspergillus niger
gacgcgaatcaggataactacctggaggagtgtctcaagatccgtagcgttctggctgagttcgaagaacttaccaccgacaatgtctcgccctacactcctggtattgccaccgaagctgagaccccagtcgccattctcggtgctcgtgaatacattttctctgagaatgttggtgttcttggtgacgttgctgccagtaaggaacagacgttcggtaccctgtttgctcgtacccttgcgcagattggtggaaagctgcattatggtcaccctgatttcctaaacggtatcttcatgacgacgcgtggtggtatctccaaggctcagaagggtctccacctgaatgaagacatctacgccgg

SEQ ID NO: 70 - DNA, 257591 bp, Aspergillus niger
  misc_feature (16989)..(16989): n is a, c, g, or t
  misc_feature (21684)..(21684): n is a, c, g, or t
  misc_feature (22584)..(22584): n is a, c, g, or t
  misc_feature (25275)..(25275): n is a, c, g, or t
  misc_feature (25322)..(25322): n is a, c, g, or t
  misc_feature (27573)..(27573): n is a, c, g, or t
tgctgttgaatcgcggttacagcacacgctccagctcccgaccgaattcgatcgtcgccagcacctccggttaccttgcgcacggcgccaaccctgaggcaccaacctcccacccgtttaacggccgcttccacgaggaattcgatgtcgccagtcagcgtgactcggttgttgtggacggaccatccggcatgcagcgatctgcttcccaaatgtcacagacccgttccgcgaccccgacgcggaccagtacattgaagaagaaagcgtccctcagcaagaggggcagtatgcgccgcagcggtagcaagcgcagcttgcgcgcgggtagcgtacggagtctggttttgggcgacaaagaaaagtatggcgccgatggcgaagatccgaacagcgccttttatgttcctattcccacgaatggaagcccgactgaggtcctggcaaatcgctttcaatgtatgtcaacttgttgtcactggtttgggtctctggtatgctaattcaaggtagcatggcgcaaggtcctgaaggacctcattatcttcttcaaagaggtccagaagtcctacgaaacccgatcgaaattgttcctgtcagcatccaacattatgcaaaacacatcgcttccgcctacgttcctcaagtctggaggtctgtccgatgcgaccgagattttgcgcgattttcaccgacaaggatacctggaagcgaacaaagccgcggaggtggaaagcgaagtcgtgaaccagctcatgggcctgcgaaacgatctgcaaaagaagatcaaggaaatccggggtctctctggtgatttccgcaactccgtggaaaaggaagtcgacgccacccgcaagacggtccgacatttgcacgaggcgctgggtctggttgacaccgacccttccgcaacctccggcagaggcgatccttttattgttcgactgggcgtagacaggcaaattgagaagcaaatcgaggaggaaaactacctgcaccgagtatgtgcttcattagccaatttgtgagaggcagagtactaaccttttctaggccttcttgaatctggaacattctggtcgtgagctcgaatccatcgttgtaggcgagattcaaaaagcatataacgcatatgccagcatactcaagcgtgaggcagacgagacatacgacaccgtcgagaaactccgcgcggggccgatctccatgcctcacgatcacgagtggaactctttcatcgcgaacacggatgaactggtcgatccgcgcgttcctcttcgcgatgtggagaatatcacatacccgggtagggatcatcccgcggcagtggaggtccggtccggaatgttggagcgcaaaagcaagtacctcaagagctatacacccggctggtgagtatcactcgggatgaaggtcccatgtatcctagaatattttggctgacttggagtaggtatgttctgtctcctactcatcttcacgaatttaaatctgccgatcgagtcgcatggcaacaaccggtgatgtcattgaaccttcccgagcagaagctggggtcgcattcgcagccagactcgacatcgcacaaattcatgctcaaggggcgacaaaccgggacaatgcaccggggtcattcttgggtcttccgtgcggaatcgcacgatacgatgatggcctggtatgaagacatcgagagcctcatctcgaagacaggcgaggctcggaatgcatatgtgaggcagcatatccgaactgtgagtggcatgagttggcggaacagcagtgatgggatggatgaagacgaagcagaccgcacaccgtactctgcagagtcagcagtcttgcaccaggaacgcccgacgtctcagcctcgcgaaccgggcgggcgtttccccagtgacgtgcaaatagaccgccatttggaggctccactgtcgccctctagtggagagagctctggcgagagagatcttctggccgcagccggctccttacctgacggtcgggactctttcagcaatgatgtagaaatgggccagaaccgtgcgggcagcgctgcagcagcagctccagtggagagacacgatagctactatggcagctggatgggcacgtcagacggcggtcgacagagacagcttggccaacacacccagaacatgaatgacaaccgggaaagagtcggatctgatcgagggagtaccaccaatatatatgtggcggggcttgggtccacaaactctcgcgacccttctttgacccgccagagggagcgcggcgagagcacatcaaccgcaccaaccacgacgaatgtaaccgactacactcataccaccgtgccgacgtcgattgatgaacgggaagaatccgacgctcaagatgacggcctggtgggcgacggtgtgggcattacgaagcagcaatcggcggcttcggtcgacggctcattgcggacgccactgactggacctgtcacaaccgatccggcggctgcctcgcaaaccggaagcctcaggcgtcctccaccgcagtctaagaatagtgtttcgacgcttgaactgcagattccaggccattatcctcccaccggtatggctgcgtaagcaacaaccgtgctcttgcgtgctacaagaggcgcactgttgctgatttcctatgttaaccatttttctttgttgatttcctttgttcctttcctatgtacattattctcacgcatgcatatgtggatgtggtgaccttctgtcacatcagaaggacgaccactcacttccaaaaccgggagcgctgaagtcaggcaatgagcctactacgctgcgcccctaacgtttttgacatatcactttatcggcgttgcaatgtgacaggtggtggtaatcggtcgatggatggacggaccggatggacggctggatgatcaaggcgtttggtacaattctggataactggctggggacttgtttctttctttatttcttgcacttatgcaccgtttgcgatgcttggtttcttcaattctctgtacaatattccccgaccatttgaacttcttcaattcttcaccttatttctgcttcagctggttgatctaagctttctttctgcgtctgatacttggcatgcttgctgctttgcttgttttgaacctggtctggtcgtcgggagtttgaatcctcggatggatgcatgcaaacaaacacacggatcgtttgtctttgagcaggactttggatatctatctatatagcttgcgaatgaactgaactgaattcacaacatgccatttgggaagctaaatagggaggcgctactgactaccacctgctcttgtattccagcttctacctggggccaacaatggtcacctcaggcatattaataggcctcaggcgataactgcgtttgttaaaaaggcggtatggattctgctggttttaggcgtggtaggcggcgggcgttggctggtgtggcagtagcgccttccttttgatagtatacagcccgaaccatcaatcctctcaatctaacggcgccaacttacttaactacaagtgatttccccagtgaccatttgacccttcacaaatacatctgtgcaataaaaatacagcttcccaggcaagaacatatcaacctaactacttagtagtagtgttgcgcataaggtactgcggacttactgctgatagtggatgaataagggcgatcccagatggttggactagaatactttcagggagtactcatggaccctcctttgggcataatcaaccggatcgaacggtattgctgcggggatcttggcacgttcaacgacggctggcagagctaacatgatattgatgatgatgatgatgatgatgatgttcgtgtcagccacacaagaagaagcagcatgtattcgggatgactgacgagtgaaaagcaagagtctagtccacacgggatatatcctagtccaccctgacctaaatctcccaaatcccctgtcgatatataccactgcagttacgctgatactcatttttaagatctcgatgatagaatcaaacaattttatcgagccaaaactgcagcctcaagtaattgttcctaccttgaaacaactaaaggaaaagagggaccaacgcagaaaagaaaatcaagctgccctcattgaagctaattcaagatctgaaaaatgcgtgctctttctaccggaagttcgtaaggccaagactagctactgccgcgcatggcactgtatacataggaggcgcaccgggaagccaaatatccggtcttattatcgcatcgctttgagagcaatgtctgcacattctagtacggaggttaaccgcaagtcattggtctttcctaatagtggatttttactaggctctatcgaatactactatgtcacatgtttcgaacgattactgccttgtctccctaacttagttcgatatggctacctaaagatggacgactgtattgctgctccaccagatagtcatatctttacttctcggtcatactattgttattcttttccgtgaaacatctgagaaccaacccaggccaacctcggctattccaacactccgaaactcctttcccccggcacttactgtcaagatcagacaattccacaataccgacggggatctgctatgcttcaaagcgtaaaactccgtctcgatgagcttgtttggatttatttcgaaagggttggtgtcaggtagaaaatgtgctttctccggactctggcatgaccgaacgatgtatagctgggaggccatagcatgtatcatgactccaatcatctggccctcaagttcaagctttgctgtgttatagggcccatatatattatcaccggctaacgtatattcgatgttcaccaatttgatatccgattgagagtttctcccccaggtgctgataggcccctccacggaaagccacgaccatgttggagcactagaaggattgggcctcttgtgactttcgtcctttttggccaccttcgagctatttgcgtctgcccgccacaaaagtgagcccactagccaatccacccacataccagcaacatataaacccatcaggtcatcccggttaacttgctctgcgatagcttcaagtgcagggaggcgatctttagggtgtgtgattcctcgtgcttggtattgatcgatcaccgaaagccataacccaaaacgatccatatcactgccatactttatgacctgggcgtatctcgttttgaaattgttcaattgaggaaatctttctcttggatatcgatcagtgcccagtctcccgcattcgcaccaggagtcggatatgcattcccagactatctcctcttgggtgtaatgtattattcttctagcgagaaggcgttcttgaaaagcccaagcacggccaaagagtggcatactctggtcgttccaagcctgccacgagggttcatcgttttgccaaacatcatgccttattttctccctcacaagaataggaactcgtttcccacggttttcaagataggccaccttattcttcctatccgtatatataccggcactgtcatttggcgcatgtgtagctccgatcacaacatgtgcgttaccgtaaatatgccccatggtctcacaagctaactcccactcctccttgctatcctgaacgatgcagatagaatcgatccagacatactgacagccaattctcttagatatatcaattgcatgttgataggttcgcggaagtttcgaaatcatgataccttcagttgtgtgtgcctcaagattctgtctggttgttttaaagccaagagtgtttccccaacaatggcttagcgctgtatatctaggtgaatcggatttctcgacttgaaccaagtggacacacgactcttccagcgtactggatatctgtaaaagccttttagggttgaccaaagaattttcacgcatgcctttgcattcagggtggtcgctttcgcatctcttaatccacgattctatcagagcaaagcattggggcgcagcagagtcgtggcaccaagtgttcgcacttgggttatcttcaagggtaaccataagggtacctgttgtacatcagcatagtgcttctatttcatagaaagggaaactgacatggcgtagataatcttgaacttcaaattcaagacgaatgctgtcaattacaggttttgtaggctcgaaatatgttgaagattcagctgtattgataggagacggccaattcaacgaaagctcagcttcctgggtgtctgaaaaaagcatccggctcactttataataaacctgattggtattatctcgcggtaaatgggcccatttatcttcatagaggctggcacaattcctaaagaaaatcacaccattcacagcctttcgaaaatccagcttcaagctttctcaaggaaaaaaggccagccaataagagccatatcagtattcctgcagcggcagacttcacaatcttgcatgtttaaatatggatcggtgatgatctttatcaatggacgacgtatatgtgtcaatcaggagagtatatctgctgccgacgtttgacgcacagaatactcgttgtataacaggaaagagaataatgggtctgaatatgtttaaagctcagcttgagtactgtagctctcgtctcttaaaggtgagcgaagcgtgtcgtcagcataggcaagaagcgtatctaatctagatgacgtactgtattttagtagattattcttgtggagagatacacagcacaagagagggattggaatcaaatcctttggtggtatgaacactttgagtgaatgtatcttgatatgaggtcggggcacggctgtagaaggaggggaagacacaagagtccgacacctaatgtattttgggccggatgacttaacgaccttggagggcgtatgatgccagcctaaacatattcttatccaatgagacgtcgaaaggctttagcgaacgatgacaatcaaatcattgcacctgctgacttggcgcacgggcactgtcagtcattcgggatgctttattaatagaaatccggtccagtgtaatagtaactctacaagttgtactatagatcacaaaaacatcatcatagaatctcatcctatatccactcgtactttatacgaagcgcttggaataagttagctcttgaccaggagatgcatcttggccggtgtagaagggggatgtgcccagattaagacggctgagatgcggctaagtcgaatttaggtcttattgagaacaagagaatcatgagaaaatgagaccaggctacagttacggattgggacgagcagaaaaagatattctttctgggtgtattactggtttatcatagtgtaaactgactggtggagtaatgtgaacaattcgaaatacgcaaccttatgcaaaaggcaggagaataatatccagcgtcccaagcctgggcgaggagcgcgcagattctatttgtttacttctctgtggttatcacatactaggctgcgttaacaaagaacacagaaggcatgtgcactgctgggctgcgataatgccctacgagtggcagccttcataattaatgctgtacatgctattccgtgtcaggttattgccccaatatccctgtatatgcatcctgagctagctgtctggccatgctggatgattggaggggatgaagcgttatgagccgttcaagccttgtagaaatacacatttaagtctctcgtggttcagttaccctttgcatattaaggacattactatccatatatctaaatccaactatactctgttggctaccaaatgcattcttgtcatatctatgcggacctaaacagcatgtctagtaagtcattagaaccacccagctttgtgcgttttctcatgttccagccggcatatctgacatactggagattacaagtcctttctcgagggcaacgctccaagcgaaccaagcctatatcattctcaacacggctatcggtgtagctgatgttgttgaaatgttcgagttaccggtagatcccctgtcttaactgatctgctacttaagtgaggaatgatatctaaggagctttagtcgcggccgagaccttcaggcggctagactctggcctcacacaaagagccgggcagccctaagggccaatgagcaagcagcaaagcagcttgaaaacgaaaggaaagaatgaatgaatgaatgaatgaagaaatagactttcggccgaaccttttccctctgatgatgctcagtttccctcagtttactgcagtttcccaatttccttccttctccttctccttatccaccctttccccaatcattcttcctacctcccctcccccaagatcaacccacaactatctcttcttggtacttgacttgcttgaattacttgagtcgcctgacccattgccacaatggtcactgctcggaaaaaagcaaaagcagcccaagcgcactagcacggacatagaagagaagggaaagggggcagctgtgtaccccagtggagagtatctctgtcaacaggaagagtatcatgacataatggaacatcatttcatgatgggcatgctagcacggccccatatacgatcctgcccggaaatggtccgcgacggcttcggtctgctcgctctacgggtccagggctgggccatgtcatggggtgaaaacaagcctatgtaccgtctctccgatgatgacaaacggatgatcattgcaagcttggatggtttctgcatccaagatgactgggacagtatatattcctctctcccccctggcggtcgtgctgagattgggattgttttgatggaaaccatgatgaacaagtttatccatgacaaatttgccgcctctaccttctggtttgtggatgccaaaatcgatgctactgaccaggaaggggacgacaacttctgtaaacgactcgactatgtctatgagaggttcaaagaaagtaagcttctagacctctctgccctccctctttctttcctccctgaactgtggagtcgatgtcgctgactttggtttcttcctgtagcattgcctaaagacgcagcctggtggaaatcaaccctcgtgagcgtatgtatgctcagcgccacagaatgggggtacaacaaagcccctcccacaccacttcttcatacaacactggaacgccgcaaggtcctcctaaaggcctatggagacgagctgctagcgagccagccattccagctcttgtttcgaggctcattgagcgaggaagagcaggccatacgcgaagaagaaactcgcaaagtcctagaggaagctgcccatcagttcaccagtctccaaggcgaattatttggcaatcttgtggtcgaacgactgcctgagcttctgacatttgatcgtcattccaataaaatggatccacatatccttctcgtcggcttcaggcctcaccacggtactcgggttctaatcgtgacacgcccgcactacagctaccatgacattgtagcaaccaatggttggcaatctcggcctcctctccaaatcatcaccgcaagagttttgacggcgcccaaggggcccaaagctcgggctctatgggctgctgctggcgatgataggcccatccatgtcgcgcagggtcacgccaataccgcggaaaatgaggaggttagccaagaggagaatgttgaagaaggtagcgatggcgaagacaagccacggaagttgaggaggacatacttgcgaggggctgaagatgaatgaaggggttagcctgggattagacggagggtgtttgtcattgatataggggctctatatagattctactgtgcttgagatttttcttttgctctctttcttcttatttgtaacgtttcacttttaccgcctgtgtatcggctttgtcattcatgcttttccattcatcgatcgctttctttctctaacaactgaataccatgtgatgtcaattgtcgggcttttcttaccatacttagtgtagacctggagcaatcattgcagacctaagtataaaccacactcgctgggaaagctgcattacctccctcaaagaaaagcctgaatactattccagcaatacttatagacagcatagagaaaccctcaagccgaaacaagaatattcatatcaatcgatggggcttcggcagagtgcgctgaataaatccaatggggggcccatcggcatataacctcgtatctctttgatctacttgtatctccgaaagtccacccgtataaccattagctatagactgctgatgcacagatactaagccaggtgtcaatgacatgattgacaactcatcctcaatcctattcattcaagtggttaatcccagtgcttggcgacttacttcgaccagtcacattggcatctgcatagttcctccggatatcatctccgatgatatacagacacccacaggtggttagggcatatcgaacatgaagttcgatgttttggccttttttttaaagtagtttagtgcttaagcctagccccgctagtatctctaactgccaggctacagtagctttgttagtagtattaatggcattacaaaagaggtgctatggggaatatttcttgtatataattggaattccaatagtacctttctatattcatatgatatatgttatatgttatgattatggttcttatactagtactcatccaacgtccagaagcctttaaaacattcaaaaccgggatccctgcggatacatacaagtgtgcggcgtcgggtggtgcatcggacgccgaatctctcatgccggtgtttcccccgctactcgcaacttgctacgaattggtcccagtgctagaatagcagtaatatgctaatctatcagacttgtatggtaaatatctaacaaatttggggattagatgtctcagttccacatatcttgtctatctacctagtacctgcctgctttacctgattgatcaatgtcgagactagtattaagaagcaacaacttaataatgttgtatatttattacaaacttggtgtttctacatatgtaactactgaatggtatagcaattaaataagcctgcaagcgctggctgaattatctccgaggattttatcaaagctcaggatacagctgcaagatatatctaattcaactagtaatcaggtattagtatttaatctaataaggaagacgcttgctgcttacccttttcctccacaacatgtgcatgcatcaaatcccgcctcatcaatctcattttcttacgtactatctgcataccttgtcctagcctcctcctatgcataccgctattcaaacagtatcatcgtactgatggatgatgtcggagtcgggagcgagccacgatggggtagaatccgattgcgagtcctgacccggagagaatatagtagataaatgatggaagtactagaggaatatatatcttcaattcctgtaccaaggtacagggatagtacttggagacaaactagattgaattgagtaagcataacaacatgctagtttttagtagatggcttgttgtgtataatcttcagaaatagtagcaagtaagctttagagaaagagacaaaagagacactgcagatagcatgtgaacataactgataactccaatacagtcactactatgtatagtcgggtatataaggtatccgtgctagcctaccaattacaagtctacaagtcagaacctcatcaaatcaatcaagcgggtcaaaccctccagtgcagcaatttcactagggcaaccgtccaaacgcaaaggaacaaatccaccagaagccatccgcttgcaatttcagcttgaaaaacatccgatgtgtccccgccagaccagatcttcggagaattgaaacaacaatagaatgcccgatagtaataagaaaaacaaatcataaggtgtgcctggtatggaacaaaatgcagcatgcgcgaacccgcgccaacagatcatccttttctcgatccggagtattacatcgcaaacttttttcggcctcgatatgtcctcccgaagaaaaaagcaaatcatatgatagtgttacatgatctgatcctgcgtgatcggagcagtcggctcggtgccatccatcgcatcaccaggccctgggccggcgttcatgtacttgacaaacgtaatgcccaggggacgaccgccatactggtagccggtgaacttagctgtagtgcagttagtagctgtcttccttgctaattaaatcacaagacctaccgatagccgtctccgcagtgtccgcactatcgaactgaaccacaccagtgccgcgggaacgaccattgggttcgtactggatctccgcgcgatcgactttgccaatagtcgagaacagatccaccagatcctcgttgcaagtcgaccaaggcaggttgcgcacgtaaatgacagcgctcttgtcgccgccagaagtagcgaaatcggtgaacgggttaggaggtccagagggcacgccctcgaaaccaccaggagcaccgccgaaaccgccaggagcaccgccataaccaccacggaagcctccgccgaaaccgccacggccaccaaagccaccgcggccgccgaagccaccaccaaagccaccacgaccgccgaaaccaccacggccaccgaacccaggtccggcaccagcgaagcgatcctcacgaacctccagctggcgtccttgccagtcgtatccgttgaactgctgaatggcattccgggcatcctcaggggactcgaaggcgacaataccagagcccttgggacggccagtggcatcggtgtggacatcggcacggatcacagcaccctgctgagctaaatgagaagtcaatgttagtcctgaagacagcttgcgatggggaggaggcagagatggcggttgaatagaggctctgccgtcccatacttaccagcttggcggaaaagatccttcaagtcttgccagccaacgttgaatggaagctaaacatccccagcgtcaatacctaattccggtcgagcacgatatcaaaatgtcaataatggatgggagtaaaccaacattcgagacataaagctgacggccaccagcgccgccgccggcaggcccgccgaagccgccgccgaagccgccgcgaccaccacctccgaagtcaccacgagagggacctcccgtgaaacgaggctcgggctcacgatcctgcgctttggtcaggaaccgatcaagttttcagtgacctggagggaaaagggtggattatacctcacggacgtagacgagtcttcccatcaagttctggttgctgagggtgtttaccgcattttgcgcttgttccctggtcgcgtattccacaatcctattgcgcaccgtcagtaacaacatactggcgatcaaagaccaacggaatcgactcacccgcatccctacagtatcccggacggccaggcccagcccgtcaacccaaacagtccataacaagcgaaccaacgggggagagaaaaatccagaaacacaaaaaagggaaaggaaaccagccacactacgcattggcgcccaccttcgacattccattgggaagcagtaagacatcggcaaagatgacttctccagctgttcgagcgcggaacgtccccctccaaagtcagccacagattccagacccgcacaaacgctatcacacgcccggcaacacgatatgaccctgctcaccctgtctcataaagtctttcagatgatgccacttgacatcgtaggagaggttgcccacatagacgcgacggtcttgctgggacgactcgcgcacggcttgcatcatttgttctttggcgactgcgcgatcttcgaacgaacgggggggaggtgggtagctgccgcgcccaccgtaaccagaagcagaatgaccaccgggagcgccttgggtcgtactcataggcgaacgagaacgacggtcggagcggcgatagtcgtcacggctgcgagagcgactgcggggagagtacgagcgacggctgcgtcgagggctacgagaacgacgacggggagaacgagacctctcgcgctgtgcgtggtcagtgtcgtcgaaggcagacggagacatgaggcgggaggagagcgagcgcgcgggaatggcagagagggagtggagatttaaagaaaggcaaagaggtagtgagacaatggtggattcgatgagatcagcgcgcaaggtccctggaactgggggggtgggtgggaaatcgagctgcttggttggatggaaaggaaaacgggggaatcggcaatggggaatggcaatgagagatgggggagtgaattgggacggagagtgagttgagttcagtgagagggaagagcaggagcaggaatgcacgggactggattggattgggtccgagttccggtttctgcgccagacacggggccggtcacctgatttgagtgtcaaatcgggtttagcgccaaacgccagaccggggggaccctggggaagtcacgggcaaccggaccagccattccagcagaaccagcagaggacagggagaagagtgaagagagagtcaagatgcaagtgagggcacagcgaaagttcttccatgggggcaataaacaatcaacaactaaaagaatcacccaagcaaagtagacagatagtagatgaggatcggagtggaagatcaagaacgagggtggatagcttgcgggagtggcagcaaacagtggggatgacggattcccgaacgtgagccgtgagcaccgcccatcactctccctctctctatttgcagctgagatggatcttgtcgactgtttccccatccagctatctgcaacaatgacaaagagagctcctttctttccaaaatcaatcaagaacagcgctagatgcatccattctccaagaagagctacaagcgcaccaaccgatcggaaagcaaacttacttgatagggtcgatagacgtcggctgaagattaagcctagatggtaagccaccgaatccacggtcgggagggaacaaagcagtagaaaggatattaccagagtacgaaagaaagaaaaaaaagagggggaagattgggatgggaacgggaaagaggatggaattaaggtagaagaaagaagaatggagaggaggcgagacgcgagagataaaggagggtgacggcgggaggggggagggaagtcaagtcagacacagaagaaagtgtgtggtgtgtgtgtgtgtgtgggcggctgtgtgtgagagggtgaggaagtactacttagttaaggtggtagtagtgtgcgcgtgtgtgtaagaagcagccagccagccagggaaggggatgggcgagagggaggggggaaaagagagaaaaggaaaaagaaacgatgagacaaggtccaaggccagaaaccagctgagggagagagaccaccgtcgtgcttgttccagcccgtgtgtgtgtcaagtcagatccaatcccatgccatcccatccgtccagtgcagagcagttcgagtccgtctgtctgccagcccgttcgggacaccatgcagcacgcagcgtgattggccttccccccgggggcatccgcagacaccctccactgagcgtggatgtggttggcgtagctgtcgcagcaagaggaatgagatgcatggtcgggctggatggtcactgctctgactcggcacatccgcccggcgccgtgagcgaggatggaggtccctgctggagtgggaacccgtgtgtgatgatgatggtgaggggggagggggtctgaggggagctcagagatacggtatgtgcagcctagacaagggagggggggaaaggaaggcacatcagggttgaagtcaatcacaagtcattcccaaccgggacaagaatgtgaggcaccctcaagtatggattatggatcgaagcaagaaggaaacgtgggctggatgtccaccgggacaagccattgacggtggatcacgagagaacaaacaaacaatccggggaaccgacatggggacaagagaagttgcattataggaaaagtatcacccacccatgttgatgatattggattcgatggtgtaagaagatcaaaatgaagaaaagaggaggaagtggaaggaaaatgatacgttagttatcaagcagtagtacggagtagtggtagtagtgatgatgatgatgatgatgatgatgatgatgatagaaaaggtaaatggggggacaggaagacagtctggatcgccttccaggcaagcagacaattatcagaacaaatcggagatccgaaggggaagaggggggggggggataggaagggatagtctagttagtacgaagtagtgccagctgcaacaaacacactagtaggttatagtcgtgaggagagggaggaagagagggagatggggccagagtgtgtgaactgaggagcagctggggataagcaactcactccgacctgccggcagggatggaggctcgagcggtcgggatgttcactgaataaatggagaggaaatgaaggaatgagatgaaaaggatcaaggggaaatcaagggtagttgggaagtcataagggaccgagatggcagttgggagtaaatgaggcattaattgatcatcatccatcgatctccttttgtgagtgaactggtaagaatgactgtcactagctggtatccatggatgctgctatcaacatcagacacagacagcctatcatcgcggggaatccgcctgaaatgtcatgatcaacaggcacaggcaccaccaccgcatccacatcactgcagttgttccagcccttcatttacttcccgattactccaaaatacctatcaactagatcatacttagacctatgcagtaatcaaccaatagccaccttaggttgttaaacccaaagttgctctcattgtgactccccattttgattcccccagccataactncatccactgtagcactaaagacagccactgtctcagcgtccccgacagaatcagacatctgaaccaccacaagccccaatcatttccatcaattgacactgcagacccctctatccatgaaacacaataaatcgttgatcataaacaactggtatacagtccgaagaattgaccccaaacaagtaccactcctaaagacatcccgacgccagaacagaagaagcagctcttggctctccgctcaggccaccgcttagaaaatcctccgccatccattcaacttccatctccgtctccatctccgaccttcaattcctccccaacagcaaccacaaccactcacccagcatgactcgctcacaaccccttctcaccctctcccggaggtatcttgcaaccactgcgccccgaacaaccacaaccacatccatccgtacaacaacatctttcctcaccaccaaacccaccaccaccaccttccgctccatccagcaccaaccatgcctccgcaccaccacgacccctagcatccgtccctaccactcaatccaccaccccaccccgacccacgaatactccaattcccaaacgaccatcctctcctctgctctccgccacgtcccgacccacggcttcacccgcgacgccctgaccctcggagcccgggatgccggcttcctcgacgtctcggtgcagcttctcccgcggggcgaattcgacctgattctattctggctggcgagtcgacgggggtcttctccgctccaaggtggagaatgatgcgctgctgcaatcatcccagcctctatccgtggacgacaagatcaaggtcctgattatggagcgcttgcgcatgaatgttgaagtgaaggagaagttgcaggatgtatgcttcccctatctttcctgatctatctctagctgttccatatatcaggaatgccgtatgatgctaataaacatggtaatataggccctagccatcatgtcccttggcgaaaacatccctctctcgttatccgaactgcacgctctctcggacgatatcctcacgctagcgggcgacgcttccgtcgatgcatcgtggtattcgaagcgcatggctgtggcggctgtgtatgcatcgtcggagtttgtgatgacgcgggatacgagtgcggggctgcgtgatacggaggagttcctgagtcgccggtgggcggatgcaagagctgtgaaggataagttgtccggggtgaaacagtgcttgggattcttggggtcgactgctgtgggattggggaggagttgggggttgaagctgtaactggcaccgacattgactgtgatgggaaggaaagtatggggtggtagtatgtactattattaacattatttcgttttagcttgcttgtttacttgcggtatttgctgccgctgatacaactgtatatttacatctcattcaacctgaccacttcccctgcttcacaacatcatgtatatacaaagggtctaataatccctcgccctctcaatctccttcaccctctcctccaatctcttaacccacccctcatccccaaacaactccttcactgccttccgattcggcgccaaatcccaccacggctcgcgattcgacttcccctgcttcccctccaccttggccttccgccaatgattcctcagatcatgatccctctgattcttaatcgaatgcaataaaccgcacgtacgacggttcggctccacgcccgtaacctccatatcgcgaagcagcgacactacaccgggcaaatcatgacacccacgccaatagaagtaaataaactcattatagagagccgtggacccgcccaggaccgcagacgcccggcccatagatttaatcgtcgcacggaactggctgatgagatgagagtccggataatgcaggttgaggagcttgaacgcgacgaggagcattttggggtagagttctgtgacgacgggttcggtggggacgatgggtgggatagtgagggagctgtcttccgaggaggtggcttcgtccttaatgcccaataaacccttcttttcatcgtccaagtgtcgaaggatattgaagatccgctccttgcatacctcccagatacccgtgtctccgcgacggttatcaatcgcgtcccagagcgccgcttcgatgcttacggactcgcgcatgatcacggcctcgatggcccggtccatggtaatctggttcgaggatatcatctctgctagctcgtcgtcggtgtattcgcctgtttggagcttttcttcgatggctgtattcttttctcgcacggcgagttcgctttcttgccgctcggtgcgcgctgcgctgcgctggcgcttttctttcatgtcttggaggacggagtcgaagattgcggagatttgggccatctcgtccatttcgtcgtcgcggagggtggatttgggttccgttgatgacggcgtggatggtgtgggttcagtctgggattgctgacggcgctcagtgccgagttgctcgagaaggttgccgaagatctgtttctcggtgctggtcatggtcaccggcttttgcggagctgatttgctgggagcttgttgctgctgctgttgcgtgacggccgcggcttttttccgtagaaagctcctccgggttggacgcgcgggcttgtcatcttgtgctgattctgctgttgctgcttcatgttcctgctcgttggcgtcgctggacgtcgagtagtgctgctgctgctgctggctgtgacggactggaggggacaggtatgcggcagtgagggtgcgagtctggtacaggaatgggacggacgagttgcgagccgcgagcgccaaccaggaccgggagattcgggcactcattgtactatgacaatatccaactacagtctgaatcaatagactgtaaacgtatggtaacctttccacacggatcaacaattggtggaccggtctgccgaagtgaagctgaaccagccgtccgtcggagaatctcccgctcggcgcagtttctcccatcaattagagccacgtgactacgcggcgctccgaacgcgcctctgatccgcgtgagcaaaagtcatccatctgcgccatacagcagttcattgcagatcagcaacactctctgctttgaaactccctcctctgtaaaagggagaaagaaatcaaaatgggcaacgacgaaatctccgatttcgaaaagcagcgcctagccaacatcgccgaacgcgatgcgctactcaaaaagctgaccatggaggcgcagtcctctgggctttttccgccgaagatgcccaaaccagcagcgaaggatcaatcgcggacgaaaaagaagactcctgtgaagaaagtcaaggaggagacgccgcagccgcggcgcatgtcatcccggctgaggggcatcgcggcggaaagcgaagtcgcgaagcgcaaagctgaagaagagtacgaggcgcggcaggaagcggagcgcgcgaaacgagttcgcaagtcggataacttctcgttcagtgatattatggtgaacgggcagaagttgcctgcggatggattgatcggagtagatgtagttaccaagggcgtggcgataccgtaccagaggacgtttggcgatgatgagatccagaagacgacggataaggatctgaaggcgctgaggaaggagatgaatggattgacgctctgggaggcgtgggaacctaaccgtatgtctctctttctttccctactaccatcttccattggctaactaacctccataacaggcattaaattgacccccgaacgagtctacaccatgactttccacccgacagaatccaaacctctcatcttcgccggcgacaaaatgggccacctaggcattctcgacgcctcgcaagagaagcccacctccatcaaacccgaggacgacgaggaatccgacgacgaagatccggaccccgtcctcaccaccgtaaaaccccacacccggacaatcagcagcatgcacatccaccccagcacaccgacgaccctgtacacagccagctacgacagttcaatccgcgccatggacctcgagaagtccaccagcgtggagaaatacgctccggaatcgacctcctcggacgagcccatctccggcattgacatggcactcgacgatcccaacgtgctgtattggacaacgctggacggggcctttggccggcacgacatccgcaccgacccaacagcagaaacagtaaacacatggcaactctccgagtaagaaaatcggcggtttctcactataccccacgcaaccgcactatttcgcaacagcgagtctggaccgctcaatgcgtctgtgggatttgcgtatgctgcagaaacctaagaggggtaagaaagatgaagggccaaccccagtaggagaacactacagccggctctccgtctcgcacgcagcattcaacagcgcaggacaaatcgcgacgtcttcgtacgatgacacgctcaagatatacgatctgaagaagaaggggatttcgaactgggatgtagggcatgcagtttcggaggatgagttggggcctgataccgttcgttagacataattgtcagacggggagatgggtaactatgtatgtataccccttcctgattggtctcttgtactggttatttctcgagaaaagcgaggtgctaacggaatgntgtttggtgatagtctccgcccccagtggcaacagaacccgcaatcgcatatccagcgattctgtattggaaacatgaatcggtttgtggatatctatagtggggagggggatcagctggcacaattgggcggggagggcattacggctgttccggcagtggctgtctttcatcggagtaggaattgggttgcgggagggacggcgagtgggaagatttgtttgtggatgtgaacgttaggcaggggttgtatgatattagagagagtgaggtttataaaatttgtttgatagtacgcatattcaggcgcagcatcaagcggtactcaagtacaagtctaacaaggtggagttactcatttcatctatgcccagaggaaaggtagacgctatttacacaacaattgcaattgtagactggcaaggaaaatccccttaagacgggcattcctgctgcctacaatccatacatcatccatggaagatcatatccggcactctgctcacaggatctcttgttttccacgtaaaaacagccatcagagcagggtatcaacaccatgacaaatgctttccaaaataaaaccggcggaagaggtgatagaagaaacgaacgttaaatcatgggcacatgcggagacaaggagaagaaatgtaatcgcaggaaaaaatttacaccagaagatgcagggatctcaatacatgaaatcaagctctcatgttgtacacagaaatggctgcccgcaatgtgcaagcatcaccgctccacaagaacttcccccatgacattcaatggggtgtagagtaggcgggacagccgtagaaggtaaaataagggttttgtctagagccacaaaagtggaaatagatgctggaatcgtcatgatcagatgggccatgncaacccgcgatgcacgagtccaagagcgaagcaggcctaggtatggcccaggcgacttgggcgtcataactcgttgcgctgttcctcacgcgaattttgagcctgttcccgatccttcgctttgcggcgagacggaggcacgaaatcgaagaaccggtacttgcttgtcgtctctctagtgatgctagatctgcgcgatttcgagggttcgggatattcaagcgaatatgtggatgaattcttcgaactgccggtgctgtccctgggatctgcccatcgtggtatcgagaaggggactctgctttggtcccacgtggccgaagaggaactgggaggcgtgtcatcgtccgcttcaggagcgtaatcggtagaccgacgcggtagagagggcctcgacgcgaagtaaccgatcgaattgcgatggctgcctgtaagggatgtcgaccctgcaatagctgcctcggtggccgggcttgtaggcttggaactgtcctcgtagaaggtcaccgaccgttccatcgcgtcaaccagttcctcccatttgacctccaggcctccgtttggacgttctgcctgttcggctctactcaaacattccttggtgcgttggtggagacgaacggccatttcatggaatttgctgactgctgggtcaatctcctccaattccgccaggcgctccggtgcgatctcgagccatatactgatgagattggcaaagcttcgcgcgtgatcaatgaggaagggtaggctggggaatccttcgcgggatgttggggggagacgacccagaatctgtattggcgtggcataggagggtgtgacgataggcgcgggacggtcggcaggaatggcacaaatggaatcgacgaattgcttaaaatcggcgcggttgctgaccagaaatttgttcataggctccatccaaggctccttgctgccgaacgtggtcatattggccaggccttgcagggccttggcgatcagtgtcagtgtgcgctgggcccgggggcgcggatgatctgcgcgcattagaagacatgtatgagaaatgtgataggggagaacaaatacctttgagcaatccaaatagtttgggattcaggattgctggacaaaagaaccgcaaaaacaagaagcccgatacactactgtatgtgactgaccggaggaaatcgccataacggtcctctgcacaagcccggatatgccgaaaaataagcctcaattcagccgggcatctagaagcagagcttgcaattgatttccagacccctgtacttagggagacgaggttcctccagttgcggtcgagatcatccgatcggtgtacacgggaagggtccacctcgcactccgggtcggtttcatcgatatcgcgaagtcgctcgccaattgtttcttccaagtattccttgcctaggcgacgcatgtggtagtcgagcgccttggtgagaagcgagttccctcggaaaaggaggtttgcctcaacggtggcagtacggcccatgtctcggacgagcacttctctttcttgacccgactcccgggaatcgttggaatgaatcctcgttgtataccttagcctgtttgctgtcgactctttgtgcagcccatcaatctcatcctcgaccaatgctgaaatccactcgacagtcgtgcctgatacctggtaaatatttaggagagcttcggacaactgattgagctccgaggacatgacttgagacatgttaatcgtgagcccattggtgaacgaatgtaggatttccgacatcggcgtatactgcgtgcgacatcagaacaactgtctcctccattcgggctcgcatgagcatttcacccaccggctgatctttgtcatctaggatcggccaccatttttccgtttcgactccaggctgtagatcgtccagcttcaaatcgaccctgccgaacgtagcatcctgggaggagagctcaacgtcgtctaacaaacgcgccggattactatggtcctggccataggagccatgtgcgataagtgtccaatccttctgtgtcgggttgaccgtctttactagaatcgacacttgcgacaggacaggcggaagatcactgaaattaaagtcttctcgccaaaacgggttggctgtgcggtacttgacagcagtcttggcgcggatttccccatcaagaagtacttctgtgtagtaatcgctcacggcagatgttggggttgaattgctatgtgaccgcgactgcttccggcttcgaggagctttctcggcagctttgtttcggaggagcttagcttccgttactctcacattgagcactcgctcgattcgaaacatatctgccatagatgctgtaggggcatcggacggactcttcgggtcgtcttctgcacaggtttcgggcccatagagctctggtatcgtgaaggcgcgcaggagcacgaaccatacctcgaacaggactcgactttccaaggctaaatatacgggtcgagtgatgccggatgcagagtgaacggcgtattgaggataaatggcgacgcaaaattcatcttccaagaccgaagtagtgtaattgctgcaccgaacagcgcgagagctgcgaaagttggatgcacgttacaagggtgatatcggactcggtatacagcttgaaggcgccgttttcttgcaacgtacagttgaccctcanccacgacgaggaaagagctctttgttgtcgatatgttgacactcggnggccagaggaaggtcgaacaccggaagcactaggcctgtcccataagagcatcttgccaaccttgataatcgctgcctctttctggactgtactctccgagtttcgccggcgttcggccaaacggcggtcaccaatcgcaaccgactggggctttgtcattttgttttgaacgcccttgggacgaattggctgccagcacagcaaggcagcaagccaggagtcgaatgtttcgcttacatggggccttagctcgacacctagccctgaagtaaacgtggacacgctgaggtaattcgtccgtagttccggatcgacaagcgagcgaacctgacagccacgaagatcaggaatcaaggtcttggccagtgcgggctctcccttggcttgatatattagactgcccgtggcgacgttgatggcgcagtagcccgaggaccaagccgttgttgatgcagtccgaaacgaaagaatgccgtgcatccttccacaagtcgttttcataagctgcaggatcttggacgcatcggtagtcgacagcgcggagggggtctgattggctgatacactcgtcaccaagctcgaaccccctgggggcttgcttgaccgttggcgaccaagggagtgactgaaataggtgggggactgaatcgacggatagccaatagatgacgactcgtccggggttttgggttgtggaactgcggtgttgatggatcccaggcgattccgggctctgaaaaatgtgttaggggagatctcgctgcgctgatcatctagggtggtggtccgtgaccgtgcgcgctgacttttcatctccacatgtgtatcttcttcgtcgcctgccgagtggtaagagtgataatcgcgacgggattctcgatcggaggctcttgtccgggtggcgggacgaggggaagctgctgcacttgatgcgagatactccgcctccgaggaaggtgagtggttgccagcctcagagtctggggtgactgttcgaattcccgtgtccctaaaactatcgggataaaccatcccatgccggtccttggaggaagacttcttgctgggccgccgttccacaggacgactgtaaattccctgatggacagagttccgtttgaatccacttgacccttccggctccatcttttctttccaaccacgcacgacggaaccggtagcagcggcactcgggagaggtcgctacaaagcacacgggacgcaggcaaacgggcggagacacataaactggtgatacactgcgggattgttaccttgcagcacgctgacacccaacgtacgctgcgcaaccgtcctctaacaattgagggtctctttcgtccaatgggtcgctagctgaacgcatggagtccggggtgagggagggagctagagttgcacattcggtcgaggccgtggcgttttgggtgctagcaacggtgagagggggcggtcgcaaaacgattgttcgttcaggggaagggtgtggtatggaggtggattcgacggtcgtgacgatgacagcggtggcagtaggggaccagtgagtgaacgggagaagcgcagggcagtggtggatgagaaaagtacagggcgaaaatcgctagtaggcgcggcaaggaaccaaccctccaatagtccagatacagccgcgatgtcgctgctagaaggccatcatcgggtatgttagctcggtggggaaggaagtgatgatgggagtaagcgggtttgaaagaacccaacagggcaggcagtgggtggtaatgggtggtaatggggttggtggcagcagcagttcggtggataggtcggtcggcacaaaggtttggttcgaccaaccgcggcgtgatatcattggaaattggcacagaaagcttgaggggaaagaatagacgcaccttcattccgctgggaattgacctatctggctctgattgagaaaaaagaaagaaaaataccctctcctttgctttgaattgcttgagagggaattcaatccgtagtcgggggggggagggggaggtacgactagggaggatgggaaaaagggtgggataattggttcgaatgattgacggattggtgaagccaattacccagacgacgtgcgttgtgaaagctgcagatcccgcatcagcatggatgcattttctgtacgacagacgggggggttgtctggtctagtcgggggagtgttagggagaaggtgtgcaagtggtggtgttgaaggtgggtggaagtaagcgaggnacaagagggaaaaagagggagaaggtggaaagtcaatgatcagctggggagaagggcgagggatggagtcagtccgcgacggagggaaagcgggaggcggtgttgaacttcgtgcagctgaagagaagcgggccgggtaagtggaataaaaagggcacaaagagaggaaggagattaagaggaagccaaagaaagaggacgatgatgatgatgataatgatgatagtgatgatgatgatactgaatagtaactgactcaggtatcgatggcctttgggggaggggagcaaatagaaccaaaagaacgaaaaaataataatactaactcacgatcttggtggtctctttgctcacgttgcacttgagatcagggatactgaaaggctaaaaggatcaagtcgagagggaaagccggtgatacgacaatggacagacccttctaactcccagaatatgcaggggaattggacaaacgcccggtgatctctccgattgatgatagctgatatcagtagcggaggaggattatagagtagacacggaactacgtggagtaaaggcaggcagggcctgcgagtccttctgcttcttttccctgggacgaaggcgttggtgattttttgggttccgaattgatggggtactggcaacaccggttatggagtcattgaaccactttctggactttccccccgaccaactaaatacgactaatggcctgatgttgacttgcttggattattctatatgcaatcttgacccctttatttcatttatatttttgacatggcaagaacaaaaatgtgtccagtcgtcaattgaccctgatagtacgagtggaatttagattgaataaaaaaaaaaattaataataataaaagaaagaaaaagagaacaaaactttaaggattgaggaaagatgaacaaaaatttaagctgaaataagagaaagggaaaatcgacggaaaagaaaaaaactgttgggttcaggctctggggctgagatccacttgatgatggaaggcgtgtctttgaacctcctattttccactcttcctcattaagtagtaggtagtgtggttattatgactggctttgaagtttggctatacgtgaagcatggtgcaaaagcaacgggattataacacgactttattatagcttgtgccattaaacatgatcttccttatgaacacgctcctctgcatacactcgagcccatatatgaggcgttgtttcagggaggtcatatttagtcccggcttaaaagcaagccaagctcttcttcccttgagccgggaatattttcagcccaccctcttgctaccatgaacggtgtgcaattgaactcgatcgctctactcgaaccgacttgcatgacccagtttatgctatgcctagacactagggatagatcacccatgtaggaagtcgtacgaggtacgtatctttgttcgatggctgaagaagcgggtcaaggatagtcgattatcatgaccttccagaaaggtccacgaacacaccacctttagactaatgtacaaccagcccgatagtggtaaatttcttttttttttttttttgttcttttcccgctttttccttctgttctaccccaattgtttctacttccgcatgttcttgccttctttttcccttttcggaacctgactgatcgactcagtaccttaagatagttctcttcctctcctatcggtgccggaggaagtcgtacaattcaaaccgtggcagagggagtcgtacaatgatcaggcagaccatttccagaacagacccaaacagggtgcggcagtcagatccgagtcactaataattatcgccactgggatccttcccgcctcccctcccctgtagtactacccgacgttagattgcatttatattgccatggctgctggtgcgctccaaaagcagtaagtagagggtagatagtggtatttgtggctaaccacgcatggctatgctcacgtcaacggtgtgcagaacgccatctgccgcgattgtggcctagttggttgtcggcattccgcggtcactaatcaaaccattgcccagtactcaactaaaccattcattgccactactaggtagccttaggagtacttagttgcaggtgtcttcgattcagccaattgacaacagacctggatggggaggaaaggccaccgttagtaacaacaaaccacagcatagtatctatagattgacatcaatcttcaaaggaccagtccaaaaagggaaagagtcactgggtttgcaggagaagcagaacaaagtcatgtccattggtacaatcttcgcccaagcgaacgttttaccaaaatgtggatcatttgggaaaccatagacttcttcgaaccgtatataaggcagccaacggacacctggcgtacgaaactcactgcagctggaggatggggagtcctggaggacaacgcttgtctttgggtgggacaaaaggaaggtgcagcaaaaggccaacgatgcaccacgtatgttactagactcttaaactactgaccagagaggaaagagcccctgccgggcactgggcagactagcaaatagaatgagcttcgagaatggaaacccaccccgcacgagccacaccggcgctcaagcattgctggcgctggagccaatcagtggtccccatcggcggcccatcccgtccagcatcccacttgggcctgactcgtgtcgtcagagactcaccggccatgactcggccatcctatcatgtgatatgcggcacgtaatcattctcttttcggaaatccccgcattaacgttgttccagacattatcacatgattgtctatccttcatgccttaggcttcatttgatcggctcaggcagcaccaacttgctttaccgcttcggagcagcaggactagtctgcactcttaactagcgctatcaatgtgactgactgactgaccgcctgcatcatcggagcttatcacgaggcggtcatcagctctcctcctccaactcccccgggccctgctcctgatcctaccgaccaaagtcaaccgaccctccttcagtagataaatgctaggtcgatggtctcatctttcatcttcttcttgactttgtgattaagtcaaaggcaaactgatcctctgtttcactctatagatcctcttcgaactgttccaggcggatcaaggcgatcctcgctctaggttgtcgaactactaccgccctttcggactctcaaccatcctaagcgcttctctctatatatcgtgtttaccctagctggatggccttgaagtgacctcgtacacggcttgatggccgttaataatgaactgatgattctattatctactgctatttagtatattagcccaagatgatgacctccaatatcttatcgcgtttcctccctccaaacggctccccgtcagtgtatgagacgattcgacaacacgacaatcattcggacgcttcggacgtggaggagcgtgcaggaatggcgtttgaggatgaacatggggaccggttcagcgaccgtgagctggaagatgctctagcagatgctgggagggatgactcccccggtccgagcgaaccgtttctcccccgaagcccgccaacaaaaagggacgagggtggcttcctcaaggccggttctcgtcgccgcaagtttagtcgctctggtcggatacatgcagcttcaccgcgtcataaattcgatgatagcgatgatgatgttcctccctcactcctcgtggaaggagatcaagatgacgatgacgttttgagatcgaagctcccacctccgccccgatcgattgaccctccgaatgttgaacctccgcccagaccatcacctcgagacgaccgagtccactgggaagcagcccgcgatcgattaccgctacatgacaccaataggcgggcccatcatgcaagtctgtggtcagcgggatatccgaacctagcactggtagatccgaaagagaaggcactatggatgtgggcaaacgtggagaatctggacaactttttgaaggaagtctacacatactttcttgggaacggaatttggtcgattctgctgaacagggttttgagtcttctgtaggtctcccttccccatgcttaagttcgcctgaatgttcaagactgactgacacatggggttcaggacatttgcatttgtcgtaggattcagcatattcctcacaaactgcattgactaccacaaggtacgcgggagtcgaactctggacgacattctgattcagaagtgtacaaagcaaatgtccatgtccgctaccttcttactatggctgctttcttttttctggattggcaaggcctttcagtacttgctagatatcagaaggctcaagcacatgcatgacttttatcactacttgcttggaatatcggatgctgaaatccaatcaatttcctggcaagaggtcgtcagccgattgatgactctgagggactccaaccccgcgactgcgggtgcggtctctgcgaagcatcgcaagttcatggggagtcagtccaagcagcgcatggatgctcacgacatcgcgaaccgactgatgcgcaaagaaaactacctgattgcgttgataaataaagatatactagacctgacgctcccgataccgttcctgcgaaacaggcaactgttctctcggacacttgaatggaatatcaacctctgcatcatggattatgtcttcaacgagcagggccaagtgcggacgttgttcttgaaagatacccatcgacgggccctgagtgaaggcctgcgacggcgtttcatgttcgcaggcatcatgaatatcttcgtagcccccttcattgtcgtctatttcatgatgcactatttcttccgctatttcaatgaatacaagaagaatccatcgcagatcggatcccgacaatacaccccactggctgaatggaagtttcgtgagttcaacgagctatggcacctgtttgagcggcgtgtcaatatgtcttaccctttcgcgagccgctatgtggatcagttccccaaagacaagatggtgcaattcgcgggtttcgtggcgttcgtctctggggcactggcctcggtattggccctggcttccgtggtggacccggagctgttcttgggctttgagatcactcacgaccggaccgtgcttttctacttgggtgtcttcggttctatctgggctgtcgcgcagggtttggtacccgaagagaccaatgtgtttgatcccgaatacgcgctccttgaagtcatcaacttcactcattacttcccaggccactggaaaggccgtctgcatagcgacgatgttcgcaaggactttgccgtgctgtatcagatgaagatcgtcatcttcctggaggagatcctaagcatgatcttcacgccgttcatcctctggttcagtctgcccaagtgcagtgaccgtctcatcgacttcttccgagaattcaccgtccatgtcgatgggatgggatatctctgctcctttgcggtcttcgacttcaagaagggtaccaacgtgatctcgcaaggggatacgggtcgacgggatgctgcacggcaggaccttcgggcggactacttttcgaccaaagatggtaagatgctcgcatcttattacgggttcttggacaactatggtgccaatccgcgcagtggtcatccgtcaaccaagcggcaattccaccctccacccacattcccgacccttggttctccatcggccattgagatgggcaattttggagatcgaccggccgcagctgggctgatgggtcaacaatctacatacggcgccgctcctcggtttggccccgctggcatgggcgaccatctctccccggcaccatcaatgctgctcgacccgcaccatcagccgtcggcgtcagggttccggtcaacgcaccgcgctaacccgtatccgcgctatagggcctcgcgaccgcctcccaccatctccgaccccattgaagatgaagatcctccggcgggcaaaggtcgtagtgcggttaaatcgtcgcccggggtcgggtcgagcgggggcggcataggcacgagtgacagtaacttgggggagtcatggcggatgaacctggtcggcgatgaggttgaggaggaagatgagggcggcgagaatgtcgacaccctggctggcggtgggggtgtcctggggctcattcagcagtttcagaaagtcaaccaggacaatcggggacggacgacggttggtatataattataatttgtatcaggatatgaggtttccatcacctctgctgtgcacatggttacagtagggaagttcgactcagtgaaaggccttggggtgtaccagcccagacagctagtgaaaaggcagccatacgcagttagagaagggtactgtatgtagagtggaggataagccaagctagtgaccacacctgcagcaatggttagtagtacgtactaaagtttacgatggttctgtccagctgattgactctggtcggagtgtatctatagtatggagtgctagtctagccccggctaaatggaaggtaaaggaccagggtctgtccgtcagtcagtcagtcagtcacactgactgactgactgaccggacctttgccccgattcatccaagcaccaaacctttttcccttgacttttcagatatggtgtgtttatttatttacaacctggtactggtgttctcttttccctttaatcgacgcagactcttcaaggtctgtctgctcgctcagattccgagaagagcacgtttcagggtcctcagatacgaaacagctgtccccgctgcgatgcccctacaagtcaggggagagtagagagagagggccccaaaaattcttcagtgatggagaccgcagaaaggcttctagactagtcggatattcacggcacgaatagatgccatattaattaatattagcttggctgggttcggatggcggaagaaacagactgacggtgacggacaatgtgatgggattctactttaggactagagggtcacctgactactcagataatccagtccctcccctggataaactccggcttcccgggacgagtatccatggatgagggaaaggaaggttatattagtttagtctttggaagagttgtgtggaatctgtccaccatcatgaattaaagaattgaatgaatgaatgatttcaatcaatggatagactcgtggaaccagagggaaattgcaacccattattcttcctttccttgtggttgttggtgttatccaacccccgcccgtctcggtaattacggggggtccatcacgggctataattagcaactcgcactaaagaaagaaaaaaaaaagaggatccagtccgtccgtcccctgcagccgacgcgcatttatgttggtgttgactattgactggcgatgttggcagcaacagccaccatgaaatgcccgtggtatacgtacaaacatgctgcgagttgcgtagagacatacgtaggcattgagatgatcttttacaaaaccgtggtggaagaagatgaagtggattgtgggttgatagtataatactagtcatggtctctcccattccaacccggttcttgacagtcgatcatccatcagtctttcctcttttccccccctgcaagtctggaaccagcgcgcccgaccgaccggcagctatcaatccaatctccctgctgatccctccgtcgcggatccggggatctcctttttttgttggtctcgatcatgaatttttattggattatttgggtgcaatgcgctggactattgacagtcttgacttggattccagtcctagcatcggagtattgcttaccccggtcattcattcattgatagctgcatgcagtcaattgtcattccttatcccattattcagccgggatggatcagttagatgttagatggacgatgatgatgatggatgatgatggatgatgcagtgaacaaagtgatagtttaatgcaaactgcaacatccactactatctatttggttcgtgactcgactcctgatccagcgatttccgaccgcgataacttctctgggctccacgcgcgtgcaccaccagattcttggccgggctctgggttctgcttggatgtgagcggcggttgcatccgcaggcggttcaggcgagtttccatccattcttttagttcctcttcaatctcaattcattcattttattggagcaccgcgcggtctggccagtccctggcggaggtctaaaccttccagttactaaactagtcggccttttacctctcccctctttctcgctctctctctctctcacgcgctctctctcactcactactcactctctctctcttcctgtcgtgcaggtgtttagttggtgctttttactttcccaccacctttagactcgtcctcttcttcctttctcctcttttcttacttcttccctttttaccctttctttcccttttctcacctgatactttccctttccggtcagggctgcaggttgtcattcccaattcatccatcctcaacccacactctctcacatctcacttccttctttctctctaaccctcccctccgaaatcaatcatgacctaaaacaggtcaactctccgccattcacccacctcctgattgattcattctctttccactcgtttggtccaccttttttttgcatgctggatctcagcccagtctgtcgttagagaatcagaccctcctcaattcttataatccactcctcattgattgggagtcctccattcgttttacccgaagtcttgtcccgcggcttgcaggaacttgactcccttgggatctcgtgatccttagcggtgtccctcctccctcgtataacccgcactccccctctcaatacctcctcttcttgggggccatttatattattctttccatttgactttccttccgcttgggggatttcttgcctttcgtttttccgagtcttgtgttactaccttctcggtcacattcgtttaccatgtttcgagcccgacggtaccgggttctcctggtctttgcgaccatctttgtgctcgccttcatccatttcgctcgatctcgagaacaggctccctctgcctggagtgcgccgccacccgttgatcgccatcctgcatctttctcgccaaatcctccccccgctgacgagaccatccccaaggactctgctcccataaatgcccctccgtcccctcctccgtcttcccctgagagttccgatccgcattccgccgacgaagcgaaagagccttctaccgaaaccttatctgatgctcgcccgtcgacctccgcggaagtgtccaacccatcgagcgatgcaacagcctcggagaacaagaatgaggccgagtctggtccggcccagtcccaattgggctctcaaagtaaaggggattcagtggtggacgctcccgagtccacctggccacaccctcattggaagaagatgcccgagcagtatcctctcgctcccgaggacttgatccagctgccggccggtcagtccaaggcgctccctaaactgcaggcagatttcaaagatgaatcatccgccgacaagatgaagcgtctcgagaggctatctacgatcaggtccactttcgaacacgcttggactggctacaagacttccgccatgggccacgatgaagttatgcctcttcggggtggatatcgcgatccgttcaatggctggggagctactctcgtggacggcttggataccctttggctcatgggcctgaaggaggagttctcccttgcggtcgactacatcaagactattgacttcaccacctccaagaagaaggacattccggtcttcgagacggtcatccgttatatgggaggtctgcttggtgcatacgatatctcgggacacaagtacgatgtgcttctggagaaagctgtagagctcgctgagatcatcatgggcgcttttgacactccgaaccgcatgccaaccctcttttacaaatgggccccgtaagttctttttttcccctggcgctatatattgggatcatggatagctgacctacttgctatgcaggctttatacagtgcaacctcatcgcgcggataagaaggctgtgctggctgagctcggctctctttcggtggaattcacccgcctggcacagttgaccaaggaaaacaaatactacgacgctattgcgcgcatcactaatgcgctcgaggaatatcaggacaacacgcagcttcctggcttgtggccaatgaagatcgacgcgtctggatgcaagaagacccccacgcacatcgatcatgaggttcctcgcggcaaagtgccagcagaatcacccaccagcactgctcccactaagcctcacaccaccaggcctgctccaacagacgcccagagctacaccgagtttttggtgccccatgatgcaagatcgctgcacgaggatgcccaaccggctgactacggtggagtctcgcgtcaaaactaccctagctcagagagcgagtaccgcgcttccttcgataagcagacccccgacgcgcagtgccatgaaggattgaccagccccgcctcggaaagcgagaagtacggattgggcgctcttgctgactcgacgtatgagtacctgcccaaggagtatatgctgctgggtggtctcaacgaccagtaccgcaccatgtacgaaaaggccatcaaggccaccaaagaacggctcctcttccagcccatgatcaagggcggtcgcgacgttcgattcttgagcaccatgacggtgcccaagcagcctggtcgtacgaaggtgacatatgatggcgatcatctatcctgcttcgtgggtggcatggttggtatcggtgcgaaattgtttggtcttgaaggtgacatggatctggcgtccaagttgaccgatggctgcgtgtgggcgtacgagtccaccaagactgggatcatgcccgagcacttctccttgcttccttgcaagcagggcgaaaagtgcgaatggaacgaggaggcctactacaaggcgctggacccgaacatgcaggagcgattggctcgggcagcagcacgcaaagaagagaaggagaaagaaagggagaaagccaaggccaacgagccctacgtggatcctgagcctgaagctatcaactcgatcaagaagtctcacgccaagcgggagcgcggcaactggcacgtcattgcaacgcctcccgacgacattaagaagaaggaggaggaagtggtggagcccgttgacgatgccgaggaggagaaggccccctcgcacgaggaatttgtcgcagcccggattcggaacgagcggctgccacctggtgtcactcgtctggtggatcgcaagtatctcttgcggcccgaggcgatcgagtccgtgttcatcatgtaccgcctcacgggcgacgagtactggcgcgagaagggctgggagatgttcgaggcggtgtctaagcacacgcggacggagctggccaattcggccattgaagacgtgacggtccagactcccaagccgacggacgaaatgcagtccttctggctggcggagacgctcaagtacttctacctgttgttcagcgacccgagcgtggtgagtttggacgaatatgtgctgtaagtgaaaagctggccttagacgcaaactgcaaactggagactgacccttgaccgcagaaacaccgaagcgcacccattcaagcgcccgcagtaaccctaatgctctctatggctttgtatgcatgtgcatgtgcagtctacgtcgatattgctgtttttcttgttgcgtttgtttggaaaagtacagataccacgtccccgagcacatgagttgattgaccctcttctttaatcgtcaccctttttttgtcccttcatcttccccgatttctctctcttgcgtgatgctttcgttatttctctagctggcttgggaataagaggctgatatcaggcgatctgtaatgaacccggcgaccggcgctgggaggatgttgttgttgtatagactacgtacttaactagtggctgtaaacaaattaatcaggggaccggagaagtcacttcggtttctatattgacaaattcactcttcccatagataaaaatcattgaaacctctgcatctacaccttcatggtgtcatgacaagcataatgacttcagacaatatttcgttaacaagaaaactagctcgcgatttagtgctgatgaatgacgtacggccccttagtacatagtctcctgtttccccgaccagaaaaataccggtggatcgcccgccaatcccccgccgcccgagttgacttggccaacttccatcccatactttaccttcttgttgctcgcaccacaccaccacacacatcaacacacaacaccactccacgccctttctctttctcccttcccctcccggagcagtgcaccacccctcctcgcaactcagctccaggcgcaaggcgggcgggatgagtgcagggaagcacccacacgacgacattcccgacgacgaggacgatcaaccagcagcagtagcagcagcagcaacaccgggaaatggactttgaggtctctctagagaacgagcagcaattctgggacgagatccaagacattgtttcctccccttgctccaccgaagatcatatcgataatgcgctgaggtcttacttgggtctggccacgaaatataaaggtaacccttgctatattctgtgctgtgtgtaggtgtggaatgggggggaagctgactagttgggtgtatgggcagatgaatatcttcagtccgagttagatgttacgaggtgctcgtataaattgcttgcgtcgaatatctttgtcgctcataccgattatgtgcggaggcagatggtttatgggttgttgcaggtttgtgcttcttacttccctatggatggtgtggatatgtctgtctgacttactggtggtttggttaggatgacgaccctgcgactcttcacctcatcgtatcctttctgctcttcgacggtcgacagcatgacgtggcgtttcggatgatgaacgaggagggcctgttccccaggttgttggagcttctgcaggcgcggaatagaaaggagaaagaggaggtgcctgcggggttacatcgattgctgatggatttgatgtatgaaatgtcgaggattcagagggtcaagattgaggatttgggtgcgttgtgccttggctatattggtccagtggtctggtttgttttgttgactgaagggtggcagttctcgtggatgacgaattcgtcaagggcctctttgatatcattgaggatctctcgtacgatgtcaatgatccttatcattatccggttattcgtgtgctggtgagtggttttatctttcagagttactgatggtgtgctaacgatatgctcagctggttctgaacgaacagttcatgatttccgcgcatgatccggtcgatgagcatacgtcgaatggcttgacaaacaagattatcaagatcttggcgatgcacggcaatctatacaagacttttggcgagaatattatccttctaattaatcgtgaaggttagtagtccctagcgcgatgaggtggaagattctaactcttgcagccgagacatcgctccagcttctgacactcaagctcttatacctcattttcaccaccccgaccacctacgaatactttttcaccaatgacctacacgttcttgtcgacatcctcattcgaaacctcttggacctgccggaagaggcgtccgctctccgacacacatatttgcgtgttctctatcccctactggcacatacgcagctgaaatacccacccttctataagcgggatgagctcaagcgggtgcttagactactcgttcacggtcagctctccgatagtgggcctgaccgggagaagataatgcacttcgacgacgtggacgagactactcgaaggctggttcttcgatgcgcaaccgtggaatggctacgagaccctgaaccagaaaaaccagtccatgatgaagttgccacgcccacagatagtgtacctcctgatgctgaattcggggcaccattggaatcctctcggaccctctcccccacgagcacggtcgacagctctcccgagaacatgtcgcccactagactagacggtccggactccagtacatcgagcatggctgcgcatcacaggctcagccaagtgcaacaactcggcatgcacctcgagcccgcgtcatcctccagcctcagcgtccaagaagtagcatcccagcacgtgaaacctggcatcatgacacccagccgcaacgatgcccgtgctgccactgatagcccaacgagtccatcaaagttgttgggcaagcccaaagtcaagcctctgcctccgagggcaagacgttggcgcggccggcgagacgacgagcacggacaaactgacaagatccccgaagacgccgaatctcaacacacaagtctaatcatcccacccgcaagtctcgtcgccaccaacagcgccatcgagcgcgcaaattccaccgccatagttccgccccctgtccccagtcactcgcgccgctcagcctccaatccacccccggctgttcctccaccccgacgctcaacagtcccccaccttcacgcaggtcatggaggagtaggtcaccttcctgtcccagtcacgagccactgcaccccgcttgccagtccttcacgacttgcgcagcaacagcagcagcacagccccagcacatccaccaccgcaccatcacctaccccgccaaccgccacccctgctcctcagaaacatacccagaaacccgagccccctaaaacccgtcgccgcggccgcacgaggaacggcccggctgaattgacgtataaacccactccggcgccagatttaccggcggggcatctggacaatgtccagcagaatagccatacagatagcgaacccaagtccagcgctaccgtgagtgtcgaggaagcggtgcagaacgttagtctggagtagctagctgcctagctggctgcacaggggattttgtctgggaatagcataatacatcatagcatcatagcatagcataaccatttcatctaactatctataatctgcatgcatctgcatattcagcgcatctaattgactacttctattgctctactttctcaggcatacaaccaacccaataatcaaattgatctggtatcttaagacaggagaacaaagttaactgactagttaatctcaagcgagctagccagtagttcaaccattactaaacatccaccaatcttcccctaacttcatagtaaatagataaatggatggatagcagactccctccaacttactagccagcgaaccagccaaccagccagctaactataccccaaccagcccaaaaccaaacccaacaccgataccattaccattaccattaccaaaaccaaaagccacaaaacatagaatacgtacaaaaacacaaacacaaaatacaagactaaaaaaaatacacctaaacaactaactaacccagtgggtaagtactaagtagttccagcactagccccattctcggaccttgcaaaccaaagtagtactttttgtgccaaacggcgttgtgtgggaagccttaccgagatcgggtctagtctggatcttgttttttttcctagcgggtttcgttagttagtttccttcgggtggaggctcccgagctgagaagttacggacgtacgtatttgatgacgacgacgggatccagtcatccacctattactagttcatttgcaggttgtggtttggagatatacatacaggcgatgtcgataagggaaggtagggtgttaatttgggaggtaggtaggtagtgatgcgttgtaattgatagaggttgcatagcatcataggattgttgaatgatatgattgaagtcggtacgatgtttagcaatagaagatgactgactcccaaagtcatccaattttcaaagtactgtcagatatgcacaagagactgtgtgatacataaccaattattcacaagacttgtgtagatggacagaagaagaacaacataacgtaacataacaagtagaagaaaagacaacaatcgcatatcatccacgtgggtaagccaactgacatgctctctccaactccaagaaaacaatcacgaccggcgcgatcaaattccgaaagcatatcatatctatgtatagaatgccagaagcattaccccatagtggtgatccggccgtccaatacctgatggacgtagtggagcaggatgtaggtcagtgtttctggatgccccagaacttctccgctccaaatgtaccagaggagtcttgcttccacagatcatcaaaggcagtaaagagaaccaactcatcctcgccagtgaacgtctgctgcaagctggcaatcgccttttgctggttcagcgaagacggcacagccttgccattgggttgaccgttgtgcggccatcctgactcgctaatgagcgtctttttgccgcgggccgctttggagaccttgttggcttggtctttgacgtactggccggctttatcaggggtgttgttgttgtcgaagaaggcatggcagttggcagcacagtaatcagacgcttggcagagctcggggtgttggatcatgactgagaatgcatccaccgttaccacgggcccttggtaccctgccgcgcggagcttgctgcgtgctgtattcactgcgtttacgacatcggcagccgagttcttaccatcgttgaccagttcgttgccgatattgatggtgtgaaagacggaccagtccccatttgcagccccggtgatgtagtcaagactggatgggaaattctgcaagtcgaaaacaccggcgaaaactttcaggttgcgttgtcgcgctgctttggtaaccttgttcgtctggtcacagtctacgccgtagatccggacaaacccgtattgcgccagcttgtccaggtcttcgtcgacttggtcttgggacttgcaggagccatcattgttatacggagagtaggagatgccaaagcgacggtaattcccggtctttggaaggttggtagatgcagggagtgggacggcgggagagagatccagatctccatcgagagtcgataatattggtggaagggttgtaggcgactattctgttagtccgaaccctaactttatctctggagcggtgctttttgggtggcactcacattgtctgctgtcgcagttgggtctgaattgccgccgcccacgacgttgttggcaagagcatttccagcctggtccacccatacaatcacatcacctcctgggagatcactcagtggaccaagatcgcgctttttgccatggtcgtctacaatctcggtcaatcggtaggttagacacttgtaatcttaggttgacgcaccatagggaagtgcgcagacaacatagctgagcagcaacacaacgaggaggtacatgaggcgtttcattgctggtgtaacgtaaacttgacaaacttgactttgtgaccggtttctcaaggttcaatccacgtggggatttgagaagaaatcctaccgtcaagggcaagaggaaagaacagtcaggcacagagcaaaaacacggattctgttcaaagacgccgttcagccaagcgcatctcctggagcttcactctggcctagagtgaagactcctgcccttcattctggagcgccatgagtgaagacaggggagtgccgctattctgcttctaggaaaacaaatgtttaactgggcttgttttcgatggaatgttaatttcgtatctgcgcagatcccttggtcttgagaatgcgccacggcctcgacctgaccattcgccacaaaatcgaaagcccgacagatttcaaggtgcaaactgtggccccttggtgctttccagagcccgaggctggtgcccttcccctatcatgactcgacccatcagtgaagcggatatccctgtacatccctttcgtcgcgtcgaaatccaagacacaggttaatcagaaagcattgattggacaagaacacaaaattattattagaatgtaatgtctattaatgtccactgtgcccaagcacgcaaagaaataaaggctgatatgggcaaataagaatatctgcacagtaaaaatagagacacgaggcgtcaacaacctcatatcacgtctcaagaaacgcatctaggtcgcatcaatccacggtgtaatatgttatacaagaaatgtgtaggatggtgcgctatatcaccaacagaaagggcaacaggcgcgaatgaaagaaaaagagtgtacaacaggcgtgtcattggagcattaatgttcatggccacttctcaggataggccgggaattgaaatacgagaatgaaagggaaagggaatcttttacttcctcttgcttagaactttcgtaatcgcatggcggatggtggttcctgctttttcaatctcctttctcgtcaatccgattgtcacgcaaaccttcaaggcagggggaacaatctgcttgggctcaaagttatcctggagagtcttcaggcgactgatgaggacaccgtttgcgagacactgtattccataactgtcagttatttttcaatgtatgccaattttgccaaagacttacctcgtcaacaatatcttgcagcaagaattgctggtcgtccagtgacagcttcttcgcagcaacaacctcgggcttaaggaccagaatcatcataggattctcgggggaactggtgcaataaacccaatcactgcgagggtccaactgcgcccacatggccttggtatgctcccgcagctgcgtcacagtctcggggctagtctgaaggagattgatcgtagcactagcagtagtagacaaaagagcggggagtgcggcggagaaggtataagcagcagccgagatacgctgatgatggacgatctcttccgagccagcgcagaagcctcctcctgcaatcagtgggccggccagcgagcccacaatcatatcaacttctgccgcatcaacgttctggtgctcagtcacgccacggccagttcgcccaagaacgccaaaggaccaagtctcgtcgaggatcaggcggaatttgtacttcagcttaagctcgatcttcaaaagtagtcagtccgaagcacggagaaacaatgatcaggataagggactcacaatcttgggcaaatccaccatgtcgccgtaagattcaaacagaccttcggtgataatgaaccgcctagtaaggggcttcctggcttgttccttggtaacctttgcgaggactctctccaagtcttccatatcattatgctcataccagcgaacaatgctgcgagagatctggatacccttgcgaatagcgaagctaacacccttgtccgcaacaatgatatcgccacgcttcgagaacgcaggaatgacactagagatcgtcgaaaaggcctgcgcatagataatacaggatgcggtaccaaggtaggaggcaacatcagcctccgtcttcatatgaacatcctgagtaccatagaaaccgcggggaccgcaaggaccgacaccataattccgcagagtctggatggccttctccttgagcgactcgttcgtattgaagttgtaataattataggaaccgagattgacgactgtgcgaccgttgctcaacttagacttgggtccaactgggctgcaagtcaccaacagtcagcctaccgtctcacacaagaagcaatccaggaaagacaatacatacccaacaatgaccgttcgcttatcgacctccatcgcctccaacggagtaggcttccccaccaacggctccggagtccactcatccacgagatcatcgacctcatcctcggaaagttgaaccacacccggtttagtcgaatacttcggagcgaggagataccggaccgcaaacaagaagaggaagagctcgacagctgagcggataggatcattttggtaactagacttcacataacgtaggaagatcgctgaaccgggtagacgatgaaagaggtctgcgagttcatggaggtactccgaaaggagacgctgagtctcctggatatccatgacggaagaaaatccacttagcgctcgcggcgcaagtacccaggaagcaaagaagcagaatctaatattaaatgaaagagagaccctctataaacgaatcgacagcatcagcgattgaataataagtcaaggcagcggcattcccggaggatcgaagcaagacggcaagtccaacttccgggatgggcgcggccctaacacgtgacttggcgctccttgcaggtcggcccgtctcacaaagggtatgaagccgtaggcatcgaacaggcccttaatatgcatatattccgagagtacgatgtttgcagtgaaggtcctggactaaatgtttacgtagaagtggcgttgaactacggctttaggaaatcagtaactctcaagactctttgaattgatagtccacacgactacaggcaaaggagccttctagataaacaccaaggaaatcaaaggcagccggatgcaatgggacgatacaagaaaagctggcaagtctagtgaccatacataaaagacagaacaacaccttgacaatacaaaacagttgaaagagattggacccattaatgttggcaactgaaggagcatacacgcagtttcgttcaatggaagaagggtgggacgaaaaaaagaaaaataaaaggcaaatgtatgagactcggcagcgacatcaaggcgctggttactttatacagctcgtttccatgttccatttccgaaaaagaaagacaggtaaaatgtattgaaaaaaacaatttaggacaaaaacaacctctaagcagatgcagacgccgcggacggggtccaggcagagtaaccgacagggagaccattaccagtgtaactggagatggtatcgttattgtcggtatccagaggctgcataaggctcatgatgttgaggttcacgctgatgccttcatcccgggcaaccagaggagcaatgagaaggatgaggaacagaaccagcatagtgaaatacagaatcgcaaatcggacaactcttctcttgcggagcttagactgcttcagagagtagatgggagggcgaatttgacgactgttgatacgttagtaaagctcagataagatggagtccagtgggatttgaacgtacctaggcctcagccagaagaggataacggagtggaacttgtcaacataggggatgcagagagcaggaagcatgacaaagaggagaatatggcccaggacaaagtcggcagagaagtatccaagctcggtaatcttgcacaggaattctctgccaggctgggaaagcgagtgccaacccatgttgtaccattttccggtccaccaagcgatgttcgactggtcatgcttgaattctctggtcagggcgagggagatgatcagcttgtagatgaagcgctgaattgcagcggcagaaatcattcccaggaccatgcgaggccaggaccagctctcaaggaagaacatgacctcgaaaatgacaagcaggataataaccgcgatggcgtgagcgatagcagcgaggactgcaccaaacttcttgcagcacatgccaaagatgggacccatacagcaagccataccgaagaacatacccgagacaccggcgttaacaccgatgggaccgaaggcgacgatggcaatacgaaccacggcatttgacgcccgctcgttgtcattggagataccagttctcgagttgatgtagaggtaaggaaccaaagtcacagcaacttggacgagaggggcaatgatctcactaaagaaaatgttcgtgaacttggccctgggaacatcgccagatcccttctccgaaggaacaccaagaagcttgcgcttgtaaccagtgagacgggtacgagacaggcggcagaaggcgatccaggacgaagcgtgcgagcgagagttaccacgggacagccatctgatgtaatcgcggtagtcgataaagaaatcgtgccaagcaaactggtgggggttgaacaggaagggggaaatgcagagagcaagcagagaaacccagaaccagatcagggctggtgtccagacagtggatgtcgcaaacagaagcatgagcagcaaacgagaaccggcatagatggatggtccagcgaaacgggagtacaagacaccgaatgggatacgagccgtagcgaaaccacgtccagtaccgatgtagcgagcaccgccgaaggaaaggttctggtgaacagcattggcgtagatttggcagacaaacacctcgaacatgaaggagaaggaaccaaagtgcttggccagacgagtagccatgcgccaaagacccctctcagtcaattcctggacggccaggggaacgaaggagatgaagaacacaatgaagatggaaacgacgcaacggttcacccaggcgataatgggggtaagatcagcacagtacgtgggacgcagagggtcagtaatgggcaggttcgagttgtaacggcatgtaatagtctcatgcttcagagcaccaaggttgatcagaacgatcatgaacatctgcacagacaacataatgaacatgttgttaagatggaaaccagggtgagcatagtagaaagacaggaagcgatcgaggggcagctgtgttccgagatagtagtactctctggacagcatctgctcacccataccagtaccaatcttggttgtgaagttcagaatggagccgaaacccaaatcacgacccttaccacactggaagtactcgcaatgcttgatgcgtccaccacggcacaaagcagtcataccagcataaatatcctcgttcaggtggagacccttctgagccttggagataccaccacgcgtcgtcatgaagataccgtttaggaaatcagggtgaccataatgcagctttccaccaatctgcgcaagggtacgagcaaacagggtaccgaacgtctgttccttactggcagcaacgtcaccaagaacaccaacattctcagagaaaatgtattcacgagcaccgagaatggcgactggggtctcagcttcggtggcaataccaggagtgtagggcgagacattgtcggtggtaagttcttcgaactcagccagaacgctacggatcttgagacactcctccaggtagttatcctggttagcgtcaatgacctggatgtattcaccgcggtagaagatgatagagtggttctggttatcggacttgccgtcacccaggatagggtttccggagagctgaattctgaacttcggcttgcgcattccgttgtcgaggagctcacagtgtccatcaatcaaagccgagtacaagcggggctcctcaccctcattggcagggggttcctcgtcaaggtaagcgatttggagatcagggtaggcacggagaaggaactcggtgttttcacgctcttccttgttgaacttggcgtaacgttgcattgagacacagatcttgaacttgcggcgcgccatcctttcaagctcacgttcgagcttctcggagttaccaccaaacatctggacgacctcggggttttcgacacggtaaaggagcttgatggccctgctgtagttcatgaaaccggaaatggttctgtacagggtctgagagcgcagagaggaccagatacgggtacggagcgtgtattcgggagcggcagacttgaaaccgatgcaatagaagggaaggtcgtcgatcttgctcttctgcgcatccttctcgttcttctcgggttcgccgttgagttgtgaggtctcatcagccagaatctttgtgtccttgacgaagcagtcccactcgtgggggtggagctgtttcaggtattccaggagagtaacgcgagagtacggctcatcctcacgaatgatttcacgcaacgacagcagaatcttctctccgtaatgggggataaggacagtgaaagtgggcatgttgtcaaccggaagaggctcaggcatgggggtagcgaccgactgggcaaagaaggagatacggcgctcagcctcactacccgcggggaagaactcagtcttgaaggactggtcttcctgcgaaacgaagaaggtaggagcccgcagggtacgcttgccctcctgttcggagggaacctggtggtaaagcaacttctggacgtgatcaatcgccagcagatgctcacggtacatggagatgatgatggcgttccaaacttgggaaatgagcaccttgggcttgtacttgatctccatgtcggtcgtagccaagaccttcgaatagatacgcttcggtaggcgagagaagatgtttctccagggcgaccagatggagacacccaggtagaaggaccgagccaccgagaagatggtgttacaaatgacataccacagataactatccaggaagaaaagagtcaaatccatgaacatcatcagacccagcagaatctgaggctgggcgtggcaaaggctgttcgggatgtatgtcacaccagcacactgatggatacgcatcggcgacaagatacgcatgggatccttcaatgacagagtcaggaagaagtaagactcgaccagcttcgcaccgaaaacacagatccacagaccataagacatccacatgtcgttgccattcaggcgagggtagctcgccgtgaatgtctgactggccacatattgacggccgtgcttcttcaggtaactgccgaacagacctccaagaggcatgacggagaaaaagaagaacgtggccagagcaatgaagaagtggacgataccaatgatgaggcagattgtctcactgagaacattgttgaaaccgaagaccacgacaccaggagcaagattgacaatgaaaacggcgataaggaacataagacgcttgctgagatgctgagcacctgcccaccggcgaggcacgtacatccactcacagagcgttgccaagatctgaattaatccaaccagggcaccaccaaaaccgacagcagaccaatactttgaaccagcgggcttattgtccagctgctgctggtagttcttggtatacaaggtgggggcgttataagcagtgaagaaccagaaagcacccaggtgaataacccagatacggttgaagttggtgatcatgtggaaccaggaccgagtctctctgtacgtcttgaagaatgctttcttccagtcgacgtccttcaacttggtccatctttcagctggggggacatcgacaagacgagtcttatcctcgaatgagatgcgttcgataccctcggggtaccagaaaagctggttcatatcatcgtatccgatgatcttctcgtgatcacgctcgcggcgaacatacttgccatccaagatttcgtaaccctggtcacggcagaactgatagaggggggtaatgatctcattcaggtaagtgaattcctccaccggctcaacccggctctggcattcaggggagctgtagtaatcatccgcacacttgaagatgaagcaaatgcactcaggcatgtaccggacctggttagcttcaccccagcacagcatgtacagagccaattggcgcacacgatcatgcggggacatgcggttcatgcggctcttccacctgtaaacagcggcttccaggctgttgtcgccttccatggcctccaggttctcctcgacgttttcagggttctgctgtgctgccgccttggccgctttgcgagctttcctggtcttccggtctgctttgcccagcttcatgttggcgaatcccacggcatcgtccaaatccagatgggcagcaaaataccaacggcggtagttggcattgtcaccaccaatgtagtctgcgtgcagagacagaagggcttggttgggcgtcattctggaggcccgggagtccaactgtgtcatcaggtggtcatacatgttgcgcatgctgtccctctggaaaccgaatttgttgaccaagtcaatgaagatatcttcgatttcctccttggagacagggacctgaccatccgatgcccaggctgggtacggctcccgagaacgcggtccaccaggaagggcgcttccgtagtccatgccgtatacgggtgtcgaagcgccagatgatcggttggcgccatacgagacctgcgaagatggcggccggtatccgttgtatccacgaccagcatactggctgtcggcataactgttgtaacgttcgtctccacggccatagtaatccatatccgcagctcgagcagtctctgacctcatggtgaaatcgctaaaggtctccgaatcctcctcagaatctccacggcgtcttccgcggggggcaccatttccttggtcatagtactggtcaccgtagtagtcatcctggtgaccagcatcgtagtaaccaccttcttggccatatgcctgacctccttctgcgttgtaataattgctgttcaagggacaaacaatggtcaatcaacagaacaatctgggtaccgatcgttgttcagaatgggagacgtaccctctatcataatagctgtcaccgtaatcgttaggatcgtaataagcctggccatgttcgtcctggtagtacgcatcgcccccatgctcctggtggccgtagccatcctcgtaatgccctgctggatagcctgacatgttgaatagccacaatcaccgaaccgtttaatatcttcttctaaaccatgagtatcaatatggccttactaaggggtcggatggcgttttgaatgcaagatcctgcaacttacattaacagtggcccattaaaaattactctgatccgatttccagtgaaataagcgtaaacagatagcacttctggcgcaatggatgtgtatgttcagaacgcgtcgaagaatgacttttgatgctggcgcagcgttctttttctctgaaggcaccagtgccggagtgtgtttcaagggcgtaaaactaaacaacaatctcaactcgaaacgatcgtctgcttatttttttctcttgctctgtaggtcgacttccagggcggggccggttggtcgtcgctggagggacgttcgataaacgaatggaagggtgaagtgaagtaaagaacaaaacacgactagggggtgggatttcaaaagcaaaagcctcccgactgccgttggctgaacctgtctcagccaagaaaggcctccctcttctttcctcaaacgaaagcaagaaagaaggaagggagggagggaaggtcgctagtgttgcagaagatgagtcgggggaaacgaagtgtcgacgaaaaaaagagcgaacaggaaccgaaaggaaaaagaggtcgaagatcaaaagaacgaaaagaaggaaggaaggaactaagagacggacggggagggaggaggaggcttgagttggacggtaagtggtgaaaagggaattgattgaccacccaagcagggaagataggactggcgctactccctagtaggacctgggaagaaggggagagggggggcggcgctggtggttattttgggatctggatctgctaatttacttgcgcgcccagtcctgtacctgtatgcgatactggattattcctaaaaaggcccgggtggtgtaaatatggtaagcagatgggcgcccctgcagcctatcacaagcccgcttcaccctcccccattcatcccacctgcaccgggcgggggttaccatcggtattaccgcacgcagtaccaaaacgcgcgtatcgttacccacttttcgccgtccaactctgtccacaacaaccacaaccccccgacgcctcagccctcaccaattcgggcctggagattctttgacttgtcggtcgaatgaattgcggattacttggcagggtcctcggtgattggcttactgccgcctgaggtggctcatgctgcctaccaaactgacctaccagatgtcgtgtcaaggattcgaggtgcctcagataccatggatgatgggccacacaagctggagtcgttatttactttttagtaacgtggaaaatctacgtatctcccctctgttttcagtcatccccttaccctttttgttttcttttttttttgccatcactccgttttccaatatatgatatcaatcaagatggtcaatggtgtaattattacccacccctaaggggggcgaccatcctttccttattttcaataaaggaaacagtgacagctcgaggctctaggtaggagaaggttaagcggcgtgaacttccggcacaacaagatggccagacggcgttggtcccggaatccatgggaatcaagacggcccctgaagccccgacccaccgccaggtaatccagatggcgcaatgaaactgtattcgtacggtatggccttttgtggtgtatcgtcgtgacagcaatttaccacagttgttgtttacgttgcttccgaacggcatgcagggataattttcctcattcctgaagcctgaaaactgtctctcaacgaccgccgcagatatggtcgtggccagggtaaaaatgcgtcgctatgcaattcatggcggttgttaccatcatgatcttgtttatttatgtccatggaggactgtgaacccctcaaggaggaggggatgtttggttcaacttctttttcgggcttcgcttcgttcctgatccaagacctggcacccatggttgccctattgtatcttggtgtgtcagcataatcagctcgtcgccgtaacaaagtaaactactactttgtacaactgccccatattcgatgccaatataaccattgcttgctggagaaaatagactatagatcatccatacagggcattacatccgtcaagcgacattgatctagtggaggtaatatcagatgctctggaactccgtacttacatccacgctgcggtttcattttcaattgagcgtgaagactttgcacgactgaaaattccatttgcatcttttattcgccgctggatttgctacctattgacaatacgtaacctggtagttcgaaaacaaacgagtagcgtcagtcgatttgccacggtgggaagctatatcactgctagccacttgaaaagctcctccgaaccataaccgctgattaaggtaggtaggtaggtaatatttccatttttacttttttccaattatatcttccccccttgccaccaatagttcatacccggcggctatctcacattgacgggtaatcggcccctacacagtagtactagaggacggggttctccatccaactatcaaatcaaggtgctattcttgtggttgacccgatgaacccgcctcgcgagggtggatgcaaacgggtactacttacacagtgagggtagatcaaactttatatagagtggaagaaatagacgcatgacatggtggctttatcggaggtggcaataaatctcttgggttactcaagtgggcgggtgttcattcaaggttaatggaatacatcttcattagcagagaacctgcaggaatgcagagtatggggttatgcagaggattgttttccattcccgaggacagtcaacaacaataggaagaaggcataacatacttgacgtcccagccacaagaagccattcatccattaaacagtggttgctgctttacatggagtaataaactatgccgggtggttccgctcattggtttgattcatagacaggtcctgggagaataagatggattcctgatgagacctggcccttggggagttaggcacctcgagtcaggaatcccaatattataccagatctatttaatccagctgcgaatgaacgacagaccctgatgccttcttttgcttgcttctgcgccgtctgatagacgagatcccgtcagcagcaaaagtagtggtacccgtatgaacaaacacatgggaagaactgaaagttaccttacacggatacctgtcagccacattacctgcatgataactgcgtaacgcaactcagcagaccatgcgttgacaccacataagcaagtgacccgttttttcccagataataatgtaagcatcaaaccactaagattgaagtgttcgaggcaagcgaaaccccacctacacattagacccaactttgagccttggtcgaagtggctgtattcttgcttttctttcggtgccttctttgcttccttagaggacttccgacaatatcttgtttctgattggcaagctaaggttatctttgggccttcccggaaatcgtaagagataatcaggctagatgatcgacaagacaatgtggtctgccttcttcccagcctttttttcaactacgggaaggctggaagagcattgcggtgggtacacactaagcgcttagcagccgactactgtatctgcttcatcttagacatttttctcgcttgtcgccgggaaagcagtgctccgggcggtgttgagaggggaagggttctagaaggataggctgctttcttgtgtgggaatgattgctgaacgtgaagcttatacatccacctagttatctgctgtctacgcaacacgccgatacttgaacgatagagtcggctcccaaattagactcgggcgagcatcaccccatagaggccactttttttcttaagactttttccgctatgatgcaggtcaaaagcatgctcttctgaaaattgtttccgaaatctgtcggtgacatgaataaacactgcaccgagatcgaagggcaaccaagcaacccccggagccacggttccggctaccgctgcaccaccggttgaggttctcacaatatgtgtgtctcatttattctgctactgggttccttggttcccccttctcatgtggataaatgtctacgtttatagattgactttccgtatttctataacaaattgatctctgctatgggcagtacttttgacacatattgaaaatagtttccggccatgctatgctggtgaaccatagaccagctctctatatataaatatagataaatctctgcccttgcaggtgaaattcaggaacacggtccttgtccgaacccctcatgagtctactgctattctaagtaatcgcaacgctgcatgggtggttgaatataaccaacaaacttttaggagtcccaattggcaaatatcagaacaccaccatgcaaacgagtgagcctgacgcctccataagaccatggcgtctctcaggcacagccatgcgattggcattcaacggatattacttgcttatgttgcatatctaattgacttcgggccatgcaatgatggggggttggtgaaccgccaggatcccagccgttcaacctcaatacagcgaacaaatgcagcgattgatccatcatccatcttactacggatactctgtaataatctactgtgcttactgtggagcaagatacttactgttgtaggattaggacacctttccaatacaggtttcataaaaaggaaataaaacaccttaaccaatccctaaacagaaactttgtggggctaggacatgcgcaaccggggaactatccaatcggacccgtccgcccgaccaagaggccaacgggtggcgatttcttaacgccggacaactctcgactggctgaaagggcccggactggtccaaaaggacgacgacgtggaactcttgtctgggaagagggaaaaaagggggtgtgtggtttcaggttccatttggcccgacctagaacgatccccggcaccaccaccattttatcaacctccatttattgtgccaatcagcaagttgattctgattcctctttcgtttttacaaagtaaacacacatcaggttttgtaaatttgtatcttttgtttccacttaagttacaccgcttggtttctgttagccgatggataagtactaggtagtttatagggttgggttattattatcttcctcattaaataattattaatgatcgctaatggacatggactccttatccgcttcggtactaagatagatactgaatggatactatctatatcaatcaatcaataatgctggctggacagggggagtctcgacttccacagaagtgagtagatactcggtatctcctgaataatcatgaaataattctgtcgacggaaaaaggagcgatcagcatcagacactgcacggtcggtcatgtgcataactaactacagtcgctaatgtagagagagaggaagagagaagaggttggatactgctacatatcctgtcccgtgctgtcctgccaccgacggtctcagtaggtacagatgctagcagcctagcatcgccacaccgatataccacgctaactatgtacatctgcaactcgatttcttgaaactcgagatcggcatgtgtcgaagcaacatcgggatccagaggcacggcaagtcacaaagtttgtttggctgggagtggggtgattagcaaccttgcttgcgcacagctgttctgtctgtctgatctgcacggttgggatgttgtaaatagatactttgtagcttctctccgcattcggttattcaacttgtttacagtgtgctgcgtagctacgcaactacctccgcacttatggagtacttgtggctcttgtgggtggtatgatatgcacctgcgtttggtatgttcagttgcgttgcacgggtggaggcaacggtatccccaaagcttgatttcatgtacactgtatgcatttatcgggttctgcgttggactgtgcgatgctgcagtgggcaactctttacctcatgtcttagacctgatggatgcagtgcgacatgggttgttgtgcatgtggatggttggtctcggtttgtctgctttggttcgttccgtacctctcgtgtgccatatgatgtggttgtgcttggtttggctgggttggacatttcggcgtaatggctttgagacgccatccggtatatgtatcgggtatatgcttgggagcttgacatgtccttcggttgattgagcactccttcgaccatttaatgctatgtggctggtgagtgtaaacgctctcttgctcgatgatatatagtatacccgtgggtatgtagtagtagtgtatgcaagccactatcacccgggctttgcggtatggtcttctatgcatatgacagtgtctccagctctgttctgtcagtttaaatgtgggctactagtagtacatgcttttggacgagtaatccctgccatgcacttcggtcctgccatggttgtttgttcaccccgatagactcggtgcgtccgatctgtgtccctgctctctgcacccgtgttttatatatgcagcggctacgatggcgctggtgatatcatcgtttgtcctggtgaccaatgtttcacatgtctagtgggtttatgcctgttgctattgctgtgtgacggcgtcgttgtccacggttgaaagactatgtttggatacgtttgtatgctgcccaccagagatgttgtacttctctactcgcttcacgtcggtactgctggctactagtagtaccgctatatggctattcattggtacaggcaagtgtctggtcgtgcgtatagcttgcgggtgacgatgtatatattggtcgactacagaggcggatgttaccccatcaacataatcacaggcagtaaagctataggattcggccacagcatgtataggatttaacgatagtgagtacatagacaccaccaatcaaccagtaatatagaagtagacaacctgtctacatgaccactgacggcatacggaatggttgttcatgatctacaaaatatgtttaggctcataagccaagaagttgagcactaaatatataacaagcccgggtggtctagtggtatgattctcgcttagggatacaaacccaagcatatctgcgagaggtcccgcgttcgatccgcggctcgggccttgtcttcatctttttgcttttatttttcttcctcgttcatcaagaagacaatcatttcgtatcagtaggacttcaacttacgacatgagacgaacaaagttcctggctctctggtaaccacagcatcccgcatccgccatagaaccttgaactcaatccccgccagcaggcaatcccgtggtaggcgaaccaagtcccgaggttgccgtgccaaccacttctctttgcccatccatcaacattatctagactacttgcatagatatatccagcaccagctcatacgcaggtacactacacccacatctgcaagcccgcagacaccacatacaccaagccccaacattccagcaggtgcagtctgacatctcacatcctgtcctgcaggagtgggaggagcaaaagaggagcccttgctcgtaccacaccagcagcagcagccgccgcaacgaacaagaagacaagataagaccacaatggctcgactcaacccctctagccccacgaagccagccaagctccaagagcgccgaacaccacccgcgcagaggaatctcaaccgcacagcgaccatcaagcgggactccagagacaacaaatacaccgcgacagccaaggccaagacagtagaacaatgggcagccgccgacgagacatggacaaagagccgatactccgcgaccacgccagcgatcgaagaaccgtcgcaaaggaagaataataacagactacaaagatcggggactgtttctagtggggtattcgatatcttttcggacaatggggacgagcagagtgaaacggaggaaagtagtttctcgtcgactcggtctttgatgtcgaatgagggacgcactacggatcctttgaagctctcgcagatcaattctttgttgcttccattgtcgcagcagtcgcggaataataggccgccgcgtaagtcggtagggtataattacgacaaggaaaatgaccctatcgatgatgaggcagaggaggcagatgagagttcgggtctctcgagaaactcgtctactgcttcgaaccgagcgcctacgcgtaatactaacagagaagtgcagccgcggggcaggtctcggacgaggtatatgggatatcgtcgggaggagacagagtcagaggctgaagaaagcgaagagaataatggctttgactcaatggatgatttcattgtcagcgacaacgaagaaatcagctatcatgagacgtccgacgatgaaagcatcgaagaagaacaagaagagaaacagccaactccttcgccgcccaggactagaaagagactgcttagagggagacgaccccgtccagaaatagagccagagacaacacctcaggattctccgcgtgaaagcctcgatttagagccttcagtgcctgctacgatgacaatggaggttcctaagctagaggcaaagcccaagagattgtttcaaagcgagctggaaatatccgagaagctgaacaagctgaagttggacaataaagacatagagccccaactggacgagaagagcacttatgagtgagttttaatggagacccccagccacccatatatgtactaacaccatgtagcagtatcgaagaagtagacgcccccaccaagaagctcccatcaagggacagtgttcaactggagacgcccccatccagtccaacaaagggacgcagtctacgatctccatccaagctgaaggcccacataccaccaacaccacatcgagaaagcgtcgacgcattctggagccaggaaaacactaacaactggatcgaccagcactctccgtgcaagatcgacgatctactgcgcgaatttgacgactccgactcggatgatgagttcagcgacagggagattatgcccaagaccgcaacaccgaagacgacgaccaagtcctcgacaagaacacccagcaagacagcaatgaaaaaggccgaagcggaacagagaaagctcgagcgggagcgcgcaaaggcattcatggagaacagacaagccatggccgagcaattcttcaaagtcctcgacgacaccgtaaccgacgggcgactctcaagaatgaccgcctcgacaggaggcgtgatcatcgaatggaaaaagcgactccaaacgaccgccggcagagcatcctggaaatgtgttaccccgtcaccgaagaagggaggagggccggccatgccaccgcagcattatgccaccatcgaattagcagcaaaggtagtcgactgcgaagaacgcattatcaagacggtcgctcacgagttctgtcatctggcgaactacatgatctcaggcgtgcatgataacccccatgggacaagctttaaggcatggggtcgcaagtgcaaggaagcaatgaagaaccatcctgtctatggtgggaaagtcgaggtctcgatcaagcacgactacgctatcgactataagtacgtgtggcgctgcgtgcactgcaacctagactatggacgtcactcgaagagtattgatcccaagagacatcgatgccgatgccagggcgtcttgcagcagatccaacccaaggtgaggaatgtgtcgccattgaagaagtcggtgaacgcgccaacaccgagtgttaggggtttgttgaatgaggtgggccgtgtgttaaatgagacgcagaggcagacataaccagagatacttgaggatgatcttgtggatgatgatctaggaggtataatatttgatgtatgtcatgactgacggttgaatgatttgttattagcgatcatgtacatacatacagcttttcgtttagttctttttttccccctaggtgtacaaacagaccaatcaagatacatacaccgattaccgtgttactcttatatgtttgtatagagatcctttgcttttatctaacctatccaagtaactacctagtacatacgcataatggtatcattcctcctcctccaccaaacattaaaagacaacaaagagccctccctacccaaacaaatcccaatcgacaacaacaaacccatcttcatcaccagccaaaccctccacacaccccccaacaacgccctcctcgaccctcaacccatccacatcccccctctccaaaaactccttaacaggcacattcccccaaaccaccaaatcactcccctgctcctccaacctcaccaccacaaaccgacaaagcaccccatccttcacacctggattcaccgaccccaacgacacactccccgtgtataccctccctccccgccattggtcccgatgaggcacgctcgttataggagtgcggaattgaacagtatctttgctgacatcgttactgtcatggacatcgagaatgtggtagaggatggcggctttatcgagggtttctctatcttgattctgggtggtggtgccgccggtggcagaagcaaatagatcactatgcttagataatgtttcctgacttgtgctgtcggggacgtattcgtttatttcgtagatgagggtcgagagggttgtcggggagaggtagagttcttggtggtccgggatttggcggaggttactattccttattatcagtatttgagggtttggttgtggagaggagagagggaagggaagaagatttacctggcatctaaccagcctttgggaatgaggcctttgatggcgccgccgtagaggggttgcgaggtgcatgttgttgttgctgttgttgaggtcatggtgggatggatggatggatggatgatgctatggaaatgggtgaatgggatgtgtggtgtggtggtggtatggtgtggttcggtgagagatgggcgatggttctttctctgtaggcggatgtatttctatgtagtagtaatggaaaggagatgtatgggatgatttgtgagtatgttgtgatatggaggacaggaaaagctgagctgcgcggagcggaactttgatggtgggggcggggtgttcgggtcgccggccgaggaacaattatagtagtagcttcaagtaaagttgatccttcgtatttcatctccgtctgatcgtatcttgcaaatatgtatctgctacatgagtccccgtctactttcacgcatattggcaatctcagctaaggagtattctacaatcatggagctatgataaagatagcagcataacagttaaataaatggaatgagatggaaacagtatattgaataaaattactaggtttcatgaagcttgtatatattggattccaggggatacagtatacttccatacttgaatcccagctcagcagtcgtctcgagaatgattcaatttgttgtatcctaatctgaagctcctatcatcgataattatcttcataacaacaccagcaattcaacatcctaaagaagtaacaacaatctgacctgccaacaagcagcgacaactaatgcagtgctatcaagtataaaccaagccctacatatcaagcagctcctcaatatactcgtccaacgcaatcatccgaaatcggttcccccatttcgcccggaattccttccggcgataggcatagctcgtcacttgactgaagctcaccagctccacggcccagccccggctcagcgcccgctccaccatcttcataaacccgcccgagaattcggcttccgccgcgtctcccgtggctaacacgatggttgccggttcgtccgtgtctagcaaactttcgagaatcttcagatgcagaatttcgtccacaccctgctcgacccagcgttcctctggtgcttcgttcgtttctgaaccgctaccagggtcgtgagcgccagctcgaggattcttacgaaatcgcatttggcgaggagtcatatgcttgaccttgtggacccggtcgagaatgttggcttcgtaaccaagttgttcgccttcagtgatggctgcaaatcgatccgagcccaccaagactcgtttggcggtgggccggccacgctcgaggattagggagaagttctggaatgacaaaggcaatcgacggatccgcgttttcaccggaattttgcgcgatagcttcaccgtatcgtgaaacccaaccataatctggcccagttagtacaaacacccaactgttgtcaggtcatacatacattagacatgtcaacaaagacatggatggggcggcgtgtaacgtccgtctttttaggaatcaaaggccgtccaacctgggttacggcatctgcatagtcggggaagttcttcaaaagcttagtcaagagaccaatcctccgatcagccgtagatttgtatgcgacaggctgcacccgtagcgtgccagagctgtgagggttcttcacagtcttcgggggaggtgtttctacagactcatcgtaggaggaaggcggcgtctcatatggatcacacatggcacccgccgtgccgacctgcggagggaccagcgacggagtgcctccactcttaggcagagggggatcgaagacgctgaggttgccatcggactcggcttccacagcgctctccgatgtgcaagactcatctgcatgcttactcagtgtagtatctggtttattaggagctcgtttcccggctgcggtcttggcctgcaagttgcgggacttggagacaccggagacaggtataggctttgatggggtgcgaggaagcacctcatccaagtctgcggagtcgacatggttactcaaaggtcgtttgagaatttcgatacgtttaggcgattgtggcgtgggagtaggcgtgttccgcgggatatcacacggttcaactggtgggcgaatggccgagatgccagtactgcctaaaagctcccagagagaaccaaagtctcctagcttcggaggggctccttcaccaggccttacctcgcgcacatcattagaggaagaggagccatcgttgttgtttgtctcccaagtaggccgagcaattgaggcggactccgggtggcgataaggaaccgatgagctaccagtgccgtaggtcggggtgcggaggagattgatcaccggagtgaaatcccaatttgaagctgattcaaacgatgatggcattacaggtatgagggcggaattggggtgcaatgatggtgatgtgtgcccggcagtagctggagcagtgattgataaggcgagcggggttgcctccagagataatcacaaaccgacgggctcgcagagaacgtcaagcacaaacgaaaaacggtagatcaaaatcgcaaagaaaaacagagcaaatagatatagagccgatcaacatggtggtccagcagacctaacgagagagagtgttggcgccaaacgcattggaaggacgaagagagggagagcgtcaggcaggacaacaggcagactcggcctgaagggactcgccgcgtggcggtgaacagctggccgggtttctgctggtagtcaccgcttgctgtttacactgcaaaaacaaagctatactgctttcagtctagctcactatcggggatcgcttgaacaaaattccgagaacattcttgcgctaaccccatcgagctacatgcgatcatgcagacgtcatgactaggggcactcccgaagaggaaagtctggaccagatcggcgagttctggcgccatccgttttcttgaccttgtagttactagtactccatacaatgtgaataatcccagatatcgtcatggcccgatgacgcgcatgcaagatccggcgccctgatcgaaaccggggtactcccctcatgatgacgttgattcgctggtatctcttccagaactgcttccccccggtttcactggctgtgttcgcattcatcgatggcgtagccattcactgccaggattgtcgacgtcatggagcaacttgaggcctcacaaaaacttatataaagactctttggcaccgtcgaagtctttctcatccatcaacaattcaatcatctacaaatcgcaatccaatctaaacctcaaccactttccaacacttttcaacccttttcaacaaccactcaatcaacatgtctgactctggtcgcaaggatttcaccaccagtatgtctcttcttcctgcgctcaggcgcccccgccccgctggcagctggcttgcgtgatgcttaccctttttttgcagaggctaaggaggagatgactcctgattctgccaagtccactcaggacaaggtcaaggagaccgtcaccgacaccggtgaccgtatcgcccgcggcttccagtccgacgacagcaagtccggtccccaggaggctttcgacaagactcagcgtacccacgacaacaacgcccacggcggtgctaccagctcggtgtcagtattcacctaatcgactatgccgtcgctataaaagcatttaactgacagacttgcagtggcgacaaaatcaagaatgccgttggcctgggtggtaactaagtgcacgccacaccctgattacaatcgatcgacgagtaatgaccaacaacaatatcgctctgtgatgcatggatttcggaggatgatgggtcggcggctcacggcagattgttcttttatgattttatgagttttgacgataccacactttgatagtatcacgtctcactagctcaatactagtcgaatttttgataactctttcaagtcttatatcagtagcgtagtgttcacttctcgcctagcttctcgcctagcttctcgaacattgtgtctcgttgctgagtgagtgtctcgagttcctgctctagctccttgtattgcacctgagcaccacggacgtcttttggcagatcatggaatttctggaccctctccactagtgctttggtgctctccagcatcctgatcacgccctgctcttccgcaatgacttctgcgagcgtaggtcccttacttttacttctctgcagggaggcaatccgatcttgatactcgccggctttggcgttgagcattttggtctctcttgtccattccgctgttagcgctgggagattggccggtgtttcatacacctcgttggtcttaaggtctagaagctgttctcgcagcgtagcaagctccctttctaagtagtcatgtagcgcttgtactttactcatctgctgctgcgcattgaattcctccaccgtgagctcaatgattgattggcccaggtctctcgtatttgtgcccaaagctcccagtactgcagttgtctctgccaggtcgtccaggtgtcgtctgccattgtcgtcaagactatgttccacctcatccagtatttctaccttctgcttttcctcgccctcctctcgaactttgaagctctcgaccgcctgctcgcgagcctggtggagaacggtggcctcctcatccgcagtatcattggcagcggctagtgccaagagggtgcgcagagtatcttcatttcgctcgaaactggggaccgggttcggtgcgtactgacgactgagccatgcattgacataggcccaatctttggcctggatggctgcttggcgcgctttggcgggggagaggagggggctatccatggcaatcaatcgtgttgttgggttttaatcggatattcaagagctgattagccatgtaatgaccggacaattgagaaactggtgcttttgcgagattgcggatggagaaaaaggagaggtccgaaggttgattcaggtacagggacggatcaacaacccggccggggaaagcgctgcgccgcttcccgcctccgcttcagtccagcgggacactcgcagcgaccacccggccagatagctcaactaggccaacagtacagtcccacgatggcgagctacttccctccaaacggagtcatctccagccatggctctactcgagcatcttcaccagcttcctctccgctttcacccccggtacaccagcgatccaatgccttgtccaaccgactgacaagtgtactttcggcctcctatgcggactcggacattcgcgatgcgctggagacactcagcctcagggggatacacaatacggcagaagttcggagacagttgcgcttggatgttcagaaggaagtcgtcgatagcaatgccgagatcgtgcgggatttcgggctcgttgcggaggtaagatgcgcctatgctgagagatctaatggttgctaacttggcttgctgtagcaattgaaacggataggaactgtaattacgaacttgaatcagacttgcgatgagatgcgcaaacatatcgtctcggctagacaggagacaacgccagtgctcgaggaagcgtcggctttgatgaagcagagaaaagaggcagagaccaagcaggagctgctggaagctttcacccaacacttcatcgtccccgatgaggacttgctgatcctgacgcacgccgaggagcctatcgatgaccatttcttcgagattctcgccagagtcaaacaagtctaccgggactgtgaagcattactcgggggtgaaaacgagcgactgggtctggaactcatggaaaagagctcaagaagcctcaactctgcctaccagaaactctacaggtggatacaaaaggagttcagatctctcaaccttgaagaccctcgcatcagtagctctatcagacgtgtcctgcgagtgctagcggagcggccaagcttgttccacagctgtctggatttcttcgcagaggcccgagactatgtcctctccgatgccttccactacgcccttactgatgccgtctctggcacgacgggtgataccaacgtgaagccaatcgagttctctgcccacgacccccttcggtacatcggagacatgctggcctgggtgcattccaccaccgtctccgaacgcgaggcactcgaggccctcttcgtcgccgacggcgaagagcttgccaaaggaatccaagccggcctaagcagtgaaccctggtcccgcatcgatgaagacaaggaagtgtctttcgacggacaaaaggctctcagcgacctagttaatcgcgacctcatcggtgtctcccgagccctgcgccagcgcgtcgagctagtcatccaaggccacgacgaccccgtcacctgctacaaggtagtcaacctgctatccttctaccaaacgaccttcagcaaactcctcggccctcaatccaacctcgccgagctcctcgagaccctcgaaaagttcaccttcaagcacttcgagaccctcatgcacgacgaagtcaacaacatctcaacagatcactcagccctcacacctccagcagatctctccgcaccccaattcctccaagacgccctggaagtcctcacctctttgatgaaaacccacgaggcctcctacggcgccgaccccatccccacccccggccctaaaaccacatcatcatcaccaccacccaaggacaccaactccgaaaacaaattcacacccgtcctccactctgccctcgaacccttcctcgacctcgccaaatcctctgccgccgatctcccctcccacaccacccaaaccatctacctaaccaacatccacctcaccgtccgcacaaccatcaccccctaccccttcgccagcaccacccacctgtccccgatccaaacagccctctctaccctccgcacagacctcctcgatatccaatatcgctacctcctcacctcctcgggtctccagaccctcctcgcagccctggaaccattctcccctcaacaaccaacatccacagaccaacagaagcccaaaccaaatatatcagacatcctcaccctcccggccttccagccgcaggcacttattaatatcagccagcaattggacgacttcctcccgagcgcgcttatggatgctacggacaacttgaaacgcgtggccagcgcgacgttcgtgaagagtgtcacggaggatgcggtcgaggcgttctgtcgggactttgagtttgtggagggaatggttattgcggcggataatgaggcaaggggggtggatgttggtgagaaggcggtggaggagggaggggaggatgaggagggagtggagaaggggggattgaggaggttgttccctaggacgacgggggagattcgggttttgttgagttgatttcacttcttatgagaatatcattcaattcatgcagtggctaagtaggtagaaggttggggtagtgggtgtatatagtacgctatgtgtgtgtattgtttctgatagcatttgtttgttcgtttgtatgtgaactctagcttatatggtattttgtatgtatatatatgattgctagtagatgcagcagcaactctagacctgtcgaatcataataccatacggatcacgatccttctcactaacatccacaacacactccgcatcctcaaagacctccttcagcaccgcaccacccttcaaaccctcctctctctgcgcctcccactccttcttcaccgcatctgccaacttctcccgcatcactgcacgcagatacccgcgctccgtattcgaatgcgccagcgcaaccacaaccgacccacgctccacggccgccaacgcctcatggtgactcaactcgccagtgaaaagcagatcggggatcttcccgcccgtgcccttcagcaggatactcgacccggagccgggacatacgccgactgtgcggatcttcaggtcctcaaccgaggcggtctgcggaatagcgatggggataccgccgggatatccaacgccctgggcaatgcggtccacgacggcagtcaggggctggggctcgtcgaaggtgacgatgcgccccattcccgctgagtccatgccctcgggcactgggggcggagaggggatgattgtggttcggacatggggcacgggagtcgcgggggaagcaggctgtgggtcggggaaggtggcgtgggagtagtgtgttgaggaggatttctggatagtgggcttggtggtgcttgttggggcgatggcgccggtgacgatgtcgcagagccagtcggccatgccgccgggggttgcgtcgatggctgtgtgcggggagtagacgctgatgccctcttgggcgagacggaggagggatgattgttgaggatcgttgaaggtgatggatttgaggccacggaagatgatcgggtctgcggaggaactgtgtgagtaggtgatggggtgtgcaggtgtagggggcattgcgtacggtaggctacgactactgagtcgcgacgggcaattgcttcgtctgcaactgctttggtgaggtcaattgctaggaggactgagtttttctgtctgcgggtgtggtcgaagggcgcttcgaggaggactgggatataaagttaatgggatggaagattggcggaggacggatgagagcttacggccggtgttgtcccagctcttatctgccaatgactcggggtagctgttgcattgaagaaattagccatatgtaagcttgattgaccaatataggtgacggaaagcatacagcttcctcatggagctcaccactgcctgcgtgaatggcgatgaagtggggtatgaagcagacattgtgcaatagaggcggacggattgccgacgaagagagttcatagacaacgctgtcgttgatatggaatatgcgatgatcaggtgcagttccgggatgtcgggctgagcagcgcaaagttgagctagaaaataccccgcgaacatgaaaccagatgaagctttagaagaagcgatggaagccgaggagaagctggcgccacagccaacctaatccactctggggctagttcccaccagccacaacggcagctgaccaatccgtttcttacggtacggtacgggagggaagagaaagaggatcatttccatcatgaaggagttccgtcatcctacatcggaagaagcttcaccgcgctgcccacccttctgactcaaaccgcctttgacgacaatcggtcgcttcatccataatatacttacttaatattcaactattcaactatcctatactacttccgataccgccgtccggctcgcttgatgtactcccgcaccactaccctgttgagcagaagctgccggtatcttctccgcacccccgtccatcacaagtcaccgttttcgatttccgcgcgctccttcgcggcagtcaacgcagccatggccgatgctacctcgggcgttacggccgactcgctgaagagcaaattgatcgatcagttgcaggcgcagcatgttgagattgaagacttgtcgggtatgagagcgccgtgctgattaattgcatttccaaaagagaatgaatgctacacaactatatgatcctaagaccagatgttgacgatactcttgtctacaggtggttgcggacaggctttccaggccgtcatcgtctccccccagttcgagaagaagaccatgcttgctcgccatcgcctggtaaactcggctctgaaggctgagatcgctgcgattcacgcctggacgcccaagtgctacacccccgagcagtggcaggccctgcaccagggctaacctctagtgcaaagacggaggctagaggaataggaaatgaatatatcctggggattgacatgccctcagagggcatgccgtcgggcgttgggttattcggcatcatggctttgcgctgccagttatgacttatgcttcgctggctgtgtttctgaaaatagatctatattgcaataaatattatgatatattgtcatgtgaagagcctaagtatataagttttttttttctcttttatatgctgatactctgggctggtttaggccaagaccttctcggccgcagagactacaaattctgttagtaacaaacaacttatatcctggctactgggatcataccgtcaagaccgatgttgtcgggctccacgaaagcctccttgaccttgccgttctcgacaaggagggcgtaacgcttgctgcggttgtttccaaagatggaagcgctgtcgaaggtcacatctagggcctcggagaacttgccactggggtcgcccaagaagcgaatctatgatgtagcgttagtaaacggtaccggatgttattcgtacaaccaggttataatatcacttacgccgctcttgccctcggggtcaagggaggtagcccaagccttggtgctgttgtcgggttaaccaggataccttcaatcgacggatgacacagtacgtgacccgtaacttacacgaaagggtcgttgactgcaacaacgaagacctggccggcctccttcagcttggggtggttgatgaatccaggaacgtgggtgctagagcaggcggggcctaatttccgccgagggtggaacaattagcaatctatcactggggaatatctctcataacagcgaccactccttttctggattgggacgacaatatcgggactaataaggttacatactgaacgcagcaggcacaccgatgatgacgcccttgcccttaagttccttggcgaggttcaccttgttgccgggcgagttctcaaccaggacatccaggtccgggatggcgtctcccttctgaacaaaagcgggcgccgtgctgtggaaaagggccctctgggacaaggcgcgagggacaccggcggtaagacgacgagccgcaaacatgatggcgagaaggaggaatggatgttaatttgacaaggaatgtgtttgatgtgagaaattgtataaccacgtcggggggttgccacaggaagttaaaatgagaaatgagcgatatgggaggtggaagggaggaagaggttgggagctggatggaagttgattattgttgttcctgagctggtggatcttcctcagctttctccagaaataacaaacattaatttaaattgctcccgttcgggaggccggaacattaaaaacattgcgatgatttcgtcatggtcgcttttcggctgcagcgcccggacatcaaatggagaacgtggggacggacttgctaagaaggacgagggggatatgcaactttctactatcattgctggtcgaatggtttgcttgaaacacctggctgccctctgcacataaagccacatagttgtgtggttgtgaagagaattccgagccttctcgctggtttcaaatcgaacaatcatccacgtgaaagatggcgaaaaatggcgaaaaaacgccatatccagggcccactcatgtatgtctacttacatgtctcttcagattcacctcccccggcatgtggaagtagacaccgggcggcgatgaagagggggttgaacatcgaatcaatcataccgggcggacatcgactccggcaagatctcatggaccagtctcgatcgctgcctcagaatctctgacagcctttgttcccgccgactgacggaccaaccctgcattgtctgtctctgaactgcaagggttcatttgcagcattcaagtggctttcgaccgggggtggttttgagtctggactctcagcagcacctccccatctggaaccttggctgatatgatcttattcatggcttcatgggcttggtgagcgggatgagacgagcatgagaggacagacaggagtcggattaaccagcagttagttgggcacttactgacatagttgtctcgcataatattaatagtaccagcttccttagaactagtacatgatgttcgggaggtggcgtctccatgatccatactactacatagctccttgtgctaaattaagagcccatccgatctctctctatcacatcttatggctcaatggggaagaccgaattagaaatggccttgaaaaggtctgtctctgtctttctttgtcatgtcgttcttacttacacctgataacctgttagttgtaatcatctctggatcctcgtatcgtcggctaatccacgagagagggatctgcaactgttgccgaaattgaggcccctgaggagggaaaccatctgtagaggaaaggatgccccaacagagcaagatcgtgcactgaaggcatactgtatttatttgccagaatgtggtccagttgatttgattctctgggaccccacctcgtacaaatccgctggctaccgcggggtccgagaggaatgaacgaaggcaaaaaaatcaaggatgatgggctgagagataaacatcaaaacggtcattgcttccgtccaccccctccctccgtataccacaacacggccgttcgggttgttgatcgctgcgcagcatccaaggcccctccacctgaggcagcctatctccatagctttccccccatccttttcgtgcatcattctgcatccaccaggcgcactgacagcttttttagaccggtaattccgccagaagaagtggtgggtactggtcagtcttgcttgttgccttccttacttggtgccttgtgcatttgattttgggtaatggatattcttcttctgtattttcaaatttatttaccctttttttcttgttcagtgttcaaaacttacctatttgatttattattccctttctttttcttctaccgttccttcttcgccctatactttatatgtatgcttggaaagtttaaaaggagggggggggattgtaatttcttggtgaacaatattgagttgtctctccccattagttagaccccgggggtctagagatttagttactagtgttagtcttcgttggctcagcattaagaattttccctctacccctcctatggatctccttgcgtgaggtcatccccccagaattagagacaagtcctgcatagaaacagccgcaagatacccgtcaaacggagaattcacattcaaaatgcctggaggacaagtagaaactagagaaattgaacctccccccatagtcaagtaagattaaccggaaggggtaaagggacagagaaatgacaacccaacggtgggttggaagttgtggctagtgaccacgtactcgggggggaagacggaaaacccacttggggcaattggagatgcgtcgataacaataccactactaccactgctacttcatacatttaactactgtagatactacaagaagaaactttgctgggttgggtgaacgtgaacctgattgccaaatgagagtgagccatggaaagcaaattacagaaccaacttacccacacgcctgcctttctctaatccacccccaactcagccagcagcaacagcagcagcagacagagaggggggaaaagacaagcccctcggtatttctctctttctctctctctctctctgctacctaatctaaccgaccgttgactgatgattattttgttttaattgatgttatttgatttgactaatattttcttttttttttcttcctttcttttttcttctcccccattattttcttttctctcccttcttttaaaggaaaagggcaacaagacaagaaaagaataaaatcccccaaaaaatatcaggctccaccaaaaggagggactggaactaaacccgaacggcattgactaattaatccccattcctcctactcactaacacagtctaactcactaaactaaacttgcctaccaccaccaccatctctcgaccacgactactaccttcgctcgtctttttctttctttccctccattcctcttcttttctttcgtcctcttcttcttcttgtcagttcattattctattcctatctatcagttcccccccctttttccttcttcccttcgccacccgcattaatttgacgactggctggtttttcttctttcccgtccctccgcccgtttctcgccttgcgacttgttgagcctgttgcttgttcgatcggtcgcgacccatctagcccacgatggacggtggccagacctcgaccagcgccgcccccgcgggcaactccagcgattttgtaagtgtcgccctcgatagcgaccgttgtgaacctcatgatcgctgttatttttctatgcgactatacttcactttgctaacacgatggttaggtacgaaaactctacaagtgagttcttcctcttttactattcccctgtaccttgcctgcgcttcatcactccggttcctcgtccgccgggttcacatcctcgactcccccgggctctcgctgtccggttgtcgctgcgccctgatcaaacttagcgatgctttgcataatatcgacctgatcatgcgtactaatactcttcgcaaaggatgctcgaagacccatcgtacgcggaaatcgtgcgatggggtgacgaaggagacagttttgtggtcttggaggtacggcgctctcttcgcatctcccacccccctcctcctttctgcggtcgcaatcctcgaggctgaccaaaaactgcattcagtgcgaaaaatttaccaagaccatccttccgaagcacttcaaacacagcaactttgccagtttcgtgcgacagctgaacaagtacgacttccacaaagtgagacagaacaacgaggaaaacggacagtcgccatacggccaaaacgtaagcaatctgcgcttggtagcagtcgatgcgataggtgttaactgtattggctcttcaggcctgggagttcaaacatcctgaatttagagcgaacagcaaagagtccctcgataatattcgacggaaggccccggctccgcgcaaacagactcagagcaacgaagactcggtcccgacacaacaaatagatctgctgaaccagcaaatagtggctcaacaacaacagattcatcaattacacgagcgacacacacggctcagtgtcgatcaccaactcatgatgcaggaagttatgagggtgcaaaagaccatcctcaaccatgaaaatgtcatccaccaggtgatgacttacctgctctctgttgatgcccgccagaggcgcgacagcaaagcggctgccgtgcctttccaagcccagggtcaagcaggctcgacactgagcccttcacaggtcgcatccatggacgacgagccctcgtcgcccttgcagcatgcctcgaagctcctgaatgatatgaacgccgaaatccagttcaacctagggggtctagagtcgatgggcgagccaccgaaaactaccgctgtggttcctacgcctgctctggagaccgctccccgaaatggtgtcgcgcggccatctgctgccgacgcaagtgcgaatactgctatggtctattccaagatgaacggagagatcgagcccgtcgtctacccagtgggcgccaccaacggaatcgatcctatgtacagtgaacatgttaacaacgtcccgtatccgatgcctcccaaacaagagattgacgaatctcgacggcaattccccgacaaccggaaaaagagcgcaaatgtcgatcccggttgggtacgcagcccccatatcctgctagtggaggacgatgcgacatgtcgtcaaattggcggcaaattcctgtattctttctcatgtctgattgataccgcggtatgttatccctttcgggttgctcggattccgcccgactgacatagctgcagtttgatggcctggaagcggtgaataagatccaggatggttccaaatatgaccttattctcatggacattatcatgcccaatttggatggtgtttctgcttgccaccttattcgccaattcgacaggacccctatcatcgccatgacttccaacatccgcagtgacgatatccagctctacttccaacatggtatgcccgccacccctgaaacttcttcgtacggtcactctctattgctattttagtgactaacacaatttataggaatggatgatgtccttccaaaacctttcacaagaaagagtcttctcgatatgcttgagaaacacttggttcacctgaagacgatgccgcagagcatagaggctcctcaatccgcagcagccgtaacgatggccgcgcaaagctcggccgcccagtcagtcaaggaggacagctctcctgggcagtcgccagcaacatcgatgactgcttggcaatcacccggccagtttccaggcatgactgccgtggctcctaacgtcccgcaagtccaaagccaatatgtacccaccgcccctgctgcggctgcatatgctgtagatcagaacggagttcagtatcccgcacccgcggtggcgcttgctactacggcgcctgcggcagtcaggccgcaaccacctcggcgacagctttcggaaatgtcgagtgctaccgaaaaccccaatatggccaaacggccacgcatgtacgctcatcaaccgcagccaatggtgaaccccatgcaagctgcacgaacgggctagatggagggtctttcaagttgccccttctcatctcgccctacaccagacgaacgatgaccttttttccaatttcctttcacacccgccttttggcatctctcacctcactactgctacgcctctccaccttacgatttctgttgttcttctcgtgatgaagtcttagccgtacgatactgttgtctcggggagttgtactgcttctgtgttattttccagacgttgctcgatatatcccggtgttggaggcgcgtgttatttatatgcataggttgcgaatcgttttgcggcaaactgttgcgttgctttcgtttctactgactggatggccgatgcagtcgaaaaatactgatactcggagtatggcatccagataccttggttttggcagcaggaccttgggctggcagcatgtagtgtctattgtacgcgtcattctggacctgatattccatttgttggggcgctttggaaccattctctgtcgttacgtggaaggtcaatttgctgtgggtcaaatagttagctaagcatctgatgctcaacagcagggttgttgggtcaggaggtaggagtctatagagtcaaattcaaaatctattattaactcccatcatttccaaccacatagagactatttcacgctcagcacagttaggtctagtaaccaagtgcgatttggaatatgacgttgcaggcgcccaccactttcccacaccagccccggaggttgaattggtggccctccaccagttgagcggaggggagcatcatcagcaccaccatcatcgtcatcatgcgacccaagctaaccgatctgcccacccgatccctccaagcaggatacacctccgatctggcgttcatcagctttatccacgacagataaggttctagaccgtcggtccctgaacaagggatattccttcgagtccatgagggcccaggccttcgatggtgttctggactctggaaccccagcactcgctaagccactgtggctgttcccccttctgcaacggctctttgtcacgtgaagcacatatcacgtgctaggtgaccaggggaagcagccgaggtgaggtggggggtcttcaaagtaggagtagacaaacaaacaggacaaacaggccgccaggtgggatgaagagaagaagcgtgactctgacttcctccgcccgacggcgccgggcttggcggagattttgcgagttgaacgcgccctgggcgaacctattcattgttgctgtctgattgtgcctattgtgctaggtgactttttgcacctgcaatatctttcccactttcccctgttactgattctttctgaaattcttggacctacactgtatctgagtctctttgtgattgaggtgggggtttttgagaaattactcatcggtcgatctacataccgttcctgatgtgagtgcgcaattgtgtgcccccggcgctctttgataggagtgatggattctggatatttctgacttgctaacgcttctggtgtatagatgggcccgaaacaaaaaggtggtgcggcgaagaggggaaatgccacggaggaggtagaagagacattgcaggctgttgtatgttgtttttcgaatcgcagtgggaaagtggctggttcgtggtgttgggctaatggcgccgtgtggttctaggtgcttgcggatacttttgagacgaggttcgagccgttcacacttgagaagcccagggtatgtgtgattgtgttgctgcgttgactggatgaagtgatggtgggggaattcgaaagctaacgcagaatgattgatctagtgtctcttgccgcttgcgaacactcccttgattgaatatacgcttgagttcctcgccaatgccggtgtggaggatgtcttcctgtacggcggagcgcactccgatcagctggagaaatacatcaagtacgtgtgggcttagacaggacatgctggcgatatgctattgttgttgttgggctgaccaggaggctttgcacagtgcgtccaaatggagagcgccgtcgtcgccgttcaagcagttgactttcctcaagtcgacgtcgacgtctgttggagatgtcatgcgtgatctcgatggcaagcatctcatcacgggcgacttcatcgttgtcagcggtgatgttatcagcaacttgcctatcgaaggcgcgctaaccaaacaccgtgctcgtcgtgaagcggacaagaacgccatcatgaccatgatcttgagagaggctggccggaaccaccgaaccaagtcctcgtctgtatctcccgtcttcgttatcgaccccaccaaggaccgctgtctacactacgaggagatcgaccatcattcccccgaatcttctcgcctgaacattgacgcggaactcatcacgacacaccaggagattgacctgcgccaggatctgatcgactgcaacatcgatatctgcacacctgatgtgctgagtctctggtccgacagcttcgactaccagacgccccgcaaacagttcctatatggtgtgttgaaggactacgagttgaacggaaagacaattcacacacatattgttaaggaccactacgctgcccgggtccggaatctgaaggcctacgacgctgtcagcaaggatgtcatttcgcgctgggcgtaccctctgtgccccgacaccaatctgctccgcggccacaactatgagcttcggaagggaagcctgtatcaagaacagggtgtgactctggcccgctcgtgcgtgatcggtcggcgcacggtcatcggccagggcaccagcattggggacaagacgacggtcaagaacactgtcctcggacgggactgcaagatcggcaagaacgtcacattggacggtgcttatatctgggatggcgcagtcatcggcgatggaacgactgtcaaccaagcgatcgttgctgaccgggcagtggtgggcaagaactgtaccatcgagcctggctccctgatttcattcggtgtcgagatcgccgatggtgtcaaggttagcgacggaagacgtataacgacagcttaccgggaggacgacgatgaggtgccggccagtgagcccgaggttgttggcgaaggcggtaagggatatgagtacgttccttatgatgatgacgaggacgaagatgagacggccagcaatgcttcgtctggcttgagtatgtgcattctgctccctccatatcctggctgtatacgtggctaatacttaccattgcagtttacaatatggcgaacctctctctttctacagagtctatctcgacgctttcctcggagatctcagaatttggccggtctcgttcgggcagtttcagtactacaatgtccgacgacgaggaccaggaccacttcgtccacgatgctgcggctagtgtctacgacagcttgcgggatggcgtcacatccgacgtggtacaactggagctggtcagtttgcgtatgacggcgaatgcttccgaccaccaggtccgacgagccgtggtctcggcgttcatgaagcgcatccaacaattgatggacggtggcaagggagcgagcgaggccatccgggagattttcggcaagtacaaggagatcgtggaacggtcactgttcgaccgcgacagcgacgagaagcccgatcaagtggacttgctggtcctcctgcagcaggatctggcgcaccgcagccgtggtgacacggtcatgctgttcacggccaaggaactgtacgacctggagatcgtggaggaagaagcttatgagcaatggtgggccgatgagcggtcgagcagcacggaggaaatgcgccaagtgcgcagccagtcccagcaatttgtggactggttggccaatgcggaggaagaggagagcagcgaggaggaagagagtgatgaagatgaagatgatgagtagatgatatagagcatagcctagaaacactagcagaattgtccaaaattcaatgacaaaaagggttaccccattcagaatgtattatattcataacccgcatgactggagctgcagatgaagcgttgatctgcttgtcttgctgtgcctgtattgggtgcctgatatcacaggtatcaaccagaaagtcacgggtatcgcccgaagaagcaagtagatgcccatgaatcagtgacgatggaattatttgttggcgatcgctttttctcgccttgcttcagccagcaacttcccaataatatcctcacggtgattctttattgcttctactacttgggctgtcccaggtggatagacgacagtgcacacatcatcttcactattgtcatcattgcacccctgcgattgctcactacttgactcgttagtcagttatttacatgtcactttgactaagaggcgtgaggggggaaagaccagctgttgtctttcccaggaactatcttactccgcacatctgtgaagttccctttcgatgtgcacggctctatctgtctttacctgttccttgaactgtctccccacagtttggctctttggtggagttcattccccctctagaacttgggcccttcctggctcctgctgcagttgaccctgccaagtccctctactttggagccgcgatcgagcataaagggatacatcattccctttttcccatcctggatcattcctcgaaaaaggggatcccagtgttgagaagatattttcggatcggaatccaccttattcttttctgatattccctcccctaaatcgaatccactgctgcagttcatcgatccagaaacggaccccacaccagattccctcccgtgacgtccgcccggctgttagtgacacacccgcccctcccttttgcccaagcagttgaatgaacatcattaagctctccacgcaacgatcggctgagggctagtgctgccctgttcccctccccttctaccaccctgttttcttccttattgccatcgggatatttccacatccctccaccccccctttttccaaagttcctgctatttctggtaggctgcgggctgtgtgttgtctcgagaaaaagaggtctcgacatcccatctcgaggcctgcctttttttcgcgtcagcacataaaaccggcttgccacgggcagaaacgctttcaccacgcctccactcacgaggaagaggaaggcggccgcggcgacgcttgtagataacgaaccccaaacagccgccaccaaggcttccgtcgccctttcgcctgccgccaccgcaacctcttcgggccaatcctcccgcaagaagcagaagcccgcggaccaggaccctgacgccgattacaccctagcgacccctgggagcttttcggttcctgtgcgatcgaaggagtcggatatcgatactccggcgtctaccagcatggagtcggacgaggacttcatgagtgtcgggtctagcccggatgattttctggatacccaaggaagtgacgtcgagagtctcggggaaggtgagtgatcgggttgactgcctttttgttatcggggtcttgctgacgttactcttgttgggtcatttacagatttcggtgacgattttgacggcggattctccaaagataaggatatcatcgcgacgaaacggaagccttatgaggtcgagtttagtgtgttgagcccggaggacatcgaacgagaacagaacctgcagattaacgaggtctcgtcgatccttgggttgccaccagagtcgtcggctattctgctgcgatatggacgatggaaccgggagaagttgatcgagtcatacatggaccatcccgagaagacgctggaggaggcgggccttggtaccaattttgagggaacgccaaagactgaagtgataccaggatttgtgtgcgacatctgctgcgaggacggggacgaccttgagacatatgccatgcgttgcgggcaccgcttctgtgtggattgctatcgccattatctgagacagaagatccgggaggagggtgaagcagcaaggatagaatgcccgagtgatagctgcaatatgatcgtggactcgaagtcattaggccttctggtgacaaacgatcttaaggagaggtgagaactacagcacatccttcgcgatagcttgctttgttactgacgctttccagatacaacgcgcttctaacacgaacatacgtcgatgataaagataacctcaaatggtgcccggctcccaactgtgaatacgcggtcgactgccctgtaaagcagcgtgaccttcgtcgtatcgtacctactgtgcagtgtgactgtaggcactacttctgctttggatgcacattaaatgatcaccagccagcaccctgcttgctggtaaggatgtggcttaagaagtgcgaggatgattccgagacggcgaactggatctccgccaataccaaggagtgtcctcgatgccactcaacgatcgaaaagaatggcggatgcaaccatatgacttgccgcaagtgcaagcacgaattctgctggatgtgcatgggactgtggtctgaacacggtactagctggtataactgcaaccgctacgaggagaaatctggatcagaggcccgaagtgcgcaggcgcgatcccgggcgtcgctggagcgatatctccactactacaaccgatatgccaaccatgagcagtcagccaagttggacaaagatttgtatctaaagacggagaagaagatgacgagtttgcagtcgcagtctgggctttcgtggattgaggtgcagttcctcgatactgcatcgcaggcgctccagcaatgtcgccagacgctgaagtggacatatgcctttgcctactacctcgcccgcaacaacctgacggagatcttcgaggataaccagaaggatctggaaatggcggtggagagcctaagtgagatgtttgagaagcccgtaccggagctggcgaatttgaaggtcgacatcttggacaagacggcgtattgtaacaagcgccgggtgatcctactcagcgatactgcagagaacttgaaaaacggtatgccccttgcgaatctacgataatattctgtatactgacgtgcaataaccaggggaatggtccttcaacgtggaatggtagattacagtatatagaatgatcgaacttacatcctgttgaggcaccaccttactccctccttcctcggccggtggacgagcttcacgacgtgcatgacgacagcgcatatggtttctatctatctgaacaactctctcactcactccggcgtctctgatgttttcctggatggttcgttattcgtgtgtatcaactacttctgggcgatttctgtgctgtacttgtcatatatttcttccactatttttcttctctaaacacgatagccatgcgactactaaccgagtctgacactttccatatttgacgcactgaagtggggaggaggtgtgtttgagatgcacttgatgtgagaagactgagccgggtggatgtctaaacttgaccagtgggaaattgtatgaaagaagaatatactgagtaggtagaggccttaaacggaggcttatagttaacagctacaactacaaggtatctatgcttatgccccaactagtctaactagccatagaatggaagatgaagatttagtattagtggagagaaagaatgaccaaaagaaaaaggaaaagaaaacaagcaaaagtgtacttagaatcaaccttgttcattgatcccacgtagcaagtcaacgatgatccactacatactagttactagtcagttaccttatctagtagtagtgtcaaacgccaaacgccaaaagccaaatccccaacagccaacggcgccaactatctactgtactcagtgctctgcctgttctcagtttccttcaagcctcgcatttactactccgtacagttaaaacgagcttaaaattccccgaggattgaaataaaaccatagagaaaaaaaaaaaaaaaaatagaaagataccataaaaggaacttaaccccgagcaagcgcttagaaatattcgtggcaaataaagaaaccaccaaaagggaggttatctagaatatacctgttaatcaatcagataagccagcccgctggcccgcaccaagaaaaaaaaagatcatctgcactggcgggcatgcactggcacgtccgtccgcggtgtgccgtgccgaactgaacttgggattttgattcctccgtgcttcggcggtttgcttacttagttttagtagtctccattttactacggagtaatagtctgttcgcttcgtgccggggaaagtaagaaaagtttttcttttctcaagtgattagattaagtaatgggaatgatgggaaatggttattatattggattgcttttttaggaattaatcgagtttactgagatttttttttaatgctggatggatgcctgggatcggggcgaaaagaattccttattgattcagtcggttggttttatggggattggggctccgtcatcggatcagtcgtagtttttgcctaggcactttggaggttcgttagtaaggtcgtgtctaaggcagtctaggtcggggatgctgattcagcaggtagatagtgtgtgcaggacagatggaaaaagaaaagatggaaatttttgggagttccgaggaacaaatctagttttagcaggtagatggtaatgatgtttagttatcatgcggaggatagtcatagtggactggactatgtatgggtggaaactggatcaggataaattgggggagagcgggctagaaaacacaaagaatcaggatggaaggaagagaaggaaggaaggaaaggctgggtgttttgtctgttggggtccagcaatcatatcaatctctgattaatttcggatgggcacgaactggtgaaagttctccctcgatctatttacctattgactatctactatctatctactacttacttgggagtagtttagttatttagttaaactaggacaagaatcgagaaagctgaactgacaaataaattactctgctccgggcgggactgccgtgcatacggactgatacaccctcaataccacagcaacagctgcacttacgcggggattcggcccggtgaaacaggctgaaaccacctccgaacggtattaatgacccgggacttgctttgctcctttagttcaaccttcagcagcaagaaattcccgactgtccagaaagattattatttcctatctttcgccagtcctctctttcctctgcctcctcctctcaccttttccctacttctctccctctgaggcattgaataacttccccccgtcttgcatcgggctcatcctaccttctcctctcctcgcctcccctccgtcttgctccctccccttccgcccgatattcttcctctcggagtccggcttcctctccgctccgcaagtccgtttttctgcgtcggcatttccatcctccaccgagtacctcacctccagctcgaccattccccccgagctgtctgagatccgattcttccgaataaaaaaaaatcgcctctttctctaacgacggcagctgtgctaccaaccaatcaagctccatggcgtctcccgagcagattcccgggcaggaatacgagtatgtcgaccgtgttattttccccttcgtattcgtggcgccttcgcttgttcgcgcaaggctttctgcagggcctatctcatcagcagatacttcctgcgattgactggcgctgcatgatttattgcattttccgaagcgatattggggaacgatttgctctccgtataggaattcgcagctaacgttccaatttgatattagctatgaagccctcccttcgaactacggcctaggccggaacatgctggctggcgcctttgcaggaatagcagtatgtggaaagaccgtgggatttggtgactgggttccggtggttgtgctaatgggtgcttggttgttctaggaacactctgttatgtatccggtagacttgttgaaggtatgttgattgctgttggggaggtttgagatgggttggaggtgctggagattgattgcttcatctcttatgttggacttcgcgggtgcggtgggctaatggtggggtttgtacagacacgcatgcaaatcctgcatccctcgaacggcgggctctacacaggcttgaccaatgcggtttcgaccatctaccgaattgaaggctggaggacgctatggaagggcgtttcgagtgttatcgttggtgctggtgagtgcgacaattttgggcgcgccgttgcgggtgctatcgcggcggaggttgatctggtgaatttctaggtccggctcatgccgtttactttggtacatacgaggtcgttaaggaaatggccggtggaaatgtggacgatgggcaccatccggtagcagctggtaggttttggtgctttgcttggagatgcgatgattttggtgcaattgctgacgatgccaagcgctgagcggtgcgtccgcaaccattgctagcgacgccttgatgaaccccttcgatggtgagtactgcgccctttgcgctccatccgtttcaatttgtttccggagtatcggctaactgaagtagtcatcaagcagcgcatgcaggtccatggctcggtacataagagtatccttcagtgcgctcgctccgtctacaagacggaaggtctccaggcgttctacgtatcctatcccactacgctttgcatgacggtgcctttcaccgccactcagtttgtcgcctacgagtccatctccaaggtcatgaacccgtcgcaggattacgacccgttcacgcactgcatggcgggaggtctggcgggtgcattcgccgccggtatcaccaccccgcttgacgttgtgaagacgctgctgcagacccgagggctggcccagaacgaggagatccggtcggccaagggtctcttcaacgctgcggccattatcaagcggcagtttggctggaagggattcctgcgtggcgctcgcccccgtattatttccaccatgcccagcactgctatttgctggtgagtttccttgcaacttttgacggacccattgcaaaattaccgccgatgtctgcgcattgaaaacagttgctgacgcgatcctacaggacctcgtatgagatggccaaggcctacttcaagggccaggtggacagctagatgcaagcacggcttttgctaacgacccgatcgcatgaatccgacacaaaccagctcagcgaccctttttgacctctggttccgacctgactcgtccgcggacccaagaaaaaagacccattccccaagaaaccattagtcacatgaataggaagaaagcccgaccaaaagcaaaacagaaaaaaaaaaagaaaagatacgaaacgaaagaaaaaagatagtcttgttgaacaagcaatccagaaaaaaacaaaacaaaacttcgtcctttgcgagcatcacgtgcgcaggacggacccgatcgagcgctgcaggctgaaatgagagctcaactgagctacgggcgggttgaagctttctgcagcttcttgtcccctttcctttacctcctcttcctttctcccttcctcttccttttccgcctgctcttgttctcattcgtcgggcaattgcgccaactgccgaggctctcggacctaatcaacgcaagcttgtggcgatcatggaagagagaacggacaagaaaaggaggagggtggatccttgaccgactctgaatggggaaccttaaccttctgacgtgtatttatctgttatgaacggggtgctgatggctggacttgatggacgatgaattcaggcctcccgggatgttggtgagtgctgcttcttgttcttctcttttgttttgagtgcttgaatctgggccctgagcaaaaagaagggcccggcgtatgtttcaattcgtgcttcaatcgcgttactacaggcgttggcatgcaggggaacatctggacgagtttcctaacgttttttttcacttcttctggttgatcctcgagttgcatatttataagtagttctggttgggcatctttccatttatttccccaatttttaatgttcggatacaactttgcgcgtctgtcggattggatgcggatgttctgtatgtacgctatagaggaacaggatgaccatactatctatctacactagtccatggccttattttgcatgaatcagcttccgagacacagtgagacatgatttgaatggaacaaatgaagtcgtagacactctgggggtctcgaggggcgattcccaagcaaatccgcatcgccgccaacgccggtaaccaacgacgtcacgcagaaaactggggaggaaaaaccgccgccggattctgtcgttttgctgctgcttctctttccttgcttctttctggcacttttcttcacctcaattacttcttgactttccctcccatgctcgagagtgttttttatcttcctgtcatccaattgatcgcgtgctctcgttcctcctagacctcttcctcttccttctctttcctcctcctcccctcatcctctcatcctctcatccctcatcttgcgggcgggtcctgcacattccgccttttccccagcgctggatgcatgatgcgccccaagccggcgtcttcgctccagaagacctacgatgactgctacctgatgtgctccactgccgtctacttcgaaggccaggttcgttactactcaatgctaccttccactacttccccccctccccctctctccctccctccccttctcacaaggtccactacttctttcccccctaatacttacttacttgttccgatcggcgaaaacagcaaaatgaagaggaagccttgagatcttggcgctccgccctggaaacgatctactatcacaacgcttatcgtgtcccctccaagtacactcccaaaaacgagactgaacgtgcccttcaagagtccatccgccagctggagcttcaatgccgcgagcgggtcgatctcctgcaggccctccgcgagagcagaaaggattccgccggtcgatcgcctcctcgaaccactccgggctggattggtgacggcaccgtccccgcggtcggatataccgatctctccaaaccccccactatccccggtcgcccgcccccgtccaccaccgtcagctccgactccatcaggagcgatcttcaacccagcgcggcggcttcgtcccggcccatccccatccccgctcagcgcacccagtcgcattcctcgggcaaaacggactcccgcacccccagtcccgagcgccggaagatcatgccgttctccctgcgtaccagtgacttcaagaaattgggcaagaagaaagacgcttcccgccggagagagctgcggccggccgcagcctcgcaggccgcagggctggcctggggtagtatctacaacgctccctcttcacccgacaagaccgccagcgatgctgctctcgcgtcctcccgccagagtgcctccactgaccccagctttcgaagggagccggcaccccttcgtgcccattctggagatggacatcttccgcggaaagtatcaaatccacctacagacgatccagatagtcgtcgcaccggacgaaagccccgtgtgtcggaccagcccgtccgacgggcccctgcgaagaagtcagcatcgagcactccctcgacgacaccaacggtctccgcgtctcgcaccccaactgcggagagtcagctgcggtcgtctgctcgttcgcagtccgcctccacaagacccgatgtgaaagatgccgttcgctcgcagcccctgccgaagccgtctgtcaagcccaagccggtagcattgaggtcggccaatccaacttcatcttccccccgacggtccgttgagacaacggaacgttcaagtcggccaccgactaagtcaacatcgcgcccccgcatcgctcccacatcatcaacagaggatgcgttggttccaggtctagatcgtatggcgttatcagccagcagtcccgtccggccagcaccacagctcaagcggaccataacgccaccgtcgagcgatccagaatcactgggccctaagtcgaccgagccagacgaggaagatgcagaagaggaggaggacgatatctatttggacgtcatgaacaaacttcccaagggggtagacgtcatggctgctcgacagatcctgaacgatatagtagtccgtggcgacgaagttcattgggacgacatagcgggtctagatggcgccaaaaaggcgctgaaagaagccgtggtctacccattcctccgacctgatctcttctccggtctacgggaacctgcccgtggcatgcttctctttgggcctccaggaacgggaaaaacgatgctggcgcgcgcagtcgctacggaatctaagtcgaccttcttctccgtctccgcatcgacactgacatccaaatggcacggtgagagcgagaagctcgtacgcgctttgttcggactcgccaaggccctcgctccatccatcattttcgtggatgagatcgactccttgctctccgcccggtcatcaggaaccgagaacgaagcctctcggcgatcgaagacggaattcctcatccaatggtcagacttgcagcgcgcggcagccggtcgcgagcaaaaggacaagaaaatcggcgacgccagccgcgtgctcgtcctcgcggccacgaacatgccctgggatattgacgaagccgcgcgtcgtcggttcgtacgtcgacagtacattcctctcccggagcacgatgtccgcgaacagcagctacgaaaattactcagtcaccaagtccacgaactttccgacgaggatatcgaagttctagttcaagtcactgaaggtagggcaaccatttgcagcttgcatttgagtataagaactaacagctatacaaacaggcttctcgggctccgacatgaccgccctcgccaaagacgcagcaatgggtcccctccgcaatctcggcgaagcgctcctccacacccccatggaccagatccggccgattcggttccaggactttcaggcgagcttactttccatccgtcctagtgtcagcaaggaagggttacaggaatacgaagaatgggctagacagtttggagagcgtggaggataatccacttccccttcttccttttgctcgttcttttgtttgtctggcgtaaccggctgcaatggatacatggtgtgccaggtcaggggtcaattaggttagctttatgtctcatgttggataacgatacggtatgggtatgatatgatacgatttggatcggacagggtgtttactcttttttgggggggtaaaggagtgcattgcttatggttatggggtatggatggtatgggtatgacctgggggcgtgtacgtaagggatatcagcgtttcatccggatctccatcaaattcaaaggtcaaaaaactcaagaagctcgatgcaaccaaccaatcaatcggtagaactagtagttgtaaagtcatatatcatcaccccctcccctcaattctcattcggacggaacaagtaatagtaataaaagagagggggtaaaaaagtcaatgtagtgtaacacagggatgtaacaccaacgatctaccaaccaggtaaaaagagaacgaataacatcatcacatcatcaatataccactcctagtactatgcaagtaaatagtcacattgaatcaagtcagaactcgataataattaaggacctagtaagtcagttcacgaacgtcaatcgagacatgacatctagtgttatggcactgtgtgtacaacctaaccctacctatatcatgatgcttcatgaactattgactattccattatcaatgatatcgatacttcctaccttcgtgatgaagtgatgactactactaattttctaatattaattagttggattcggaagctatgaatggacggaactatcagtacttgattgtgtgtggaacttccaccccttccccctgcccaagacaggatttagtaaagtattgtattgcttttactactaaggtgatggtagtgattccatctaggggaatactattagtactactaatacttgcttacttatgattccgtcataatatatccattttatttctaacttaagctaactagccaagctagataaaataaaagtatctaccagaatagagaactaaagtccatataatataagatgtaggtagagtaaagaaacggaagtaagggacatgaaggagggcgagaaaagaaataaaaaataataatcgagaagatcagagtcattcgtaggtagaaagaaaaaacagggtatatagaattccgtgaaaagaatagaggtgagggaacagacatataagcgtgcgagaaggcaagcggtcacggatgggacaaagggaataaaggtgaggtagagattgataaattggtttgcatggtgtaagggaatgtcgtggtggtggtgatctcgaaaacgacggaggtgattcagcgattggaaagtaagtgtttcgactggtggaccaggacggcaatcatctgtaagaagatgtcgagccaacgtgcatcacaaaacaagaaaaattggtatccggattcgactcctacaactgcagctagcaagaaatggaatgataaaaaacataaagacccaagcctggcgcaggctagatatctcaaaaaaccatcacgaacctctctcccaaccgcgcatcatcacctctttctacaggtctatcaaactgccaccctgctgaggttgatggtatgtctgttgtccgccccacggattgttggctggctgtgcaaagcccgtctgctgcggcacaaattgctgctgctgcggctgctggccgtagaaagggttgttgccagtgcgtgtggcccgtaaccgatccaaaccctgaccagcggagttgacgaatgtaccgggagcagtgtgctgcgcagggatacgcagatcgccagtgttgccgaaagtgtcctggccttcgccggacgccagcagcgcattgagctgggcgcggtgcggatcttgcatttgcggaggtgtgctcttcggaggtccaaagctctgctgtggcggtgcaaggttttgtggggactggaagttggcgatggggttgaacgaggtggtgacccgctcttcggccagtgtgttcaaggacgggggtccagtctgtgcgggcttgggctggaactgcgtgcgctgcgcaaatgggttgttggatccagtgggcatgggcttcagcgcgtccgccgattgctgattagtagcccatgggttgttggtgccggtggacaggaagttgtcctgctgcggctgattctggaactgttgttgctgctgcggctgttgctgctgctgctgtgagaagaagtcggtgctgccggtagcgccccaagggttgttggtattgaaggcagtgtgttgcggttgtagcgttgcttgcggctgcaagaagttctgctgctgctgctgctgcccataggggttctgatcaaatgcggagggttggccttggaatccgttggcgtatccgttgggcattcccgtcatctgtccctggaacccagtgggctgcgcatattggttgttcaggtagcccgtggtcaggggttgttgaggattgatggggttgccgaaccagtcgacggcgttctgctgctgatagccctggttgtagccagtgggttgtgcctgggcggtcggcacaggagcgtcgtcaaagagtgactgcgcgttgctttcctccaactcgcgcttgcgcagctcttcctcttccttgctgagcttgatcgcccgagccaggtcctcgtcatcctcggctccggcctccttagcgcgacgcttgcgttcctcctcagcttcgtacttgcttgcctcgatggccaaccgatactcggcatcctcgtcatcgttggtcgcacggcgacgttcccgtcgctcacggcgcggcggttcctgcccgtagccttggtcatcgagtccgctcacacgagacttccacaacttgcggtcggagcgctcactgcgcagtctatcttcgtccagaatgagggatgtaagttccttggcggcaacacggactgcccaagggactagttagccaccacacggattcggtgaaaagcaaatccacgcaatagggggggagcctaccattttgtccgacatctcgaccgtcctcatcgatgtattggaactcgcgcaaggtcttgataatgtagacgttctttcgggcccaggtgacgaccagctcggaaccttcgtgtagacagtaatcgaggaccttcaatgacttgagtacgtggcgccagttcttgcccttgtcgttcaagcgcttgtccagcatatccatgatctcgtagaaatcggtcgggctggatgattacaccggcgtcagcttcggtcgaggaccacgggagccaatggcggggagtaagtggcctacctgctgaacgtcaaggcagcaatctctgccatttcagtccccgtagggccccaggggtcattacttgtggctgtacgaagcaaaattcatgtgttagcatggttcgaatgtcagatccgaccattgtcagggataccgtcccgaccgacaccgtagcatgatgcccgattgcgaaggaccccaagaaagcggagcgagggaaaagacggagacgtaccatttcgaactttgacctggacggaggaataacccttggtcacgttcttgacactgcgcacgactttggacattgcggcgagttggtggataggggggttatgtgtgtgtaggtggtgtgtgtggcgtgggggatggaggttgtaacgcccggaactggaccctcgcaatgacggactcggtgctcaatcccttcgcgggggaagtggacggggacgcgcgacacacgggcgatggtcagggaagaggggaagaatgtgagatttggggaggtaagtgcgatgggagcagagccagcccgtctctccttatcgcgcagttaagtggaggatgatgaggagttgatagtagtagaggtgaaggaggaggttagggtgagagagggagagagagagagagagtagcagttcagtggtggctgtttaaggcgttaaggtcggggagtcggcgagtggctgaaggaaccccggcggagtatgtaagccggaaacaccgtatttaattaagagaaacagggggagcaatggatgaagatcggttgcacacgggatatgaggaatggagacggagagaggatggggacgggatggaaaaatggagagaagatggagaacggagaggttccaggaagatgttcagatggatggagagagagatggagagatattgacttgtaccagatggagagagagagagtcacagtttggtgggcaccgcaccggagatgacgacgcaagcctcaaaccagccaaagtttatccaaaccacgaccgttttacttttttattatatttcttttctttctctttgcccaattcaattttagaagggttcaaaggatcgaaaaactcaaagatttatttgacaatcgaactcgaaatcgaaatgccgggggagagaaataagggatggagaggaggggaataattgatggcgtggataccggtcaggcactatatagtatagagacgtagaagaagggaaaaccaaaaaaacaagggtccacgagaagggatttgatagtaaagtatcaggccatggcagagcgagggacttgaaatccagtctgtttcttcaaaatgacaccaccatctgtcagttcctcgccttccgagcgaatcctactccaaacgacgattggtgattcttgccacttggttctgggcggtgcttttatttctctttgcctctaactacagagtattattcatacagtatgtaaccgtgattgaccagcacataaaacatataacaataataacacttcctctggtaattatattaatagtaggtaagtacccaccgacgtcatcggccgggtcactgcagctccccaaacacgttcctggccagcaaacccttgctgccctgtaagtaccgatgattcatccagaatcttcctcaaagcaaggaatgaaactgaacttgactccctggggtcaactctttccctcttatcggactatgcaactagtctaatctaactagatagtatcgacttcgtatctccatgtaattcccagggatgcgtccaggcagcaggattggcagcccgtcgtgttcccgtcaggcttcaccttttcccgtcttcgaaccgcaaaatgttagatctaaaaccccatatttactattttcatactaccatttactccacacagcgagaaactttcacagtaagagtactgttgaatgctctcaaattcatatctatcaggcattcctgacacatgcaaaaccctggaatcgtagaacatgatatagaatagaaccactggtaaccgaagaaaaggaaaaaaaaaaaaaaaaaaagaacaaggcaatcaatgcatctacgcacggcgactctcctcttccagactcaaatacttcgcctccgcccccttgatgcatgcaatgttcgcccccagcttgttcaacgtctccacgtactcgtcgtacgggtccgagtcaaatacaatgcctccgcccgcctgcaggtaggccaccccgttcttcaccatcatcgtccgcagcgcaatgcaggtatccatcgcgcccggcatctccgtcttgccatccgcgctggcaatgttatacccgaagtagccaaccgcacccgcatacactccgcgcttctcgccctccagctccgcaatcaactgcatcgcccgcaccttgggcgctcccgacaccgtgcccgccgggaagatcgaccggaacgcatcgaaccgtgtcttctccggccgcaggatgccggacacctgcgacaccagatgctgcacgtgcgagaacttctccaccaccatcaaccggtccacctgcgtcgttatcgggtcgcacacccggttcacatcgttgcgcgccaggtcgaccagcatcacgtgttccgcccggtccttgacgctgctggtcagctcgttggccagcgccgcgtcttcctccggcgtcttgccccgcttcactgtgcccgcaatcgggtgcgtgatgatccgtcccttctcctccttgaccagcagctcgggactggcgcccaccagctggaagtcttcgcagtcgatgtagaagagatacggcgacgggttgaccgtgcgcaggtgtcgaaagagattgaagggatggagcgacgtcggccgggacaaccgctgcgacggcacagtctggaaaatatcacccttggagatgtgctccttgagccgtgtaacatggcgctcgtatccttcccgtccgatgttcgatgtgtactcctggttctgaatgatcgggccttggggcggaagagtgtagtcgggtcgaaggaggacgtcaatggtccgctggagcacctcttgtccttggcggtagacggactccagttccgagtcattgccgggaatggaaatgtatgtgatgaccttgacgacctggaaaaagtgatcgaaggcgacaatggtgtcgaacagcatgaacagcgactccggaatttgaaggatatccttcatcggccgagccgtcttgggctcgaagtaccgcacgcagtcatatcccacgtatccaatggcaccaccagtgagcgggggcagtgtcaagccaggcaccgtcgcaacccgaaacccggagagttcctcctccaggatgggcatggggtcgcactcgggaccatgaccgggaccggttttgatgattttgcggggacctagacggcggcacagaaatcgtcagtctatcgggccaccccgccacactgtagcattgagggacatggttgcataccagcaccgacgaaactgtatctgccaatcgtctcggtcgtcgcagcactctcgtagaggaaggacaatttagatctggacaaaccgatcacgttagcgcatctgtgcttgcccgcgagccatgtggccatcttgccgagcgccactcacttctccgcgatcttcagataagccaatgtgggggtcaaaaggtcggccggaatcgacgtagtcaacggaagtaggttaggaggaaattgcgcattcttcgactgggcgataacttcgctggcggtctcgagggacggcacgacggtgatctgcgtgagtcacatgggaacaagaatcagtatcatagcaaactaccctccactgggattccgttgagtgaagagattgggacagagatctcccgtagaacagaaggaaggggcactcacaggtggcgccatctttgtgagtccgtaagcgatgggaaacgacttatgcggggaggagaaggaggggggattgaattgagaaataaaaagaggctaagttcgggaagccggagtatcggagtaattgcggtgctgactggggacggagttaattggggtggtttcaataaaataactactagtagataccgtcgcaggcccacaattctattgggtgattcgagaagttgcagacaaatagagataaccaacaggaccgaccctgttatgtgagggaggatgacaacttgatgtcgtcgaggttcaactggcaggcggcaaattgttggccaattcgacttctgggaacccaaagcgggctagcgtggatggcaggaatggatatcgaaagttgatcgaatagactggtttgaccgtctttttctctttgcgcccagaagcaagcactgccgacgtatcttatctatttattgcaggtgtcagtgtttgtgtttgccagccatcgggaattggaaaatcatctctgtgggagatctgacggtgcacgtgctcttcagctgggatctgcctgttcttcttcgctgctcttcccaatccctgtcatctctcgcccggttgctgtggaagtaatccccgtcgcccgcggctggctgattgttccctctcttcagtccctcaaacacaacaactctacagctagatcacaactgacctcactagagtgagttgttctgcacctgggcctataaacagaaagcttccccatctcatccttcatactgacagcgcaagacacgtatagtcctgcagcccgtgcagcctggctgcagcccgacatccctctttgctacctacctaccaactactgcctttttcatcaacgcacgcctgtatttactgaccctctttcggcggtagagcacactgggaaacattcaaatcattagattacaaagtcctactctagccaaccatggaacacccgcctccatctcattacgatgagttatcccctccttcctcggtagcgggccagatctgggacatggcgctcacggaccccgactatgcctcccatatcctcgactcccacgacaccgccactcctgcctccgcgcgactcacaagactagcccatctggcatcccacttcaatccgacctccaaatccgactccatgaccctccaccactgtctcgagaccctcgaatccctgctggacccacgcccagccttgacgcaagagctcgcccggtgccgtcccatgagtcattcccgacagtccaactcgatcgcttccatttcgtcgaccgactcccaagatctgggcgattccgtcgcttcgctcgaagagaggtcacaccctcctcttaaggatatcctgagcgaggttacagcactcaaagtggaattcgaccgccgtcgcaaggaatcctctgagatatatgatttgcttacacgagaacgcgaaacactagcccggaggatcggcgaactgaatgatgaaattcatgaactgtgaggaacccaagggaacttgtcggataatgttgttgtcatggtcgctaacaaatcctgtaaatataggaacacggatattctcgaagactccgctgagcgtgaagcgatccaaggcacgatacgagggctcgagagctgggtggatgaatggcacaaacagcgcctattgattgccgcaaagaaacagagtgctgccccacggcgaaatggtcaaagaaggtggacaaaatgcaaagtcgaagatgtcgagggtgacggcgaagccctctttgaggggatcacggcatggatgagaggatggaaggacgtcgaggaggttttccgaatccgagagcagaatcgcacttttcgaagggaagaaagacagaagacgcgggcaaaatacgtataaaataaattttcggcaagaccgggaccctggtcgatgaggacgaaggctgggatgagatattgtgatttgggtcaccccacgccgcagcggaacaaagactgctgaatcgttcgcccgaagaccgagcttagggcgatcgctgattgatttgtccaagaagaaatggtacagtgcaagaaagtaaagaggcaaatagaaagaagtcaatgtagccaccgtaaccatgtagagttgccaaccgccatcgtattttccatgaagacccaagctgcgccgtttagtatggtctaatccaaatcatggggggtagaactagagattatggtactggaagtatattgaaggatctctggagacaatgatgtctgatcacgctcccacaacatggcacgtcggggcctgccgagaaccgggagcggagagacgagcgctagcagaggtgccgacgctgagtgcagcaccaagctagggatgagtccggcctgccttcgtcgcaaaataataacgtcaaatgtgtatcggatggctatttaccattttcttaatgtactatcggaaagtaagagatcgtaacgcagccggctcgcatgtctcgtatatatcagcgctgcagatttacgatggctagctgttcgaataaatcagtgacaatgtcccacacggcaccgcaaggacgacatacctggtttccataaccgaaagcaagcttcttgccatcggtatcccacgctagactgcgatccggcaccgactccgcagtgccattgtgcccattcaccatgggactagactcctcctttttctgctcttcgggacccggcactctccaggtagccagcgcagtgcctccacgttgtgcattccaaatgaaaagactctctttactggcagcggcaagggcgtatccgtcgggagagaaagtgctagcaagagcgggtgccgatgggccgagaaacaatcggtgaatacaattgaactgtttggactccagatccaaatgccataccttgaccgtgtcatcggtggcagaagtggccaaaacaagtggttgtgctatttgctgctgctgctcctgttgttgttccatattgggctttagctcaatggccgtgatatccccttcatgggcaccctcatggcgcatatcatgggtaggcacccatagtgtagcattggcggaagatgcagctaccgccacggatgaagagccggcattagcacagcggataaatgaccagggctgatcagagtcgccagatgagaacgtcttggcgatgtgaatactcgaatcgacatcgcattgatagaccgtcccgttaccgcaagcaaaagcctggttggagcccaaccagcaaagatcgaagactgatccctcgataacctgaggcgatgggaattcgtctggtcgtaatgagtcgtcccagagcgctagctcggagattctgctgtctgaagcaaccacgatcagatgggacccgctttccgcccagtgcaacccagtaatcatccgcggtacttcgggaagaagatcgacggcatttccagacacgtcatacatggtgatggagcctctcatgtcattgtaggtcgcgacggccagcttctgacccaatgggtcccaggcgaccgccgaaacacaggtgctatcccctttgttcgctacgagtttctcttgtaccggatccgaggttgaagacagcctccacaggctgcagaaggtatcgccagcggccacgacggtagtagggtcgcgagggcgccagagggtgcgggtcacgtgatcatcactagccagatcgaggatggcggtgttgggcccaaggtcggcggccttggcgggggtgatctggacgccaacgctgtggccggtggttaaggtgaaggtcggcgccaccggtgctggtgctggtgctggtgctggttcctggtcctgcgaatccggtcggccacccatgttcacatctccgtcaccgtccaccaccatgtcggctgttcgaggcgactcatcgactacttcgggtttgctttcagtcgttactccgttagtgtcaatttccatgggagtttcatcaccgttggcctctccattcttatgcggcttcttcacactggtgggagcttgaggtggtgctggtgctggtgcttggggtgccgccgccgcctcggccgtcaagtgaccgttaatcacgccgccatctcgcggaactttgcttgtgggcgagacaggcgcctggtctgtgccaacgcctgcctccccggggccactttgacccttttcagtttcgggttccagcggcgtaggcccgaaaaagtagtcagacgatgtgaaggccgtaggatttccatcctgttcatttcattagttctcataaatttcggattttataaatgactccaaaagtttttgggagcgcgtaacgaaatgatcaatgaatatcataccctgtcgagggaatgctctagttcatgatactgcaggcccttttgcaccaaggataccagagcatgagttttgatgtatggggcaaacggcaaactctgcgggtcttgattccacgcgcgctgtaaggtgagtgcagcctcgccatgccctgtgggaaagttagtttgctgttcccatgaagaaaggataagcagcaaatgatggggagagaataataccagattcttgaagatacctataaagaagttagcaatgcatacaaaccgccgagaagcccaatgacgcagcatggtagggatgtgttacggcagaaggaggttggaaagggactctgatacatacctccatattaggtaattgacgtgatgcgatgtgagatcgggttgtgccattgttacatgtatgacagctagtaaggtggagggtccgctagcatgccagaaacgaaaggctttctctgtgaaaagtaggaaaggaataaggcggggattgctgcaaggcagggactggagggtacaatggtccaagatgctgccaagtcaagctcacaaaaggtttgaatggggtataagactctgctaacagcttccctctcaaacagaacctgaatgagagacaggaggtctctggacgagaggggagggtccgagtgggaaagatgcagccaaggctgtgacaagggagacgttcagttcagacggtacttgggaagggcggacgtgagtaaaacacgaaaaacgcaggctggcggactaggcgtgagaaaaactaaaccgaggaccagtaacaaaagcacatcctaaatgcgccttgttgccgaacgggttggtgaaaggaacacgaaagattgttctttgagacagagagacaaattgaaggagaatggaagagagggagaagtgaagagcgaataatatcgggacgggaggaaatcgacaccaacgtgtggcttaaagatagcagacccgctagcgaactgcaaaggccggaggagcaacaccagaaactttcggggaggggaagaaggcggatggacggactgacggaggggggagagaaagggaggaagagaagcagttcagatccgagcggatgaatgaaacgaaatgatggagaaagagagttatgggaccgacagacaagccagacaagacacgaccggccgatgaccccagggaagcgtatgaggaactcccgttaattagtgccaaaggtagttcgaacagaccagaccaggtaaggtacgtagttaggatcgtggaggtggtaggggtcgagaagacaaggtgagggtaggttagtcagtgtcagtcagttaacgtaactaactagtgagttaagttaactaggttagcaggtacctggtcgacacttttcgacaactcgacagttttgaccctcgcgacagacagacagacagtcagacagacagacagtcagtcagtcagtttccacgccgctgtgaaggtccgtctaaaggtttagtcaagaattacgggtccaaccacgcccaaccaggccaagggtaaaaagatgcaaaaaaaggaaaaagaaaattcaaagctggaatttctccaggcgcggctctgggacgctgtttcagacgctgaacgcaccgggagtggacattttgggcctgggactttttcggggggtgggcttgactcgttgtggcgtctaggccacggctagcgtgcagctgccctccaacccactttggggcccctggtccatcccaactggtccaactgctccattcggtccttctgacggcctcccgatcggccactacgcttgcccttttccggttagccggcaccggccctttcatggttcgattggctctttccctttgtcgttcgcaggatttctgtgcatttttcgcattttgcgtggctttttccctttttttaccattttctttgtattaattttctttttcttttctcattttccccttcttggagttgccgatcgtggcccgttagataccttaggcaggatgtcggtcttgtacctactgggctggtacctacagatgatgtcgcttagttcttaccttgttcatctgcagaattaagactgcctatgaaaatcatacttatatttgaggggcgatattctcactgactttcggagaatatggactattctgagggatcaaagtaccctaatgcagtcctaacactaactaccctgagttagtagtgtccttcatgtcaatgattcaaattgtcctgtgccagctgatagcctggatctaaatctgggggcagttcacccgtctgctaggaatgccgatcagttgtacatccttctggagttctgtacatgcatgcattgatgattgtgggctggaacccattccaccccgccggcagacagctgctgtgaaggtctttccgtacaactcgagtcgcggtgctaagcagtcgaagcttgcttaccttagctgcacttccttcgctttttcttcagtggtcggtccacttcgaaagtctggcgggtgggtaactagtaggacatcactgcaaatctcccttgggctgagccacaccccagcgcttgagccacacgtgacccgtgcgatcggtttgatctcaatttctctcctgacttggattgttttgtcatgcattctctagaagacttccaccaagccagggtgaaacctgagatggggctttattggggagacccggaagcttattgagcggaaatggcgctgatggtttcttcactggtagtcagtccatgaccaggctgattcgtacttggatttaatatgaatcgtaaatcatcagtagaaccattgtctcaagcgactggtgtctgtcagcagatcttgtcccacacccacactccaacgccaacttatcctccgcaacaaatccaatgatggtatggagtactccataggcaacccctggtcatccatgtttcccgatgactggatgcattgttccctttcaatgataacaaatgccacgggcggaggcatgaatggcggccttgcggatgccatgcaaggtgtccaatcagagagacgcgatcccgtccttgcaggcttgtccgaaaatggaactcccccccaacgccgcccagagcgactagtcacagccagtccagctcgtagtacggatcatctggtctggatgcattacacttccccttcccactcttcttcctttcccccaacccccgttgggctctgtcaacagcctgcggtttagcagccgcaagagcgtcctctgccaccatggcgcctcgagtcaatatccctccagcgacccgcatctgtcttatcagtcttctcaccctctccttgctgtataatatcgcccgatggcggcaacttgacaccacgcccggcgcacctgccatcaccccgatcataccctatttgacgctcgttccttcacaatttcttttctatccgtggaccctccttaccgcgacacttgtggagcaaaacatcttcaccgtgcttttgaacgcggccactctcttttatggcgggaaatacttggagcgcgcatggggatcccgggagtttgcgaagttcatcctcgccatcgcagtcatcccgaacgtaacgatcgttccgctttatattctaggagctgcccttaaaagtggctccagcagcgggtacgccttgttttctcatgacgaatgcacaacatcttgcgctttccttactgactcaccgacttcaagcctcacgcagatatgcggcggtatctcgattcaagcatccttcttggtcgccttcaagcagctcgtcccggagcatacggtgactatcttcaaaggcttggtcaaaatgcgggtgaagcactttcccgcgctgtttttgttcctgaacaccatcagcggaattgtcttcggcacgcatgtcgcagcgattcttgcgtggctcggcctcttgacaagttggacctacctgcgcttcttcaaacgtcagcctgaccttactggcacatcgaccgacgggctaggcatcaagggtgatgccagcgagacttttgcattcgcatgtctctttccggatgtgcttcagccgccaatcgcgttcctgtctgatcaagtttatgctctcctggttgccatcaggatctgtacacccttctccgaggaagacattgcctcgggcaaccagcaggttctggcacggggcgaggcaggtcttcccagtattctttccaaccatcgcaacggacgggccatggcgaagcgggaagaagcagagcgcagacgtgctctagcactcaaggccctcgaccagagacttcaagcagctgctgcgggaagagtgcagccggcgacgtctgcagcgaaccagcaaggatccagccatgctcagactccgacacctacggtttcagcgggccagagtatgttgggagaaacaagctacacccccgaccatgcgtgaagctgcaggaactctacaaagcatggtttcacggagtttggttggtcgtttgggatagaatgcaaaggcacaatgcaacgtaaagtgtttctgatgttcagtcttgctgtgatataccgaacttggacttgtcttttgcaaggaaatgaggtcttcccagcaagtgcaatcccgtgacatggggcggggcttgttggccttcactgtacaaaatgtctcccacatttttcttttccaaaatgatgaatgaacatgatcacatacatatacactagtgcaaagccagtggaaggaaaatagtagaccactacactaatcaacatccttaacaatgccatatacccatggttccaaaattctactcataccaaagactgaacaaggacaacagtccatgatgtatactagcaactgaaagaaaaggaattcccaaaactacataatcgaacaggaataatacagagaaaaatgctatgctacaagacacgacgccccaaggtcgtatagtatgttcccacacaagccgttcgaaccacactcaaaagatccctcacaactgcctcaacttctccacctcacctctagcctcctgcaacatacgttcctgatccgccttagcctggcgaatagccgctatgcgcgcccggtccttatcactctgctgcttcaactgctccaacttctgcaactcagattcctgctccggagtagcctgaatctcctgcgcgcccgtcatgttcttcaccttggcccagatatccttgtagtcgaggttcttcacatccaggacagcggtctgctccgcctccccgggggccggggcatgcttgtccgtgacgtccttagcggagagcagggatgcggcgttgctggcgcgctcggcgaagtagatcgtcaatgcggcgggaccgtcttgttcctctgtttggcgcacagtcatgggaatcgctgggttgtggtacttgaggcgcgggaggcagttgcgccaaaaatgtcgcgcgccttggtgcccgccgtagatcttgcgggcgtatgtgaggtgcagccgcgtgatggcggggaattctttcgaggcggttgagacggtggggagagttgcggctccggcgccgacttggatgttgagaagctggaggtggaaatggtgttagtagggttggggttgatggattggatcgaatggttgattgattccgatatgggagggatatcatcggtgggtaggtattgggattgtcggaatgtatgggggtcaacgaaataaggatgacattgtagatggagaacataccctctgtgaaatggtcaggtcagcatctggggtcattgataatgggtgatggtggtcaacttacggttttcagcttccgcatccgcttgaataggttgaccattgtgacggttggagcgcctgagcgactactttttgatgggagatatgtcaagagatgggattttcaggtcgcgcccggctgtaattgatctggatgggccgacaacggggtggttagatggctgctgattcggagctgtctcccgttgatttttgggatccccggcggaaagaaaagcagccgatatcagatcacgtgatgctaagatattgtgctgcggcgatgttgatgatagtatgtcactgaatgacaactatgggcgatgactcttctgtttgggactggacgccttactaccttccaattaaaagattccccagccttccctccaatctgttgtctttttccgaaggattgcacttgtaccgattctatccctgcccgcttaagccttccaaaacaccgcgatgactccaacatccactgtccacttctggagatttaccagagttgtgactcacaacttcagtcaagcattccacattcaagctccatttgttatctatcaatcatttgaaagaggctgagcagtgaagccatcgcccttcatactgggatatccccatgctccgataacggttgaggcaggcggtgactcacggaccgccttttcccacattcggagtaattcttttcgaccccgcggtgactccagactcgctcgatctatataacgctgccctttcccctcctcgtcctcgggctcattatctccagtttgtcagatctatccttctacatccggagccatggcagccgccgccgccgctgcgtctgcagctgcgctcgagcagggcacgaaaaacaccatgaaactcgagaatgtctgcctcacatgcccctctttgtctcctcagaaaaccccatatgacctggactaagctgaccattcattgcccgcatagaccgagaagagagataccctcatcgccctcgagaagaagtaccaggcccaatggaaggcaaacaaggtctttgaggtcgatgccccctccgagacggaggtgcctttcggcagcatgtccgccgctgagctccgtgagaagcaccccaagttcttcggaaccatggcctacccctacatgaacggtaccctccacgccggtcacagtttcactgctagcaaggtcgaattcatgaccggtgttgctcgtatggagggcaagagggcccttttccccctcggattccactgcactggcatgcccatcaaggcctgtgccgacaagcttcgggatgaagttgccaagttcggcaagaacttcgaaggctacagtgaagagtctgaggagcaggataaggctgcggttgccgctcccacccaggaggttaaggctgagcaggagaagttctccggaaagaagagcaaggccgccgccaagaccgttaagatgaagtaccagttccagatcatgttggctattggtattcccattgaggagatccacaagttcgccgatgccgctcactggctccagcacttcccccctctcgccattcgtgatctcgacagcctgggtgcccgtgttgactggcgcagacagttcgtcaccactgacgctaacccctactatgacgcctttgtgcgctggcagatgaaccgccttcacgagttgggcaagatccagtacggcaaccgttacaccatctactctcctaaggacggacagccttgcatggaccacgaccgcactgagggtgagggtatcggtccccaggaatacaccgctatgaagctcaaggtcaaagagtgggcccctgagatcgccgaactggtcaagggcaagattgaggacgacgctaatgtctacttcgtccccgccactctgcgtccggagaccatgtacggacagacctgctgcttccttggccccaagatcacctatggtctctacaaggtcaaggagaaggaatacttcgttgtcaccaagagggctgcctggaacatggccttccagggctacttctccgatggcgagaaattccttaagtcccaggaccaactgccccttgtcgttgaggctcctggaaccgcctttgttggtactctcgtcaacgctcctctctctttccacactgaaggtgtgcgcatccttcccatggagggagtctccgccagcaagggtaccggtgtcgtcacttccgtgccctcggattcccccgatgattacgccactctgatggatctcgcgaagaagccggagtactatggtatcaagaaggagtgggctgagctggagatcttccctctcattgagactcccacgtacggaaacctcactgctcccgccctggtcaagcagcttaagatcaactctcccaaggacgttaaccagcttgcacaggccaaggagctggcctatggtgaagctttctacaagggtaccatgattgttggtgagtacaagggtcagcccgtgagcgctgtcaaggagaagatccgtaagtctctctacgagagcggagatgccttccccttcgccgaccccatgggcaaggtcgtcagtcgcagtggcgatgactgtgtcgttgcctacctcggccagtggttcctgaactacggtgagaacgatgctgagtggcagaagaccaccctgaaccacgttgtgaacaccctgaacacctactcgagcgaaaccaagaacggtttcgagaagaacctgtcttggctcaaccgctgggcttgcgccagaacctacggtctgggttcgaagctgccctgggacaagcagttccttgttgagagtttgagtgacagtaccgtctacatggcatactacaccatcgcccactacctgcacggcgaccgctacggtaaggagcctggttccctgaacgtgaaggccgagcagatgatcgacgaagtctgggactacatcttcaccagacgtgagcttagcgatgagcttgtttccaagagcggtatcagcaaggaggctctgcagaagatgcgcagagagttcgagtactggtaccctctggacgtccgtgtctccggaaaggatctcatccagaaccacttgacctttttcctgtacatccacgtcgccctcttccctcctgagtactggcctcgcggtgtccgtgctaacggacacttgctgctcaacggtgagaagatgagcaagagtacgggtaacttccttaccctgaaggatgctgtcgacaagttcggtgccgatgctacccgtattgcctttgccgatgctggtgatggtattgaggacgccaacttcgaggagaccgtcgctaacagcaacatccttcgtctccacactctcaaggactggatggaggaagttgtcaaggacgagaccctgcgtaccggtccggccgatgccttctgggacaagctctttgacaacgagctcaacggccttgtccgtgagactaagaagcactaccaggagtaagtcactttgctatccccgataatcctgcaaccactcgtccacatgatgttcgcatattctacgtatttgctacttcagagcctttcacggccatgagacaaacatcaccacatgcctgatggacaacttattaaacaataccgttttgctgcatttggcttctacttggaattttacgagaagctaactgtacttttagcaccaacttcaagctcgccctgaagtctggtctgtacgacctggtcagcgcccgtgacttctaccgtgaagccaccaccactgccggcatcggcatgcaccgtgacgtcgtcctccgctacatcgagctgcaggcactgatgatggccgtcattgctcctcactggtccgagcacatctggctcgagattctgaagaaggttcgtacctacccccacaacaccacttcatcccaccactactaacgccccatccagccctcaaccatccaccacgcccgcttccccgaggtccccgagctctccctcgagctgtccgcagcccttgactacgcccgctcgaccacctccagcatcacctccgcggaggccaacttcgtgaagaagctctccaagggcaagcagactgccttcgacccccgcaagcccaagaagctcagcatctatgcggccaagaagttccccgtctggcaggagaagtacatcgaccttgtgcgcgaagctttcgacgctgtcagcatctccttcaacgacaaggagctgaacgccaaggtcggcaagctcggcgagatgaagaaggccatgcccttcgtccagagactcaagaagcgtctcgttgtcgacaaggaagtccccgagactgtcttcgaccgtaagctgcctttcgatgaattcgctgtcctcagcgagatggttcctgctattaagcgcgttactggcgccaaggagttggagattgttgctgttgatgagggtggtaagactggtgaggttgtgggtactggtgagaagagggagggattgcaggctgagaatgccgttcccggtcaaccttctttcaactttgccaatattgagtagatgatgaagatgaagatggtgatgattatacatgatacagattagatgagatatcttgatgggtttcatgtttctcttttttcttttgttttgtggtgaaagatcataaaatagcaattttattggttcatgttagatttgtgggttgaattgtgatgacgctgtgtagttcagctgttactgtagggtaggcatgtactgccaacaatatcatcatactccacccacatacttggttttgagaagctcccgtgatgatgggaaatactaaccaggttgctagtggcagcaaatcaagtaataaataggcagttgcaggttcacaggaaggtttcaccaaacaaaactgagactagtttgttcacaccaaatgctttagcaccccaatcatcctgtagtatatatcattagcattgtgtaccttgcctacaaatccccacatgttcatatagtagaacaaagccaagaacttattggtgcaacttacctacgcaacccctccctcaatacatcctcctcttgcgcaaagattagcctaaaccaccccggcaccttgccatgctcttcacacggatgcaggaatacacctgcatcgacgaatttctgagcgagggtaaattcaggtggatatgtgctgtcactgctatctttggggagatagggtgataagtctatatatataaagaagccagcgtttctagatggagtatttattaaacaattataattttttgttgtaggtggggggaaggggaaagaaggaaataacttataaacagagcatgttcactcaccctcctctgatatagttgataccctctcgatcaagagttgacgttgcaattcggtatgttgaagcaagactttgttggctcttgacagtgaagttgcgaaggaagtcttgctcttcgagaatggtggttccgattgttacggctgctgtggaggcgctgtggagtcgtctgggagtagaatcagttgactgctaattgcttctcagaaaggtagtggcagtactgacaggattgcgttgcaggactgccgtaggggtttgttctgcgtaacaaggaagccgagatggaggccgccggacgcgaagtcctgagattatatagattagacaatgtttaatgaacaaaaagactaagacggaagtatgaattaccttgctgaatccgtacaacaagtgcaccaggtcaggattgatcagctctggggtactaagagataatatagaagtgaatggaacagcatctgggtctcctgaatcaaaaacgcatgaagcataaacctcgtcgctgatgagatgaagttggtgtttattgcagaacttgagaatctcagtcagggtttcaactggatagcaacggcctagaggtactgttaacgcttggttgtcgatacacgacgaaacggttatctataccaactggattatgcggattcaccaatagcagtgctcgaatccggacacctttcgcctgagcatccctcagagccagttcatatttttcgacaacagaagaagtgaatgcatcctccgtagtggtatctgcatataccatctgcacaccggcttcgacaccataatcaagctcgaatcgcccataggctggtctactaattaatatgccatcacctggctcagctaaggtgaatccgagcatgctccctattgcagttgcgccgctggcaacaacgacggcttccgggtcaatcggggtaatggggtcgagtaggttgtccagatgcgttgcaactgctctctgtagacgagggagggcattgttaccagagccataggcaactgatgctacgttgaactcaacctaaggatagagaaggaattggttgggactgccgagccctagagaggagaagagagagggttgggaattgaccttggtgttgatgtagttggctatttctgcgcgcattggtgcctaattgcttatcagcactgtaatatgactgcctcggtttccaaatagtatacatgctctgccaatgcaaatgagatcatccccgccggattggtctccttgtcgtactggtgcggtagagcatagcgccacggaattttgtgcagttgcgcattattactgcctcgagaagagagcattatgggacggattctttatgggatatgcctctcagttattgagtgttggaatagaatcgaggtcagactaagtcttcgtcgaggcgaggtaattgcttactatatagtatcggggtgctgaagaggggttgaagtgcaaccactggtggaaatactggtaggattaagtaataacctagatgctggcaacgaactcaatgggttgagagacatgcaggttaagttggaagcgagaaggtgaggggaaaagaatgaagagggaagaagcccacgtgaaggaaggcagtggatcatgataatctaataatctgctcaccaacaatcgatgatctatttatacatcaaccaccaccacacaaccccgaacattatgatacagtattgtttatccctttctagtatacaccttaaaacaccaatcgctatgcaaattatatactatacaatgccatccattccggaagaccgtctcagccatgccgggctcgcttctccagcccaatgttctgccgtccccgaggtcccttcgcgcggttgtcagcaaccttcttcgcttctatgaacttccaacattcaattggagcacgagacccaacatggcggccgtgcggagtaaacacttccacctgagggaacgacttcgaggttttgttctcagagtcggactccttcgcggacttggctcgaatctggactgtaagctcaacccagccgcacccttcgatcaaaatatcggtcgacatgaccttgtagggtagagacggcatctttatatgcttgtcctcaaccgccttggcgatagaccttgggaggtgcgattgagtcacatcccatttcaagtcgaaaactccggcagacgagataacctggccggtaccttctctggcaatgttggccttggggtaagggcgctgctccgtttgcatttcaatggccttttccgttctggtgagatgtgtctcaagcgggacgaagcaagccgccataactacgtcttcagggttcactggcgtgatcctgacaagtcctcctccaagcagtagtgattggccaggtttgatcgaaagacgttcaggtttcttcctcttggtcatgatcaaatcgcgcttgaactcatcacgaacatggtcggccagctcgccacggtcgagccccggcaggtcaatcatttctccccttccacggccaaacgggatacgaataggcgatacggtcgtgccgggtagcgatgagaccacagggaggatagggtaaagatcctcccgaggcgcaggaggtagaagaccctctgaatcaatagcagaggagtcaaagtgggtagccattctggactcctcttcacgaagctcaatcaattccgcaatcttctcaagattcctcgaatccttggggaagcaggcctcaataaaactgctctttccaacgttggccttcccaaccacccaaataccacccccgtgctccctaatctcctctttgactttcttcgtccaccatccccgctgagcactaatcatatgcacattccctaagcggaattcctcatgcgagagaccaaacgtatcacgaagcacagagcgtacatactccatcttcgaatcaacctgctccttcgtagccgccaacagatccgacctgttgataacgaaactgatagtcggcagcttcttcccactcttatacttataagtcgccgagcgccgattcttcgaccgcggatccataatccccaaagtagtgtagatatccttcacaacagacatagggaaatccgccgcatccacaacatgataaatccgattatgattatgaggcgactcatccagatatgctcgaagggaatccatagtcggcgaaatagcaggaacggccttattatgatgcagcagatcatggcacctatcgcaaattggtaccggggctttcgacttctccaaatacttgccagcagtatctgccgctttcaccaaagaagcaccaactgcacaacagcaaataaatagattagcatggccccaaaccatcatacaagacaaatagagaagacaaagactcacacttcggcctcggcacactccccccaacatccgtaagctccagatacttctgaatcctatccgcagccttctccccctcagccttcaacccctttccctcttctccattctcctcaccctcaacaaactgcttcgtctcagacaacagcttccgcgtctgtttcctagtcttcccataatatccaggctcactcggctcgacggtctgcgcatacgctccgcatccgggacaacagacgggaaggacagcctcttcaataactggttcggcagacgggcttgcgtgaagcggaatgctcgtggaaaagctgcgggctacctccgggcggcggaagaaaacagcggttgtggttcgcagagacggcttgggcaggcgtacgagttggcgggatatttgtaaaggagcacggtggtacggtaggcgccctcgcgggatcatgcgcccaaggtatggcgacatagttgttgaggtttggggtgttggagagctcggaggagaaatgcgatgaaagtctagttctagttggtactgatagtgagtgatagcggcgatagcatcggtggtccgcgcgggcggccggaaaaaagttgctgtggcgaactgacacagactagcagcttctactatggctgataagaggattacaagatattgtaaaagagatacagttgtagtgagaatattatttttaatggaatctgcacgctagcttataaaagcttgaaatgtaataaccgtgcttcgcaaaccctgatatcaatgacgagccaacaacatgaaaagcaaccagaaccgtagaccatactccataatcgcatgaaaagaaacattcaatggcattcaatcaagccttcgcttttcccttccccttaggatcttcagcctcctcctcctcctcctcttcagaatcactcatgaactcatcatcctcatcaaatccgatataccgccgaggtgccgcactgcgcgccggttccgacgagggtccaggcgcatcttccatctcctgctcatcatcactttcctcctcggagctagaggatgtctcctgtccacttccctcactcggactggcactcgtacttgatccgcccagaatcgtatcgcgcaggttatccgtccacataccgtccttcatggccataagaaccgcctctctcgccttctcattcatctcgtccttgtcctccatccactggccatcaatcttctgcttgccacctccgttcttcagctcttcctgacgcttctccgctgcatcaacaacagcctgccaccggcgccggcgctcctccttctccttcttgtccatctccggcttgagggcgaggtactcggccaatgccttggcttcgttgactgtgcgtagacgacggccatcgagattgcggctggatccattgtcgtcgccttggttgcgcttgcgcttgctggacatgcgcccaccggcggcgcggagctgggatccgaaacctcctttaccaccgcataggggggcgctgaggcggagggggaggatggaggttgtggcgagattatcattgctgctgatgaggtaggatgcgagggtttcggatgaggggagaagttgcttattgctggttgttgtcaagatcagtcgattgagtggcagagaaggaggtaggtatgaggcgattttgtcggtcaggtctgcgacgctcgatgatgatggtagcgcgaaggagagcgttgaggggagtgagagaccgggaaaagtcgacaggagaatgttgacgttctgggacgccatggtgattgctagtatcacagataacgtcaagaaaaccgtgagtaatgtgtcgattagtcgaatcgctgaggttattgacgctggttcaaggtggagacgttgcttgacttgattgcagaggtgaggcgcagttgacttcattcaggatgcggaggagttcccgataaggccattgatgactaacagggaaaccacctctggattgtcgcctcaggccataagagcattttgcacgtgatgcagcttatccgcctagcggagcgattagggccccaaccctgaaaccgcttcccgatggggaattaccgcacttttttcctcgaccgcagccgctccactcacatcaactacatttaaaccaccctcttcgcgcgttgtcaaggcgattccccgaagagcgctaggaactcgcgacaatgtaagtgatgcacctaatatcggccattgatatcatataggataatgtagctaaccccgagccaggcttatccccaaggaagaccgcaagaagatccacgagtacctcttccgcggtatgtgaacacctatgatccaccggccttgtgtctccgaattgttgcgcgagggtcgatcgatggatgatggatgatagatgaatcagtgttgctgacggttgacaatagagggtgtgctcgtggccaagaaggacttcaaccttcccaagcatggcgacattgacaccaagaacctctacgtgatcaaggcctgccagtccctgacctcccgcggctacgtcaagacccagttctcctggcagtactactactacaccctcacccccgaggtatgttccattgatgaagatgaatgcgtaagacggattgtctgactggttttgatatagggtcttgactacctccgtgagtggctccacctccccgctgaggttgtccctgccacccacatcaagcagcagcgttcccacgctccccctcgtggcatgatgggcggtgaggagcgtgagcgtcgtccccgtgctcctcgtgagggtggctaccgccgccgcgagcaggacaaggagggcgccgcccccggcgagttcgctcccagcttccgtggtggattcggccgtggccgtggtgctccctcctcctaaggggtgtcgcctgccggtcttccaagggcttattgggattgttgccggtgtggcttgaacgactttgaaagaagtcgggaagctatgctatgcacgtcctaaaaaagaagttatgccaagctactgtttcacagttatgacatagttaggattaatggcatgatttcatgactcattttgttattcatttcgtaagataattggcggtcaaatctgctatatacatgcggttaatataccaaaggcaaggttaaaatatacgcagaggcgcagctcatagacgctcgccatcaacacagcctcatttcgagaacctcttccgatcataacggatcactgcctgcaagatgactgatgcgcctgttgcgcagtcatctgcagaacagaattcctccggatgatggctcaacccatctttgcacggaacgaagatcatgctggtcgggactctcttggaggtaaagacactatcgtgacctgccccgctcatgattgtccgcataagggacttgggctccgcagcattgacgtctgagacgaccgcctccgcggattgctgcacgcactcgatgcagtcagggtggaacttgacagcgggcgagtcgaagtcgagggtccactctacgcggcaaggcttgccaatacccttaccctcctctgcagcgatcgagtcgaactccttcctcaattgatcttctacgacctggaccaactcgctttctgggccgcgaatgtcgagagtgaagctgacagtgccgggaaccgtgttcacactgccaggctttgcctctacaattccaacactagccagacagccgtgggaggaggcaacctcgcgagcgcgtaccatcattcgagcaaaggcataaagggcatctgcgcggtgttcgaacgcggtggtacccgtgtgggtgtctctgccgaagattgtaaggcggaaccagcggtatgcctgaacggcggtaacgacaccaacgtgctggcctgcagaaatgagatgggggccttgctcaatgtgtagctcgaagtgggccgccatgggtgtttgcttgtatgagcacgggacacttccgagatagttgatcttctccaacgcagacttcatagactccggggcagaagatgcggtcgggagagatgcgactgttgggacctctttcagcccatgtgcccgttcaagagaaatgcattctgcccaaacgccagaagacaccatgctaatagggaaacgggcgccctcttcgctgtcacagcgttagtcatgagggttgaagataatagtagtctgggccatactttgtccaattcacaacaccaatgccaccctccgtctccaaattcatttcgtcaattactttgagcgcttcgatgccggagagcacacccaagattccatcataccggccacctgttggctgcgtatccagatggctgccaatgaaagtgggtggcacgtcggtccgtcgtccagggcgaacagcgaagatgttgcccatttcatcgaccgtaacttcgcatttcaatgccttcgttgtttcgatgaaccaatcccgtacttgcttgtcttcctgtgacagcgcgagtcgctgcataccagtgtctgtgtgcccactgaattgctgttagacattcgcaatccatggtaaagcgcaggccattgggtacgagaagcagtctcctttgcatgcatctcgaaagtccgcttatagtgaatccaaagggtgtcgcagtagcacttactctccccagcgaataccatatccccactgacagctatgatgaaggtcctttgccaagcgttctttattggccctgagagccgagacctcagcctcggttagctctgtagacagcatggtgtgagtcgggataattgagaaagctcgacgtggtgtgaacgcgggtttcacgaaggctggtcttgtctgccttgataggatcccagtaaccctgacagcaggtaatgtttggtagaagatgaaggccatcttgacctcaaatgggcgcccaaggggctatatctagttcaatggccttggagacccttccagataagaccgccaatcgacggtatgataagatagctgggtggggttgagctggggtctcgggctttccaccgaatcagatatccgcggatttgggtgacgataaaccgtttcctcgtaccccaactccctcgggtcgcttatataggaaggtacaagagtagctcggcaatggacaactccgtgaggggcagagaaggctttcgggtcacggttggcctgtttcattactgattgacagggcgtggagcagttgcggtagtgggtgtagggacaggcatgtattaccagtccttgctgcaacaacaggttgaatcgtctatactatggacgaaagtgttttgttctcattgtaggcttcaatgccatatctattgcacagtctaaggcgttcaagttgcatagatctggctaagaggacgattgtatccacaaggatgattcaaacaaccgacatgtgctgttagagacacaagggagggcgtgcgcttgcggaagactcaatcagtgctttaattgacggaagagatgcccagtggctcaatgtctgatggaagtcgactgctttaggagattgccggcaatgatgtgtgcccctaagccttatggacttggtcgctcagcggaccttcatgaggagttacgcacacagcccctgatgataaagcggacgcaccactttcacaagaatcacaataaaatggcctagaaagttgcaagaaaagaggagcatagactactcacatcatacaataacgaccaacaaaaagaaaaacaataaaatcgacagctgtgtcgatgggtgattccaaagattgatgagaggagtcttttgggcaaaccacggccatctctggtaaaaggcaagaaatgggttctgagctagtttgtcccactcctcgcagattgaacctttaagtgcttcttatagtgcctttcatcatccacccgccgcagttcgagaccccgccggcgcgaactttttattgacgtttcttttcgtcttgttccgccttgcgattgctaaccccgcattcagtcattgcgaccttcaattcccctcagacatacattgatttccatcaacgtatatactcaaccccgtcatacaagatgtcttccgctgcctgcatcttctgcaagatcatcaagggtacggtgcctccttaacctgtacatttacaaatgttacattcttggttctccaaattgtgtccgctgctagcagtgatccgatccggctaaccccgacgtaaacaataggtgatatcccttctttcaagctcttcgagagcgacaaggtctttgccttcctcgacattcaaccccttagccgtggacacgctgtaagtgtcgccacccctgttttatgaaccgcatatacaccaccgcctcaagtatacccccgcacgacatgtcgcattctgttccctacctggagacagacagtcaacggtcatccaaaacaagcagtatacccatgaatatcttcagaaaatccgatcccgtccccaaatagctccctaattttcacatatcccccccgtccccccaaggaccaaagaaggaaccagacaaagctaacaaccaatctgcaaaacacagctcgtgatccccaagttccacggtgccaagctcaccgacatccccgacgaagatcttcaggaaatcctggtacgtagacagtacggacatgcacatttgagataagctcagcgctcgatccgcatgcttttataaggtcccgcctgatcgttgcgagcactcccctctttcagtcttccccgcaaccagctggctagctagctagctacagagacagatactaataagtcatctttccaaatcggacagcccgtcgcgaagaagatcgccaaggccaccggcgccgaggacttcaacgtccttcagaacaatggtcgcatagcgcaccaggtagtcgatcatgtaagttgctagcttaccatggaagtgtgaggtattcaaagctgatgttcggtgttttccaggttcacttccacatggtatgtttaggatttactatcattcgtctatgcagctgttcagagagaatatcgatcccccacaaccctgatgataatatcactgacaaaaacgacgaaatagattcccaagcctaacgagaaggaaggtctcggtatcggctggcccgctcaggaatccgatatggacaagctgaaggctctgttcgaggaaatcaaggctaagatgtaaaagtgtacgtagtacagatatagcaagtgctacagctgcgtctaattacataccatgtgctattatcaatactgtcttcacaatatgattaactgtacggtacattctgtagttataacgtagaaaactatacctagcttcggtgggtcgattgcatctatcaagaaaagtccattgctccattgaaaccactaggagaaccccgcaatccaagtatacatgcttcatgacagacaagtagaagctgtatgtacatgcctcaccaatgtgagcgttattataacaagtagtcttctatcaacacactctagcagtctatcgtataccaaggcgtggggtatatcactcggccttctcgccgttaagtgcgtttccctcaaccttgctcttcgtgggatagaactcgatcttaccctcaccttggatgacatctagtctatcatacaaggaagtggctcgaacgtatgggtcaagctgccagtactggacccttaagcgttcgatcaggtcctttctcctgtctaccgccgccttgagggcgctctcgtcctttttcattgtcgaagagatccagtcgatggtggcgccttgaagctcctgcgccagctgctgtctctcggccagcaattcgtcgcgcttggcactgtcctcctgaggcttgttctcatcgggctggggctcgacatacttgtaggcccagttctcgtcaccctcaagctctttcataatgcgatctttgggaatgaacttctccagatcttggacattcttggtgaactggatcttagaggcgacgacagggtcgagccagcccttgatgatattccagatacctgtaatcgatgttagaggggattttgtgagtaccgagtctagataactaacctgagaagatccaaggagctttgtgaatcaagacaactcccagacactctgggtaattggcttcaaagcacttgatcatatacttcaccggatgataatcctatgaccgttagaattaggagctattggtcgcaaacaggtgtgcttaccatgtttgctaaggagaagtcggtcatgtcgaagacaacacactatttccctgtcagtggataacgcccttaccatggggcagtatactcacagctgtttcaactggaggcgcaagcatcattcgagcggtctcaatagtgtacaccgtgaaccggtccaaggcttctgtctcctggtcggcggccttgtgcaagcgcactctcacgacgcagatcggacggccaagcttgtccacaccgtggaggaaacttttacccatgcgcatctgcaacaaaaagtcttcaccggccttcttctcagcgggatcagaactctgagatttcttcagggcactttgctcgccattcttcataatatcctcatccaacttaacgtccagcagtctccagcgaagcgtagagatcaacatgaccagagcatttttgacgtcccactttcgcgcgcgcaggaatcgcaagagcagagaatcggggttgtcatgcttaaccatattccaaagagtcacccgaatctcctcaggcttcatatccacaagagcctgctggaactcttttgactgtccatacttgtcatctccgtcggcgatgctgatagaagcgagactcgaagcgatcccgttggttcccttgtcgctagcgctatcttcctcctcatccgtgttgctccgcccgaaaagaccgaaccgactccgtttagactgcttcttcttatcttggggctggcttgccgccgcagcagcagcgtcgccgttctgcttttggaccagctcaacagcatccagattgacaccgcagaccttcagcagcaggacccaaagctcttgtagcttggcttcctgctctggtgtgagatttcccacggtcccaggtggtagatccataggcattgtctttagggtttcaatgactccgagaaagggtacttgcgactcttgcaaaggttcaacagagtcgagaatcgtaggaatatcgcctcccgacttgcggtatttatcctgcagccaggcgcctgctccgataagaaatagggtgaatgtgactgaccagaacgacgaagcttccctcggtttgtaaggttgtgacaacggcgaagtggagaagggtcgtctgaaggatccagaccgaatcagaggactttgattagagtaccacggtgggaagatctgtgcacgtcctgaatgcaggagtctgtccgacgcgaacttgatggaattggccgaggatggaggtagacggcggcgcaggagggaacaagcatgcatgtgcttgttcgtgagggccagaaggcgattggagaaggacgagtcaaatcccaaaggcagagatgccggcttccttttcctggtgtcctcgtgagtaaaatgggagacgaagatccgagcctaaatttcaagccgggaataatgcggggaaggaaggaaggaggcgaagagaaggcggacggtgcagttcgcttggaaccttcacagattcaaggttcagcaacaggagactaaggggaactcacagcggttggatgcggcaataatggggagtgttgatgaagccagcgaacaggatggattgccaagtctcttatttttcccagtccgcaatccaatgatgataatcgcaccaggggtccctccggactagacggaagaactaagtagtcctaattataggctgattggggcattttgggtcgcagtggcgcccccaggcagcaatctgcagacacctgaggcatgaaaaaggagggtccagtgactcggccttgcctaaagcggggatcaacatcaacaaacccaatctttcgcaactccttcatacagcgtgaaacgcaacggcgtcaagtcgcatatttgtgacagcttgtcttctatactgtgcttattcctattttgttgcattagtgtctctcaatcggcttagttgcagccttcaatttgggtacacagtctcagaatcatcatggatgctttttcccgctcatcgtctcgcccacggccctcatcgcgacccacgacccccctaagacccagttcccggtcgtcgatccgtgaagctcatggttatggcaacagtattggtatggcaggctacacccagcctgccatcaatgccttagagccccagtttgcagagcttgcagactccatggccgacctcgaggccaacttcatgcaccttcagctgatgcacgaaagtttgacccggttcagtgaaagctttgccagttttctctatggtttgaacatgaatgcgttctgtgtggactttccggaggtaattgcgacggtgaataatgtctgtcttccctctataagctgacgatcggttacaggcgcccattcccgaatcttttcggagagccaagcaagcagaggcacagaatggtatggtcacagctgcgcgaaagggagatccaactactaatagcacgcatagaggcagaagcagaacagctgaaagcgaccactgaagcggagatgacattcatgtgagatctggttactccccgggccagttgtttcatgcttttttgcatcatactaacgacatgacgtacttaggactacggatacttccttcatcgaacatcctccaagcaccgtctcctccaagccttcggcaaaaatcccagccccgtcgcgtggcaccaccagaggatctacgcgtggttcgacaagcagtcgctatgcgacacggggcaccaatcgtggcgcccgtccaagcgcattgccccgcggacgaggattacggtgaaggcaggaacccggatggtagaaattttgaacagggcgcagacggttgagcctgaagaggcacaaagacttgcgcgaagggaacggtttgctattggcaatccgtggagaatccctgcaattcgcaacgcgctcccaaaccttgaaaggaaccccgttcctgaaagaacatacggcgatgattgtcgtaacacaaagcctgccgagcggcctgtccgatctcagcggctcggatctttcttgaggaaattctagctagccccagggtgtagagttagggtaggctggcgatagtcccgtctagtgaccgaagaacttttccagagactacgaagagatctgggtcacgtatggttgcattacgaataatgatcaatgcaagacgttcatgtgttgggaagtgggtggccttgcggctcagataagcgtttgtagaaccatcgcccgtccccagaatgacccaccccggggtcaatggggaaaggcatcgttaagtatcagatgccccatcttcaagtatggagaacgcacggccgtgagctgcaactgtatattatgttagggggattcctcgaggggacacattgaattaaatttccccggaaaggaccccaactgaggaagccaaagaagccccaagcacgatctcggatcaaatgcagtcccggtttcttatcgcccggagccgcggtcgacccttgcgaaaaaagatctgtctttgcatccagcgcccacggtgcctgtcttcagggacgatctttacccgtatatataattgacctgcctgtgtattgtattatctagtctctgtcggtctattccattggggttgtccttccacaatcccgaacgagaagccagagagggaccgagtgactcgaggggggatccgatcccgactgactgtggaacacccggtggctgcggagaaacacttgagtgactgttgccgctctcgacattccactgcttcggtggctttgctattggcacatcttgtgaaggtgcatttctctcttcatccccattggaggacccccggcctccccctagcatacagagctgatatgattgatacctgcagagtcctccagggtagtccgatccatggattccttcgtgatctgcagttgacctgctgaacatccttatcatctccccctctctacattgagagaaaaactgtactactttataacacactccttcactccatctcgactgggagcctcactctaggctgagccaggataggcttcacgtgcgaggtgtgacactgtttcactacgttcattcatatataccccacacaatggctagcgtcctttcgatatcattactctctgaggccgaatatggctgcggtatgtgaaaagcatgcgcagagctgttttgttgaccttttagcacctttactgacccggtaacagagcacctggccacgcaactggggcaggatgtgagcactgcagagcagttcaagaacgcattcctgaaagcgcataattcattaggccatttcccgcggtcaatggagtcatccacaaagcagaacggtcgtctcaaagccaaggactttctgaaaccgaagtacacttgcttgacatgcggtgaagcgatgccgatgggcggccggaaagctcacaccgagaagaccagccatcagttctgtaagtggctcttgccttttcctctcaatgttaactgacagtgttcgagacatggagtcgcgagcccgcacggtgtattgccaggcttgtggtgatttcgtctacgaccacggcctcgaacgacttcggtgctcgacaacagaaagtgctcttcaaggttagcatctaattgactctcgcgcttattatagcactaacacgacgaagtcgccaagaagcgtcgcttcagcgatagctctgcggacgagctttatattcggagcaatgccagcaagcgtccttgcgccaaacaaggcgtcaggggcttgttcaacctggggcaaacctgctatttgaatgtcattcttcagacccttctgcacgacccgatactcaacacgtacttcctcgggaacggtcatcaaccccacgactgcactgcctctgactgcgtaggatgtgcagttgctgaggcttttgcggattttaacagcagcgacaaaccggagggtttcgcggctctcaatcttcttctagcatcatggcgtgcaagttctgtatgttaccaggtacatcattttcttatcagcgacgctaatggcgattcattcagactttggcaggatatcaacaacaagacgcacacgagtattaccagtttctcgtcgacaagcttcaccttagtactgagaaccaccgagaaggccatgaaaagggttgtccttgcttctttcacaagaccttctacggcaagctccgaagcagcgtgacttgcgacaagtgtggtaacgtcacacgaacggatgatccgatggtggatctcagtctcgacgttcaagtgcaggcgaagaaacgcgccatgggtggcacaggggttccgtcgacgcctaccctgagtggatgcctcgaaagctacacatctccagagaaactgatggcaggcgtgtataactgcagtcactgcggaggaacgccgcagaaggcgaccaaacaattgcgcatccggaagttacccgccattctgtgcatgcaactaaaggtacggtttctcggcacatttccgatatcatagacgcatacttacttgacacagcgcttcgaacacaccttttccgtctcggagaagctagaaggcaaaatcgacttcccactatcgatcaacatgctcccatatacgaccagcccgcaggccaaagttgacaggtctagattcgtatatgacctctcatcagccgtagtccatcagggcaagctcgatgcggggcattactacgtctactgccgccagggcgatgatgtgagttcttgacctgatccccttccaggaactcatttttaacccaagtctttcagtgggtgctcttcaacgacgacaaagtcactgccgtcactgaggcagaagttctcaacgctgacgcttacctcttattctacaaccttcgatcactggcttccgcgccacaatagaagctacctatcgtgtaccatcacaccgcatcatcatcacattgtactcggcggctgcctcatcttctcgcattcggtttctcttcagcgactcggagtccacggctaggagttgtattattattgtccggttgattgattgcatgcatgctcatgtaggagagctgtggctggcatcttcgatcacggatgcaagactggtgttgttgtgttgcgttcctttgttttctttgctttctttcatacgctcagttgcctatatatagcggataagtctgcgccgtgtgcgtttagactacctagtatagtatagtagaaggctaaggttgcgggagtggtatacatggctgcttagctagatatgggggtcaaatacagaccgtacggggtttcagtaacgtgattttattcatctaaattaaatccggggtcgtcgatatccgaactgacataggcgctttcatgcgaaccaacaatataactcccagtcatctacgctacgcaggtcctacagggttgacagtcggatgtccagagcagacggtatagaaaacggcagccaaccaaaggcagtatgggctaatggcccagaccatcccaacacaaagtgcaccgttcaaaaagccatcctaaagccagagcagagccgcacgcttccaaaagacgtaaccagcccatgagccccagcagcaccttgacctttcaaaaccaagcacttcacctttcacgggccaagtggggagagatgagacgattatcaagagatcctcaattcaatccgaatcattacgaattgccttgttttaaaggaaatgaaaaaaaggagcttcgacaaaagacaccctttctttaagacggtccacaccagccacaacctaacacacacgtctctataatctcaaatcccatctcttcctcattttaaaaagaatattccacctggaaacaaaagaaaaacaccattttatttcattccattgaaagcaagcccggttcggatttcatttgcgtttcgatttcacacacacactggtaaaagaaaaaagaggctaccgtatccccctgttttcttcctccgctaaaccccgacatgagactgtgggggattgtcggttttaatttgggtgatatgtgagagaatcgaagcgccacgagcacgttttaacgaatcatcgtcgtgaataacggaaaaatgggatcgaggaagaagattcgatttaacggtactgtttgggggtgtggtgttagttaggtttcttgtcttctggtatgtgtggcgtgatcgtgtgtatgtgtggttctggctctttcgatgtcgagtggcatttcaattcattccatttcccggttcttcattgcttttcttttttgtcgcaagtcccatctctttcgaaaatcctcctcgccatgccaatgccattgcggatatgatgtggtgctggtgctggaatgtgtatacgggatatggtgaaaccaaccttgtggaaaccgatgtcagaggacttctcacggaagcactgacggcagatgttcatctgtacgcaagaagaaaaccagttagccattgttcctgccctctctataatttcgcatcgcaaagaatctggtgatatccataccccgtacttgcggatcagaccggcgcggtgggagcagacacggctgtattattccaaaacgaatcagcacataacttccttcacattttcgtaattcctccatttgtttctcttcgtcttcaaaatccccccaatccccctaatctcctcctcaggaatatgtcgcatatacgcaccaagaacgggaacccttgccgaacctgtaaatcacacatcaattagcctcccacacatacatatcaaattcgagggacatcgttttcacttacttgcggggccggctgtaccaaacggactcgtgagtcatcttgaatctgaggcgagagaaacctggggatgagacggtgtttggctggcggtttgtcgtcgctgggcgttgaagggggacggggattcaacgaaaaggttagggtcgaaattccgtttgtgtgtctttccggtttccgtgatgcgggctcggaccatctcgcttgatggggcgctaagccttgtttgggggtggtggtcatgtgatgtatgggtttggggtttttttttggctactccggagggatggttcggagggtgggttgttccggccgatgtatatcagaatggaatatggcaatgtttggaggttagtccacttaaattgcagtatgatgatgatgtccataatggttacttgctggatgcggatgctacttatgttatacggagctaaatcttcgagagagcagctgacagaactgctatacttatctacgacatcatttcggtgccctatctcatcgcctaccttggagccataacaaaatgaccaaacagagacgttcacactaaacgccaaattgtcagaaaaaaaaaatcactttctattaatattttccttacgcagccatatatttcagtccgtgtgcctatcgtaagcgagactcaatgctgcttaacaccaacaccacacaataagttaaagccatacaattcaaactgagcttaatgggctcaacacatacacactaacatccgaccccgatcatgtcttccatatataattaagcgactacaataagctaccccaggatctacccagccaccccaacagacagattccaatatgagcagactacttcgtacagagtacttacttcacccttttaagtagtaagcatattcctcaataccaggacactacttactttactactccattgttcgtacctctagggtatctacccagttaggtaatagtcttatgaccctcccatgctcagtcaggtacggagtacatagctattttatctatcagtacctacctcccagggaaaacacactaagctacatgcattaggggcaaagaggaagaacgaaaaatggcaaaaataaggggagaaaagaaaaagaaaggagaagaaagaaataggaaataaaagggaaaagcaattcaggggatttcataaggcttagagctatcggtgtaaggctggctaggtaagtagctagctagcacatgcatcaactaacttactaataagttgtctaatggatggacattatagttagcactagttaatatctggttgtcacttagcctttctgaggctcgatggagtatgtctcctaaccaatgtaagctccgtatagtatctacaggacagtatcccacttcaggacttcacttaatgagttcaccacttgcttacttgtgaagaggaaccataactacaaccaaatcatattgaccagttcaaagatatgtggttagatcaaatgttcagggacagtgcaaagaaaggtctactctgtaatgaccaacgatcaacaaagctgtacttagctacaggagagaagtaatcacaagctagcctccttaaaacccgaacatccgagttccgacgtgatagactactgtgtagaaacttgcgttcgggactacccgctcgattggacctaatagggctaagtagtgatgatcgcagtaggcgcggaacaggagaagtatctagcatctgtctagtagatgttattggtgctgtgtgtttaagcgattggtccgtctcgcttggatcactgatgatcatctactgtgtatgtagcagggtactttgtgcctgtttggtaattccggacgccgattttcggggggttcgttattgttaggtgacattgatgtggttgttgtttaactatgtcgcgtgagccatattaatcagacaagcaatgtagcgaatagtctgtcttgtgatatggcgttgtaaacttgtgactactgcaggacatacccatgtcttgtttcaggctagtagggtgggtttgtatctccccgcagtcaccctccctgtcttttgcggcatgttgcggtgacttctggtcacactcacctactcgagggctgtgcttgcggtggggttagtaaaacacagtacgtatatgggactgacatgttcaagtaaggggtgcggttctcaatcacttgaccgtacgtatactgcaacttgcacattcctcggcaagttaaactgaacgagtcgagtggatgagaagactctgagagactctagctaaggtgcgttaagtatcgagaactataccttgtgagatggacatgaagcgaactgacttgtgagatagtgtatgccaaggtggctatggaaattagtatgtccgaaaagttaatgaggttcactactgtccttgagcaaagagtctggggtaatggcttctctagctattgtagaatgtgtcgatggaaagacatttctatctgaagcgagtgcttctgtgccacccggagagctaaaatccctatgctttgccagattcatgaccaggatcggttggactgtctggtaggaagccatcgaattctgctagagaagagctggctgttatagttccttgaagtcgcttaatgaattcgcgccagctagtgtggctgcctcgagcgaatcacaaagaaaggcagaacggcagagggagtacctgaacaagtctcaccaaccaggtcagccggttaaagcggcatcatcatcggagcgaagccggaattagcggcacggagattatggcctgcctagtatagtcaagtgctgagccatggtttgtctccgcttagaaaatgagctcagcggcatcctccggctgttttgcgtgcgcttgcccaatatcacaaaattttcgccaatcgaactactccgaccaaagttgcggtggaatccacatggaaggaaaagtctccgagttaacgcgagcctaatcgagaaactgattgggcaatgcatcagaagtggtccgtccactactacctaccaaaatgatgacctgtaagctggatgccatatgtaagactggtaaaccctgaatggcgacatgtcaacatgacagttgtagtctaggcctctcgtcgatgacggggcttgaatcgcggcagccttcgtgcaaatgccgccagacaaagggaggaaatcctgacgagtgtaaagccgagaaagccggatgtgccgaacttgaggtcatgggatcgggtcgatcttatcaggcctaaaattttatggcgggtccctttaagtttgtgtgtcggcttgacagcacggatgtccagcagtccaatctggcaatgattgctgcgtagtatgatcctgtgggcagatagactcaccaggacagtggcattcacaaaaggacaatagtaacacccattctcatccctatatagactattgtaaccatgttgtgggtttgactctagcaaagctgcctggagaaaccatgccatgacgtcaacgacatgaccgcaacaagtatccgatttttcccacgatgagcatcgcgtcatgatcgatgagtcagtgttggtcatacgatgcataagtacgggtgcggtgggaaagggccagccaggcctggaaacggtcaaagagagaaagtgggtaaatacttaaaaaacttagaaaaagaggctcgacagtgattgaatgattaatgcgagagatctccgggtcagacggatgtgtgtcgagacgggaggtgcgtggatgtaagaaaaaggtgacgagaagcgccatggcgcatggacggtgtttatgcctcccgggcagttcatacagaacggaagggcgcggatgcggattgtgattctcgcccggtgatgccaagccgcgatcgtcagttgggttgtcagaaagagagcaaaggtcgatagatactggcagaatcatacacgggcacggacagggctagcaatcactagcaaaaagcccaacgtgcgaggcccgccgggtggggtttgcttccgagggaagaggatgccactaaagccggcagagatcgacgcttgttggtggtctgcctacactcgaaagtagtagatagacacaccaaatagctcgatataaggattacaaccgagtactatcgagtactctatggctaaatatggcggctgtataggttgcaccacagttgcacaatcatcgtgctagatgaacatctccctagcagtcagttcatggttgcttatcagtctaacctcagtgttgttgttgttgtatagataggatcgtcgccaaacctactaaaaggccggtcggcgccagcacatccgcggtctgtacctgtctatggcatgcaccgctctcctcgcttgtagcaccgacctttagtgcaaccgcctgcatcgcaacgtcacgctacactggcatgcgccctgagttgacgatcagcccaccagaatctggagatggggaaaagtcatgggccagttgggtacattccagatgggccactgttcaacagggctggacagctagctagctatccatccatctttaggtacaacactgctcctacatccaccgcagctactctgtgcatgtagctgagatattaacactagtctcattggagcggaatagtccaaagcagtagtccgtagggccagagacagcttgccgtagatggcaccgatcgacctctgcagaaagaggggttatattagtacggacggtcttgacttcagctcgccctttggtcgcggaggatacttcctcctttagcagctccccgctccaaatcccctccaatacacagcttgcaataaaccagccatcgtgtcagtgtgtgccgtgctgcttgctcgttcgcggtccgttgcatatgtagttggtacatgctcattggagctggtgatagatcgctccgcacgctggaccaacataacaaacacactatggcatcctccctttcatgagtccccaccaacacttctcacctgccgatgtaaggggagatgaactagatgcatgactgtcctctggtgatgtcgcgagaatccaatcatctaaatactccggatctgatacattctatcctagacaacagcccctggcagttcgctctttcacaagctcgaatagccgccgagacagagaggtgagtaaacgattcgtaggcttattgcgcaccatcttacaagtcgcgggaaggcgggacctaagaagttgggcgtatcagaatccctgcattctggacttctgtttacaccccccgcgatcgaatgattgctgcgccttccgggggactgtcagacggacaggaagggatggatagatacatggcatgagcgtcctggcataattgtgactacagaggactgcgtggagacgagatcggagcccaaacggcgtacaggccactgccagacacgcagatgaaggtggaccggcatagggagtagtagttagtagtctcatgcacttgcagccttgttgaccctttcgccaatagtgcgaacttgggcttgaagacccttctgtgtgattctggcatcgcgaaaaaggcctgctgtcccacggcattagtaatatatccgcgggaggggccatgaagccttaagaagcaagatgaaaaagccccgaaaacaggcgaacaggatcccgaagcggatggggaacaagaagggaacatccactggtccgctctaggccacacgctaaaagtccggtaccttgggatgaggtcatttcccatggcgcgtcagcgcatcgtgacctggaagtcgagtatctcctcccggtcgctccgggcttccgagaacccaactctgccaagaggggtaattttcttttttacttttctcttttcttttgtaaatccccttttctgggctcttatttgtgctcctcttcggctttatcgaaaaatggttcatatgatctgaagccaaaacaggcacttctcttgttgccattattaagtaattcaatttccacacaacaaaccttaatttgaagaagtttcaaatcacagcaagatgcatcgtgactcagaggctgagagctcgtgatccgagggggctttgctactagtagtaagagagatatacggagtagggatgatgttggaaaggaagtaagatggcaaggagggattggctgacaggcgaaaagatcccgagaaaagtgtaaatggaaacatagaagggaaaagaaaattcatttttctgaatggaagaagaaataaagttccaggcattggaggcggtgattagtccaaaaagaatgatcggctccatcgctggatgacttcgggaggcatgagtggtggtaccagcgttctcagcaagacacctcatgatgacgatgggagccttgaaggatcgagctatatcatgggcatagcctcaacatggaatccgagagtatcttgttagttgttaatcatcatcactctcatttcttgcaaaagaagaaagaagagcgaggggtcaagcaaacaaagcagcagtcagatcagaaaccagactgggaggtgaacagcgtcactcctgggggggccttagtccttttttttttaatttttatttccttttttttttttttttccgtttccctttccttgctagcgcgagggtgccagtgagtaactccactttcggcacacggagctttggggagctcgagcaggaccgcttgtttccacggcctttcggtcttgttgcatgctatccccgccagctccgaaggaaggagagctgcgaacacaaggcgcgaatgggaaagaaaaaaattaagtcatgagtaatgattaaataaaaagtctcgcgcaaccctctctggcaacccctccggtcttcagccttccgtctcgcttcttaacctacttgtatggtccaccgttggctggctgggttttcttggattcttcgcccattctcatacttatacttcctgctctcccttcacgaccgtccgttgcttccatacttcagccctaccaacctgtctgacctcccgacgtattcccacgtactgcccttcgccaggtggtagccgcgcccatccgcaatccagcaacccagcttcctcgtacaaatttcctctgttatcttgtttgcgacaaggggagctgggagttggcttaatctcatagtcgtctctccgtgctcgcacttgatttcaacctgtcgcacgtcgcagagatatagttccccttatttggttttcccgtctgtaatatagaagctcccccccctcatgtggcagcgagcttcccgtgccgcgcttgcggcagctttccttctagtctccgttgcgaatgcgcttccccacggagacgacgaagcgatggacatggacatgggtatggatatgagccacagcgagtccacccaggaatcgtccacagaggcaaatgacgactcccccatgagctacttcgcgtatgggaaacacggcaccgcgattgcggttcacatcggtctcatgattctcgcctggtgcttcattctgccgacaggtatagctccattttatctaaccctcacaaagacacagaaaactaacactttgcaataacagcggtcatgttcagcgtcgcacggtcacgtttcgcattgccgtcgcaattccttttcttggtatgcaacgcggtgggattgcttattggaatcatctacaacagccagacccccgatctgtatgagaacaacgctcatcacaagattggctggatcgcaacctgggtcatgagcgcgcaggtcatcatgtcgttgatctttgcctatgctggcagaggcgagtcggagtcgacttcgtatgaacgggcagcgttccttcccgtttctaccgatgagatggagagcccccagatgtactctggtggtattcgccattcgtaccgctggtcgcgcgacagtggacagggcacggagagaaattcctcttccctccacagtcgtcctgggtcgccatcttgtgcgtcgccttcggatgagtatgacggtttcgaaaagcccgaggatccgctccccgaaccctcgtcccaaccgcgcgggtggttccgcatccccttcgccgaccgattccttgccagccgtgtacctcgtctggtctccaccagagcgcttcgcattatctcgaccatctaaatgggtccagcatcattactggtcaatatcgagtaacggagattgcttagagggaaatatactgccgagcaggggcgatgctagggcagaatatccccgtgtaaataatcctcagaggagtagcatccaagctcttcaagcaatgatatctggttgttattttctatggactgcgggttggaccttctgggtcttgtgttcggatggcaatcgccgattgaaggtccgaccggcccgcaatatccgacggagtatattaagttagtctttgtcttccccgcacgagaggagggagggcatttagactttctgcacgtatcatctgcagcttctcttcttcccaatcacctataaattccctttccattctttggtattctttgaaatccgatatgccgcagaagctcacggtcgcggtggcgcaagccagcacccagtccaccctggcagccactttggcggccctggagcgagtgactcgccatgctgcggcccgcggggtgcacttgattctctttcccgaggcatatcttgggggctatcccagaacctgtgactttggcacagctgtaggtgcccgtggcgctcatgggcgcgaccaattcctcgaatacttccatgcggcggtcgacttgggtgacacccccacgggagctggggacgactgggtgaaccgtagattgccccttccgcgaggcaaggaataccgcggggatggcacccgagaggcgctggagaaaatctcccgcgaaactggtgtgttcatcgtgtgtggcgtcattgagcgcgccgggggtagcctgtattgttccgccatctatgtcgatccgcgcgatggcgccttgggcaagcggcggaaggtcatgccggtgagtggcaaggagttgctctgagaagattatgttgatcaagctaattggtgattcacagacggcctcggagcgtctgatctgggctcaaggatccccttccaccctcaaggctgtcaccactgaacttaatggggttcggctgaccatcggggccgcaatctgctgggagaattacatgccgatgcttcgacagagcctgtactctcagaatgtcaacctctatctagccccgacggccgatgcccgcgatacctggctgccgttgatgcgcacagtggctggagaaggccgtacgttcgttttatccgccaaccaatgtgtgcgacgccgggaactgcccggatggatcacggccaactcccaggacaaacacaatggcgatgactatgtgtgtcggggcggctcctgcattgtcggtcccctgggagaagtcctcagtgaccccatctgggaagtgagcacagatgatgtgactgacgccagtgatccaaatgatccagcaattgcagccgcactgtctatcacggagattgatatggaggattgtgagcgcggccggttagatctggacgtggcgggcagttactcacgcaatgactccttcaagctgacagtagatgggctggacctgaaccctccgccactgtaagctgtcagcgacttgtaatgagcctgatgtatataactaagagaaatgtacctaataagtgttcggaggagtgcccctgaaatggagtagatcctgagtcgaataagatgagatgtcaatcattcagatcttcacaatccgtagagattatctcccaaaaatgcaagcctgaaatgaagcctgaggcattaaacttagtcagccattacatcagctgaagcttacccgattcggggcatttgaatggtgtttttggtaccaatcaatccatcgatcaatcaccttcatctgaatcatctactactattataaaacttcattctttgaaggccaatgacatgtagtaattcttgaggtcacgggtacacaccatcttcaggacctgatatgacgcccagtccggcaccttcacctcagttggcctgccgacgctgccgtattcgcaaacagaaagcacgttgccccaacattgccaacacaatgataccggctaatgtaagggctactgtatagtgcagccggcctcgaccatgcaccaactgtgtacaggcgcaagccggtaaatctctcttaatggtactactccctgtgatcttctgtcgcaactgacatacatcagcctgtgtacctagtcaacgaccagctaggaagagccgcgtcaatccggagtgagctgttccctcatcaggctgatagccagggattattgcgtctgaccacattagatatgcccgtgctctggaggaacggattatcgagctggagtcccaacaacgtgattccactgatcctactctcgagccgggcccaactccaggcctgaggaagacagacgtgcagccgacagagtcactcgaaccgccgcaaaaacgaataacccgagcccaaactgaagaagcaacattcccagcaatttgtctctcatcccatggcccgggtgatggcgaaggcacccaagctgggagtaccccttctattaccgtacttcccccccttcacacgccacagtcggggtcactggaagggaccaactatgagaaggagatcccgtcacagactcaggatgagctgatccaaatcttcctaaagcgcgtgaacccgcgctatccctttctccacgaagaaaccttcatcgcctggtacgatgcatggaaagcatccaggaacttgggcgtgcctctgccgccggaagagcagtggaaagcattcttcatcaagatggttggtcatttgcgaagaccatgcaacataagctgacaggctagcgccaggcacttgccgttagccttttgatcgcacctcgagtatcaccccgagatatgaaagtttctcaggtaggagtaccgtcaaatcacatcacgcccccgctaaaatcacaggctctatattcctccgctgcatcatctctagatgctgtattcgcttgtcttgaccccgtattgcatgcgcaagcctacttactgtgcacgctgcatgcacttcactcgccttcttcgcaaacggttttgacaatgatttctgcagccgtgcgttgctgcgtgattgcacagttgcatttatcagcagtagaacaccaaccgcaagaactgctctgtgagaggcagatccggcgccgtgtgttctggtctgcttacgcgattgatcgcctggtcagttgggtttatcatgtcccgtgcagtctcgtggacgaagacatccaagttgaggtgagatctcgctcgcagaatattgaattggaggaactgacttaatgaatcagccttttgccaacatgaacgacgacgagataaaagaatggcaagcccgggctgatcggccggatctggacgagtccaccccgcgcaggactcaagtgtcgtccgctcttcacctgattcgcgggaggagaattcaatcccgcatcttgagcatcatgatgcgggcggattacgatcagcgatttgctggatctcatcaatggcgtcttcatatgcttgaggtgctcaatgactggaaagcgcagctggaaccccatagcgaccctctctctaagggctacaccagcgaaggatgggtaggcatgctgtacaactatacagtgctactcctttaccggcctacgaaagcgaacatgagtggcttggtcatggagcattgcattagagcctgtaccgacattgcactgacattctggaagtatctcaagagccgtcaaacggctcaactatggccgggtgtgagtaaccatcccccgcatgatctctagaacagcaactgaaacccttcttagctgcttagtcagtttggtatagggattacgctgttatactgcctatgggtgatgccaccatcgcatcgatccgtcgaaattcagtcaccaaaaattggcacagccattcggacgtgctccgtgatcttggcagtcctgtccgagcggtggactgaagccgaaccattgcgggatatctttgatctcttggcggacagcatcccggtctattggtctcctgataatggcgaagcaagccgcatctcggcgtcctcggcagacacgattcaggggtacctgccccgggtgacggccatcgtcatcaacaaagacataatgcgcatgcttattgagatgactacggaggattatccgtgggccgcaggtcggccggtgaatgggggtaactggtcgtctagtgatgtgcacaatgcccatgaatgtcctctgtgctgggggacccgagcagaccgagcagacttgccttcggtcggctttgatgcaggaatcctgtggccaggcttcgatcatcgcacggacgatgactcctttgcggtgtttgctgaggaatcacccctctttccggggcttctgggctcgatagagttttgatccttcgacaacggagctgatgcaccggttatgcagtctgattactaactgatgtgcataacatggaataactatctggccccttgaattcccccgtctccagactgtttcgcattctcgcagatatccttctgagtcaatccgattgaactatttgccccgatgaagctgtctcacccggtagaggacgatttcgtcttcgtaaatatctcgcgccccgatgagatcaagtctgcttcaacgcagcgcaccatccgacgccatgtcatgcgcgacattgggagatcacgtcgtacacgcccggagcaacggacttggtctgtgggcctgagagccccgtcagatccagtgacagaacacattccagcgccgattgacccatgtaatacgacattttatcctacccctatgagcgaccgagcgctacagctcatgcacttcagtatgcccctgcaattaccggagcctccttgagtttgcctatctaacctgcgtagtgactacggaccgcgactacgtgttccgtccgttccggaccgtctggttctccatggcattaactgacgccactgccatcctggtggccttggctaatgctgccatgtttctcgatcaacgcctgcgggcccagggttatcagtatgagaccagtacggagtgtctgagttactacggacaatgcgttcggcaggtcacacaccggctggcagatacccgtgagagtattagccaaggggtcatcacggccatattgggcctgacctgtcacgatgtttgtcaatcttctcaccctaccgctgcatgaatgctaaacgacagatagctctatgttggtacgttagatcgctggaaaattcatatcagtggcctgggccgtatcctccacctgaggggtggataccggggcctagacgacagtatcacgcactttgccatttggtaatcccttacatccgctcgttccctcatacatccatgggctaactgtccggcgtcaggcttgatgttgtgggtagtgtgatggaagactcccgccctcggttgcctactccgccggggtatgcggctcaaattcccgatatgctgtctcccactctgagaagccttctaagggatattattgcaagatacgattgcttccgtgacgtcgcggctgccttcagtcatgtgagctttattgtccgatatactgacgggtccctttgtcgttccgagacagcctgggtaagcgaggataacctcactgtcattgaactgtttggcccagccacacatttcctgctttccatgtcgaggccaaccgagttggatttagttgcaacagaaaacccaattcggcaactccgcgaagcacttcggttggtgctattactgtttcttgccacaatgaagcaagatatcttcctctttaccgctcacgaacgccaatatctgcagtggaagttatcaacgcttattccacagatggagagaaccgactacgacgactcttgtctgaaactgcatctctgggtgcttgtaacagtgtctcgactttctcgttctacccagccagggttgtaccttgacgatatccggtccttgctggaccttctaggcatgggtagcaaggaaggaatagatctggtcgaacgcattctgtccattaacattttagatgtctatctaccttttctcccagcgctcaagacatcctcatgttcataactatggcatcttagccacccacaattccaccactgacggaaatgacctgtccggagatccagcgactcttctccgagcacaacaacagcactgcgtccgcaatatcctgcacggtgcccaatcgctcctcgactcggctcatgggaaccattgtcttgttaatcttttccgccacctgaggcggtagaccatctgtatctaccggaccgggggaaactgtgttgatggttatgccgccatgattgcgaccaagctagacaccaattagcataattctcgtgtgggttcccgccgtaaagtccagcgtacctccattgccatggaaaacgtcagcgcatccatcgccgcctttgaagcgctatagactggcgatcctgaaatgcccaacttggacgccaccgatccgatgttgatgattcgactgcgtggcggcatgtgcttcactgcttcctggatgaggtagattggaccaaagacattgacagcaaaggtggtcgcaagagcttcgggcgcagcgctgagtaccggtcccggagtgccagtagccgcgttgttgactggtccacgtcagcaagcgtccaagccagggaggcggaggtgttcgtggacaaacctaggatatcaagccttccaaaggctttgactgctgcttgcacaagcctctgtgcttcgtcaggtcgggagatgtccgcctgtacggctagggcctgtccgcccgccgcggtgatgctctgcgccacggtggcagcggaaggacctgtggacggtgagacatagttgaggataaccgctgcaccgtggtgggccagtagagtggcaattgcggcaccaatgcctctcgttttaccagatccggtaacgagggctactttgccttgaagactgagagaggaatcatattgggacattgtgaatgagtgatgatggtatggaagatgggagtcgaagatgctgtggaatcaagtcgccttttatgcatttccagcggagttttaggcgaatggaacagtgcaaaagtgagaggttttcttgcccttcagcattgtgatattcgccgccatgatcctggaggctatacacgatttcccgatttggcaaacggtccctggcccctgcagctgactctcgcactaagcaggaagcagttagtgcttatgagtggatcttaaacaattccgatggttggtcagaaccttttaatctcaaattactattcatattttggtttagctagcatcactcgattgggaagatattgaaagggtgaagagataactcggcagagggcatcttaaattcattataactagataatacacagatagctttaatacccagtgaccgaagatcacacccagttattcagttgctgtcacaattgtccgcgactgctgcgtctgatacccggtcgtgtcgaattccacgctaccactactggtctggctcaggctgctgcttttccgcagctcctcgggttcatttgtgacttgaaactggcggtgctcccaaatttccaacggctgctctcgagtgatatactcgccagattcggttggatcgatcgtagaccgaccgtgcgatttgtcgccagcgcggaaccgcgacagatggatggtcgagccgtccatgcggctggtatatttgccatggctgcgatcgtatgaggagtgggccaaaaatgcccgccagttgaacagtcggcgaaacaaggtccaggtttgagggatgttagcaacgatcactgccgtggcagcctcgcggacgtaccagtccacccattgcccgccatatggattggacagggagtagtatttggacagaatggagcacagaatcacaaaggcacccagcgagaaaaccgcgcacagggtgaccttcttggccagactcagtttcgccttcaccagcaggggtagcgggatggccatgatcatcaagtcggttgagatattgagagtgagtaccagaatcaagtgattgcgatagacggaacactgaaggtttttcggcggtacggaccagtatgcggcaaagggacgacaccaggcggcaaagaacaagatttccacaatgacgaagctaagggcacagaaggcaccgatgatcttgacgattcgatgctgcgagagtccggatctagaagacaatcagatgccatattcaaatcaaccgtgaggcgaacctacgtcatggtcgagtacaacaaaagcaggcaagccttacacccccagatggtggctagccacatctgctccgccacaatgaccagcttgctacctgtgatacgatctgggatggaggagggatcgatgctattgaattggtccgggggaatctcgttagtgccatgtttgtgcacttcaagtaggaacacggtcagcaagatgtagaagacctgtgtcgctgtcagtcattgcgccgttaatttgttgtcagtgtggaggtcatgcgtacgacagtaaagcacatcatcaagtcttcaagttgaagatggcggggcactcccatctgcaacgtccgggagatatagcgcagtagggctgtcacgataggcgatcagcactgattaacatcctgtcacgccgttgttccccgacgatcacttactgactagcagcactaccgcgaaccacacccaagtgttaacgctggaaaccattttgcaaaagaataaatgcttctttagaggagtacaaggtgtctcctgtcaaggtactggtgtagtacaaggtatcccaagtgcccaattcctatggtttgttatagctaagctgtcgacacttgatagagccaacaggaggacaaccaatgccaagccggcagggtctaaagccgttcaacgagagaggtgaacttccattacgtggagagggacaagagcaactactgggagctgtgtcttgttaatactgctgcacgagctcctatgccactcctgacacgcagacctccggtttcccgaagcgccctcgaagcctaggcagggcccacctggttctcaaagaggatatttcgcgcgtgcatacgattgctggaagggtttccctcaggtttccatgcaataaatgcatgcttccatgtctgaggctcccgtggctcaaggaccacggccaaggccgatcggggcgatcaattggacgagggaaaagagagattctggtcttctgagctgccttattattggtgtcgtcctcggggtgtgacctaccgaagggatacgtcgtttttcttcctagagttggatttgctgtaagagaatagtgccctctactgggtccctaactttggcagctgaatattgcgtgaagtgagggtgtagctgtgcgcataatcctcatagccaaggaaaaaggcgtattgacacgctcgtgttaataaatccactctgtctccgggacgggccaacgtgtggcaccgttccaaagacacgggattcagatcggagccggaaaccttgtggtgaaaattctgtcaccccgtccacagttcaggacacgcgcggtttcctatgactgctaaagggtgaaagaattgttactatgtccgttgtatgtggcccggaaagttgtcgtcgaaataaacagtatcgatttggaaaagtggtttaaatgcagcgacagtgcagagcgctgctgcttggttcctcgagctcgtgtagctaacccagattgtgtcacttcgggcctcgtccggtggctgactccagggcagcgactggaccagctgggcgaacgggccaactgatacgatccaaggtttcagccgaaaatcttatctctaaccagtcagcggtaggacgtcgcaggaatagaaactacctgttgtcgccgttccatgggtcactaccgccctcattccgacctcattcacgggaggcatcgcaatttcactagcttgcttacaggctggtggaaaacacatgtgaagaaaaactcccgtaccaagtgtgggcgaaattaccgccatcgacatctaagaacccagatgctttgaacgtggttggtccgttcggcgtaatggagagataagtagctcttttggggagctttgcggcatctggagtgcgctatggatatcacagttgtgccattgtagggactgtcaatcctgacatttctgggtctttgcaactaggctaagctcaagtacggtgccattttctattcacccttctttgtctgcggcaagataatggagaaaagtagacttcatagcgctacccgcatgtataaaaggggtcttcaagcatgatttattggtacctctatgtccgaattatccttgtttatgctcaatatagcaccagacaccaaaggcctcctctgcccatcagctactacactgtcctggcagccttgactactacctttgggggcaccatagagccagggagtatatcaactatcagtcatctatcacatagtggatttctcaacgtgtaaaggttcaaaaccggtccagagattacctgatggtaaagccgccgtctacgcgaatgtccgctccgttaatcataccacttgagtcctgtttcgccaatcagaataaaacgcaaacactcctcagtcgataggtcaattgcatacctgacagagaaagagaaccgcatccgctacctcgtctggctgcgcaaacttgcccgtcgggatcgttcttaagaaagcctcccgcacgtcatcctgcccccaagccttctgtcccagagcggtccaggccaccgtcggagacacgctgttcgccgtaatgccgcggcctccccattcagaagccatactgcgcgttagccccaacaaggctgccttggaggcacaataggctccgtggcgatggagggccacatgcgcggcttgagaggccaggttgacgatgcgacccggaggcggcgggttgggtgacgaatgagctacctcagcggcggccaagtacaagcgcgcaaaggcctgcgagcacagcatggggcccaggacattggtatgcagatgctttagcgtttcttccggcggggtgagctccaaatcacttagcgacacatagcccgccgtattaatcaaaatactggggaaggcacgggaagactgcatcgtcaatgatggggcgagaacctcctccttcagggtggtgaagacggactgaacagcctcggggtttgtgatgtcgcattcatacgttctgatttcctcacgcgcgggcagctcgccgtaaccagcctctagcagctcatcgcgtcgggcagcctcgaagggggcatacagaatagctagccgagcaccttgttggcggagcttcttaccgatactcgagcccaggccaccttactcagggacaggcagtcaatacccagcacgggactgtaacgggggttgagtcaatgcctacctaggccaccggggaggatggcgagccgacgcgcaaaggccatactggtgttaatccaatggtggagaaatcaagaagtatgtaggaagctaacaagaacgtggtatgaggacgcactgacaacaacagcaacagtcagatggttcctgatactcgtggattttccccgcaccggcaaaccaggaatgtgacgtcatattgcatatggtaaattgacacggaggcgaggaactgagtggaattcagtaattcagtaagcccattgaactgcatgactcctgagtctcacaccacacagttgatgtaaagctggggacatagaactttcccgtgtcaaaacccctctatggagacccagccgggaatgtgagatgccatgcccccgcggctttagaaccaccaagctgtgctcgtggacaacgtggaatagagatgtgcggaaactaggtttgcaggcatcaaacgaatggacaacgcttggatagtgaaatgaccaggcctgctggagaggacagggggaagttggggctcacaccaggcctgtgcctcctatctgccagcagggggagactactctaattacttgactggcacctacacggaccggaaatctaatcaatgatgcagttacacgcatcagtcagtaggtcaaaaggcatccgcgggattgataccctcccagatattccagaccagtatgcgggtggaagggaaggtgtgaggtgccttgatcccggtatcagggaactgagacgagcaataggtctatgtggatctatgtctatgcgcatcgcgtgaatggagttgcctacaccatcgtcccctgccatgagtgagaagccagaccgtttcgcgagagtcacgacctgctctccacgatcttgagcacatcctctaatgtctccgctgtataatccggttgcagccgttggcactcctccacatcaccctggccgtaccgacaccagcagacctgggcgccaatgttccttgcgtacagaatgtccgtcaaggtgtccccgaccatcagcacgcgctccgcatccaccccatcgggcgccccgagggccttccagttcggccagagcacgtccgtgaagctggacggatcaggcttgcgctgcacgccggccacaccatgacccagaatgagggagtctggaaagtactgcagcaggtcggtcttcttcaaggccgccttcactgcgaccgcagctttgttgctaatgatggccatgggttgattccggtcgtgcaaggcttgtaggacgtcgcgagcggcgggatagggacttgtacgggattggccatggatggcatacagctcgcggtaggtagggacccagagggattcgtcgaaggtggtgggatcggggtgtagactgcgaaaggtgtccccgggaggcgcaccggtggagacaagcgggcgaatatcgctggacgaaggcggaggatgggagggcaggaggcgctggaaggtcaactggatggagtactcgatggcatcgtaagtgtcgaacagggtgccgtcaaagtcaaatatgacgagctgatacggcatgatgatggtggatgttggtggtgttttattctaagttggttttgttctgcgtaaggtccattcaacttctttttcttctttttgactcattcccccaactgcaccagccacctccgccactcttgggggtggcgcagaaagtataagccacacatggtttgcaaacgtgcaacagggtagagatattttcatttatttatgtattgatcgttgcttttcctgtcatcaagctattctgggtaaaaaaaaatcaaaagctaggatattttcagtatctttgtccagttcagcgggcaaattgcgtggccctgttcgtcattcagttcaacagttatatatagtctcagctagtagctgcacagcctacatgtcgtatcgaaagccagacaaacacatccgtctctttcattcttagcagtaagcataaggaggattcgaagtttttctatcatacaactagcatcgatcaagcaaccgaggaaaggaatctcatatatatatatgccttacgatcgcgaggaataccgacttctaacccgagatgtacaactcctgttctatctgattgttttagccattactgaccgacagatcccaacaaatcagtcggagtctccattggtccactcaattcgctagttggctactgatttgttcaacatccttatgttcatcaaaacctcaattccagcagaagtggacttgccgtcctctatggttcgtttgtcgatcatacatagattttagcaatcatttaaagtgatatcctgaagtaggacatccaacctacccttgaagaacaaatctagaatggccctagactctcgttacaagcaaatatgagataagcaaagaggaaacaagtcgccgaaatgattgcaaattcggcgacggcgacccaccatgcagcctgtagccttccatccttcccggcactatatagggtcggtcttgatagatcgaagtcacagaaagtttaccaagacctcagacaagcaaatacagacttccattccttccggacctccaacacggttcctccgagcaaaaaccgcaaagaccatgcaacccatcactctctactcgcaccctatcgggcctaatccgtggaaggtcgccatcatcctctccgctctgcacatcccctacgaaatggtcatgattgacttcaccgaggtgaaaaaggagccctacgtgagcctctgtcccaatggacggctgccaaccatcgtggatcccaacaagaacatcaccttgtgggaatcaggcgccattgtgaactacctgattgagacctacgatcagagccaccagctgagctatgacacctttcccgagcgccaccagctgcaacaatggctgcatttccaagtgtccgggcaagggccgtactacggacagttaggctggttccggcggcagcccgagcaggtgccccaggccatcgaacgctacacagcggagatccggcgcgtcatgagtgtgctagaccaggtgttgacggaccgcgaatggcttgtgggcgacaagtgcacgtatgcagacctctcctttgtcccctggcaggatctggtgccgttggtggtcggggaccagcgcgtggtacaggaattgaccgagcaatttccccatgtggaggcgtggatgcagagaatgagggcgagaccagaggtacagaaagtgctgaaggagaagagcgaggcgatggcgttgaattaggggacagcatgtaaatacatgggtcggatagaggccatctcatggctctaagattttagactcgccgaaatagtggatccttccccggggggccgccggacaggcaggcgtcgatttgacccgtcacaccagggcatcaactcctggaaatagctcaaattacaatgaagttgttccaatgtgacgccgaattggcaataaagcatataatatagatagagagtgtcgatgaagcgtttctaaaccctgagtaccggaccactcgaatggtggaataatcccccggggaaggggtttcagacagcatcggcgaaccaaagatcatgtccaacgaagcatatcaactagacatgcattgagattattgatagttgatgggagccccaccgaaaacatccgatattaccggaccttgtctttctataaagcgaccgagtgccgttatgcttaagatgaacaagcagatcaaatgcgaccgccatagccatcatgcgatccagcagctcggacatcagtgagcccaagacggtcgctctaccctcatcatcactgcccctatgggatgatgatcccgctaatgctcagaactggagccgtttcaaaaagatttacaatactgctgtgccgtcgcttctgtgtttgttgatgtgagttcacgtacgcggagacgaagacgccgtccatagactactgatactaatcctaacattgcaatgttgatagatcgttcgcgctggctatctactctccgtcccacagccatgttcaagaggccttccacacctcgactaccaaatctctggtgcccttcgccatgtacgtctatggcctggcattcgggcccatgattgcagcgcccatcagtgagacctacggtcgtcgcttcatctacctcgtcatgacccccattgctatgctcttcatcctcggggctggcttcgctcacaacctagctactctcgctgtgtgtcgtctgctagcggggatgttcatctcagcgcccttggccgtcggggcgggcacgatcatggacgtgtggagtgggcaagctaccgggcgcggtgtcaccctactcatgaccactgccttcctgggcccggccatcggatcgctgattgggggttggatcgcccagtacaaggactggcgctggtctcagtggacaacgctatttctcggggcagccttttggatcttcagcatgggggcccaggagtcctatgctcaacccctgatccgtcgccgtgctgccaaactaggacttccagtccctcccagcccaattccaccgggtgtggctgggatccagatgatgctcacggtgactttggcacgaccggtgtacatgatcttcaccgagccaattgtcagtttgtgctcgatgtattcctcccttaacttctcagtcttattctgtttccttgcctgtgttccgctcgtttacaccgatgtgtacggcttcaccccgggccaatgcggactggtctttattgcgttggccctgggttgtctgcttggaagtgtcgggctgctggtggcggaccactatacaatggcgcggcatctccggcttcatccggggggagggatcgccccgcccccagagcgtgtcttgtgggctgccatgatcggcggcccgttgatgccagctgctctgttttggtttgcctggacctcgactagtcatgtgcacaggatgagcagcatcgtcgcgatcggtcttttcggctgctccaatattatggtattcgtaagttggcatatcctcgtctcactcaacattgaaacccggacgctgacgctattgcctgtcgcaaggtatcgactgccctctacctcacccgggtgtatggggccaagttcggagcttctgcgctggccgctaatggcttactgagatacggcattggcggctcatttcctctttttacggtagccagtaggtcactcgtacaaattcactccctggtcagtcactaaaagagcctcccacctctagtgtaccataacttgggctatagctgggcatctagcttgttggggttcttggccgctgcttttgcacctctgccttggttgttcttccgtctgggaagtcgcatacgctcgcatagcgcttacactgcaaactgaatccagtgaatgagtgggattgtatgaaaggttctgaatccttgtttgacaaggtctgccagggagtcccgttgttaagggaaataactttgtcaattaaattgagtgaattcatcgataatgaagatagactaataaacatcattctctgaatcccattagtagttgaaaactaatatgtgagtcgctcagccattactgtgccggtagttcgacgcaaaacagtttgcatcaataatctcctttctgatattgtggttacattaattattaacctccatccatccccaatatcatgatgaacccctcattcagacacagtcttcatccactgacgttttgccatccacggttttctctgcatcgaatgcaccgctctggcactgatagatcccgaactcacgcggcggcactcgggcgacgaacatctcgtcaatctcctccaacgaccgccgtttggtctccggtacaaacagccacacaaataccgccgcgacgacggacagtgcgccgtagatgaaggctaccttacccccaatagcggcctgagtgtagggattcacaaagacgatgatcaatccggtgccgtatgccgaaaaccccgccagcgtaaccatcttctcgcggacggcggtccctgtgggtgggatttcggcggtgattgcccaggccaacggaccccatgtgctctggaaggtaaagaaccaaagcatgagcatgaccaccaccgcgatggagagggaagatgaagatgtggagggggtagtgaggccgccaatggtcagcatacaagcaccgagtaggccggatgccgggaggagcacgctacgacgacccaggcggtcagccatgaacattcccgtgagattgccgactatcccgatgatatagacaatcaccgacattaacaggacctggtggaacccgacctgttccagaaaaacggcctgatagttggccacgaaggagattccctgagcctgctggaagatctgcgcgcccacagcgatgagggtccgacggaagtggatggggtctgtgaagcaggccatccaggatgcgagctccttctcttgttgttgttgctgttgctgcagtgcgagttgttgttcgatggaaatgatttcggcctcagcggcagcggcatccagggcatgcagccggcgcaggctggtgatggcggcagcacgacgaccacggcgtagtagccaatacggggattcaggaaggaagggcaggctcagccaccccatggcggggatagctacttgtgccaccacgacactgcgccaggcccagtcgctcggcacatggcgacagaggtagacgataagagcggcacaaaagccgcctaccatcaggaaggcattatagagacttgtcatcattcctcggaggtgctgaggtgcgcactctccttggtagaccggaatgaccgtcgaggcgatgccaccggcgaagtagacgactgccttgcccaccagaaattgcgcgtagctgtcctggcaggatgcttcaatggcgaccccagcagtcaccaccaccgactgcagccagagactgttccgtcgtccaagctgttcgttcagtggtgtgccgcataccaacccgaggatgacccctacatagcctagacccgtgccgagggactgctgtcgatcgctgagggaccaggcctggtgggctgggtcgtaggagccgaagctacgggtaaactgcgtcgaactcatcatacttgcccaccagccctgatcaaagccaaagcccgcggatgagacggagccgaagatagccacgacccagatgagccaggggacctcccgtggagggttggaagatgacatgcttggaaggatgaaagattaaagacagagcttagacaagttccctcgccagcagttttcgattgaggccagagaatttgcggactctacttctattctacaagagagggaaatgctaccagctttaaatcacgccaaatacgagcagaatcgagcttgaccgacaagcaaactcccagtgctagctttagcgtttcaaaagtcttccttcaccccaatagggacttaatgggagggattatcgggcgcgtggtagtgaccagagtcggagcatcttgatgctaggttagagctcgtaggaagcgaaacaatttccccgcggggaaggattccttgagaggtgggccatggtcgtggtaggcccgtgagaagaccaagattccttcgtgagggcgggtccaacgcaatcctcagtgtcacatccatgccagtcaaaccctaacctttgagccgcgggggatcaaggcctcataccatgtccaagtcgggattttgtccacgagaggtaatcctgtatggcgggcccagtggacccggcggatccgaagtctccactaattcggcgactgattctccactatatcgccgggactaacagggcatcaccagtgaagcatcttcatacagtaacaagatcggtttgtcacaccggaggacccgaagaggaatccggacagaaagttcatattcttccccgtgggggcggggatgcagagtcgtagagatggagaaatggagtgcatggtgacctgaaaagaacaattaccctctcctttccccgaactctgccaccagcatccccaagatcaacaatttctggttcttccaaaccgaattgcttgtcaaaatgcctcatgaggaaagagtctcctcccatgtgcgccaactgctccagtcccttacgctggaggagaaagtggccctcctggcgggcaagaacatgtgggaaaccgttaacatcgaccgcctacacatccccagcctgaagatgacggacggaccagccggtgtccggggctccaagtggacctacggctccctgaccacctggataccgtgtggaatttcactggctgctacctttgatccggcgatggtagagcaagtcggaagtgtgttgggccaggaggcgcgccgaaagggctgccaggtactgttggcacccaccatgaacctatcgcgctcgcccctaggtgggcggaatttcgagagttatggcgaagatccctatctggtgggagtgatcgctacggcaatgatccgaggtattcaggcacacggagtgggcgcatgcatgaagcactttatcctcaacgatactgaaacgcggcgattcaacgttgatcaaaccattgatgaacgcactttacgagaggtctacatgaagccgttcacgatggttctcaacgacccggctagcacgccttggacggccatggttagctatcccaagattaacggcctgcacgccgacatcagcccacacattctaccccgtctactgcggcaagagctgcaatttgaccgcctggtcatgagcgactggggagggctgaatagtacagctgaaagcctgcgcgccacaactgacctcgagatgccgggtccagccgtccgccgcggagaacgcttgctggctgccatccgagctggggaggtcgaggtggccgcgcatgtcgacccgagtgtccgccgattcttgcaactcctggagcgcacaggcctgttaggagacgctactaagtccgccgaacactccgaagcagctacggatgaccccatctttcaccgaatcgcgcgcgatgcggcccaaagtgggctcgtcctgctcaagaatgacaaggggatcctgcctctcaagccgaccacgctgcagcgagtcgccattattgggcccaacgcttgtcaacccaccgcgggcggtgccggcagcgccgctgtcaaccctttctacgtctcgactccggaatcctgtctgcgcgacgtccttcatgcggccaactcagagctgcaggtctcctacgagccggggatcccgagcagcctgcgtccgcctttactgggaaagcttctgactgtcccagacgggtcccggaagggctggcaggtcagcttctttgaggggcatgcgctggagggacccgtggtagcgtccagtatgtgggacgactcgctcatctatctatttagtgatggtgatgtcccggccgttttggacgaccggccatactcctaccgtgccaccggggtggtcactccgcaagagtcgggtcgctatacctggagcctggcgaacaccgggaaagccaagctattcgttaatgacgagttgttaatcgacaacacggagtggactggtctgacgggcggatttctgggctgctccagcgcagataagacagccagcgtgtatctggaagcgggccgcgcctaccagctgcgggtggacaacgtggtcacgctgccagtggtagaggcgttcgacaatacgctgttcccgcggatctctggggtccgggttggcctggccttggagcaggatgagccggaaatgctggcgcaggccgtggcggccgcccggcaggccgatgtagcggtggtggtggtgggccacaacaaggattcggagggcgaaggaggcgaccgcgcaacgatgcagcttcccggtcgcacagacgagctggtcgccgctgtctgtgccgctaatcccaacaccgtcgtggtcgtgcagtcggccagcgccgtggccatgccttgggtcgatgctgcctcggggctggtgatggcctggtatcaggggcaggaaaacgggcatgccctggcggccgccctgctcggcgactgcgacttcagcggtcgactccccattacctttcccagacgactcaaggaccatggctcccacgcctggttcccgggagaggctgctcaagaccgcaacacctttggagaaggggtgcgcgtcgggtatcgccatttcgatgcccaggggatccctgccctctggccctttggctttggtctttcgtatacgcggtttcagctgaccaacattcgtgtctgcggtcgcgtggagggacgttccccggagtctcagcctgtgttgatccaggcgcgcgtttgcaatgtcggaggccgcgacggccaagaggtggtccaggtatatgtagcgccgtcagccgggatccgggaggctggggagatgagcttccccaagactctggggggcttctgtaagatttctgtaccggcgggagattcgcgcgaagtgtcaatccccatccggggatccgagttgagctggtacgatgctcgggtggcgcagtggcgattggatgcgggcaagtatgcctgctgggttggtcgaagtagcagccacattgatgcggaattggagattgaggtggcagagggagaagacaccaggcagggaacactagagtagttttccgaagctagtgaatgacaagtattttacataaatgtgagtaatggccattgtagacaatatgaatgtctagtaggtttgtagtcatcggaggaatgaatatccggcagtctctgaccaactacgaagcggttgctaacactaacgttaactaaactaactaacttatttaattagtggttactaattggctgcataggactttcccccgtcagcgtcagcaattgcttcttgccccccctcatcagtatttctatccaacatataacctctaccaccaaaaccatagcgtcgcacccattgtattttgtcatcatccatggatcttaccgcccccgtggcctgtttaggctgccgagaaaaacatctcaaatgcgacggcaatctggctggctgtgctcgctgccagtccttggggctcacctgccgcttcgtgccctcccgtcgtggtcgtaagtgtcgcccagcagcagcagcagcagcagttccccacgataccgccagcctgtccactcttaactccaattcactaccgctggatcccatctctttctcgacaggtcccttcgggcagtgccacagcctggaatacccccagcatgcgggctccatggattgcgatcaagggctgcagctgatctctctgtattatctccactttcaccaagcccatccgttcttggcccccatgcaacttcttctcgagtcggagccgcccgcgttcctgctagacattatggagtttatcagccttcattacttgtccccgcagctgtttcaggatagcagcgagtctcttggtctggccgtgcaggctgcggaactgaccatcgaaaaggtgcaggccttcctgctcctcaccattgtacatcacgggcgacagcaggcccatgaggcccgctcatgtctgggacaggccctgcagggtgcactggacctgggcttgcaccgtcgggagacctcggacgccatccgtgtggatgctccgttccaggctgagagtctacggcgcacctggtgggagattgtcgtgatcgatgtgctgctggcggctgtccaggtcgatggggttttgcagttccacatggaagaaacacccaccacgcctcttcccggtgactccagtcagtatcaggcgagcgacgtcatctccgaccccaatccttttccgtccactttggcggatttggaacaaaacggtctgttctgcggtgatgtggaattctccccgggcgcttaccgcgttgaggctgctttgctgcttcgcaattgcctccgagccggtcagacgcacgtcagtgaggaggcactaaacatattgaacgcggccaacatcgcctggttccatcgactgccaccacgccgacggtgcatgcttcaactcaacggcgtgcaggatgagctgatgacacaggcgatgatgttgatgcactgcgcaaccatctatttgcacttcccacgctcctgtctgctcgcattcctgcccgtcacaggccagatcatgtgctcatccccggccttgtttgtcaccacgaccctggacccgcaagtgcacacccacagggttattgaggggtctgtcagactatctcagctagctgccttgtccacctctgtcatcaatcatactcctttctttgcctgcaccctggtcctcagttccgtcatccaagttgccgctatgttcagcgagagcctgcattcttctgggacgagccagcgacaatacctggctctcaacctcggtgttctcaagtccatcggacaaacctggcccattgctgctgctgccacgcaacgagtgcgtcaagccatgattgaggtccacaacgcgatcccacgagatgttaatgcgttacttggggaagttagccctcctgcctgacgcacaggcatacattcggtgaataggtgttgttgccaagcttgtaaaaagctgtttgcttccatattgaaggcggacgaccctgttgtcgctgtgcgtgcgtcttactgcacatgatctggtgctcttgggcactgttcatgttctatgcctacaccaacatgactagagcccgagcggatgagcatggagtcatttgtgctccgtcatcgccccacaaaccgcattgtcaagatctaatcgactatcagctctacgtgcactcatggggcgcaacctccttcgaaatcactcgaccccgctcccaggggtaaagcctccccaacgggaacagaacctacatgtgagctcaatttgtgaccaagaaccaccggggcgtccgcggagtcttcacggtgagaaacacaggagtggacgggtattggcgaggaaggtcaaggcggagcgcccggtggatgggcgtggaatgaaacagatggcagtaaatatgtaggtctgggcttaccttgtcaatcgaaaaggcctgtccaaggatcctagcgctgcctgctgagccagccaggtttattgctggttctcccgtcgcacggacacgcagacattccgacggctttctgaacggcagtctgtctttgacgaataataaaatgcgaatgaaaataattctgcctagaaggtgagatgatgtgatattagacagtctcattaattgaagagcgccacacatccagtagcccattcatcgtcgcgtattcgctagagacattcgagatcgacagactttccgttgcccataaatgatttcattggtgtcggtaggagagggcaacgaacattatgaaaactatcagagcattgtgtacgaggttctagcatcccagactggtctttaatctgaccaagcgtttacgcggcggctaagtgtagggataaaagccgggcgtacggatggaacgccatacagccaaacacacgtcgcgataccaaccgagtgatccagatcccgttaaccaagacaaggtaccttaccgtagaacccatgcacacatatgctccgtggactaagatgaggatcatcttcgactgcatgcgggatccttcttcggctccactgcagatccgcatcagaccctgagttggaagcttagcactcggtgcccgcggggtccgtcgcggcaaatgcctcatcaaagttgttgggcaatcgtacttctgatgattccgtgcatagctctgcgtttccaaactgcatcagaatatatactcataaagagtattttcattctatgcagacagtacgcaatccaggataattttccccgacgaaaccacatccaatccgaacgatcctcggacccggtaactggtacaatcaatcccttttgctgaaaggcgtctgttgtaggaggtagtatgggtgtgttttgagtactagccagactcagaggggtaagagctaaggctactgacattgccaagctccatcagccttgctggtctcattggctatcctttgaagtgacctcgatttctccatgtccgtgtgtttcgggatgtggaggaatatgcaggcagctgaccgtggaaaggcctttgagaaatatacatcggttaaaactaaaagaatcaacgttcatccatttttcggcaaaatgatagcccgagcctttatggtttcatacaccccgtagcgacgatgggaagcaaaggtgtctcatgtagagaacctcggtggtcttccacaaacatacacggagaagcttccgtgttgtcaccattacggtaatgaacatcagctatagaacatcgcgatggaggacttatagaagacaccatgtcccgtttacaacaagcatcatcttcattatcaattacctctcgaattaatcgtttgtctaaggtatcctcattcagaacgcggaaacaatggtcaagctacttcccaccttcctgctccaagctggcttcgctctcgcagcagtggaatatctcaactggactacttacatcgccaacggtgtgaacctgggcgggtggcttgagcaagaaagcaccatcgatactacttgatgggctcaatattccaagggtgcggacgatgaatggggcctttgtgtgaatcaaggctcccagtgtggtcctattcttgagcgaagatatgcgacctatatcaccacctcagatatcgatacgttggcgaacgccggagtgaacactttgcgtatccccaccacatatgctgcttgggtcaaagtgcccgggtcccagctgtactctgggaaccaggtatcctttctgaacaacattgcaacatatgctatcactaggtattccatgcatatcatcatcgatgtacactccttaccaggtggagtgaacggtaaggcgttcggggaggcaacaggacattacggatggttcaacaaccaaacggcgttggattactcgcttcaggctatcgattccgtcattgcctatattcagaactccagcaatcctggatcctatactattgagcctatcaacgagcccgtcgacaataaagatatgtcagcattcgggagtccagaagcattatccgatgaaggcgcagcttgggttttgaagtacattcaggcagtactggacaaggttgaggtgatcagcccggatataccggtcatgttccaaggcagtttccgaggcgaggagtactggtcacccaacttctctacatccgctaacctggtattcgatgtgcacaactattattttgccggacgaggagcaaccggtaagaatattacgacctacatctgtgccgatgcaaagaatggagccggtgatggcaaatttcccgtatttgtcggcgaatggtcgatccaggcacagtacaataactcctttgctgacagagatgaagctctcaacaccgggctctatgcttctgcgaaagattcccaggggagtgcctattggaatgccaagttttcggggaatgcaaccgtcgacggccaaggtacacaggctgactactggaattacatgacctggattgacaatgacatgatccatccggacgaagcttctggggtgtgtgcataggtgagcgcttagatgagccgtttggactacgtgagggtagggcagtgttctagccgcgtccagcagacaacattcttcatcgagattgccacaccaaccaaaagactactcttttggccatcgatcttttcttgttttggtttcgtgaatcttactgctgtgctctaagtaataccgggtaggtcaagttgaaatactagtgctactttagagaaacatcatttaatcaatgcctacttaatgtgctgtagacttgtttcttcccagctttcttcttcaaacttaatcagacccaaggtacctacggcggttaatgcttatcacatgacaagggcgttgctctctccactggatgccaaacggcgactctcgctacgcactgacaaatcccaacctggccccatccagctatggctcgagtcctaccgacgagtctgatgatcatggattgggaccatcttgcggaggaatataatgacaagttgtttgccgggtggttacaattaatttccgtgcagtcccctgccttgccgtcaagactcgcagcccagcatcgtcgtggaattgcatgggtagctgatgtcttggggtttaccactggcgcttacaacatctgctgcattttcacctttgaaaatggatttcgtgcactggttcggttcccattcttgggtagaagccggtttcggacggaaaagagtcgaaatgaggccttggccatgaaactcctatctcaaaataccgcgctccctgtcccccgcattcctgggatgggtcgttggggatgcgggccttgtcatgaccttcatcgagggaacgctgttgtccaagcacctcggagattccacaattcagtcgtccagcttgcatccaaatgtttccgactccgacattcaaagtgcctaccgcgtgatggcgcaagtcatcttggaattgtctaaacccaccttttcagcgatcggagctctggcagaggggtcacgggcgtggaaagtagatcaaagtccactaatcctcaatatgaacgaactggttcgcgtcggaaaccttcctcctgggcatctttgccgagaggacattcactaccgcgggcggatatttcgaggaactcgctagacagcagcttcttcaccttcagtaccaacggaacgatgctgttgaagatgagcaagattgtcggaaaagatacatagcccgctgccttttcaggaaaatcgcccgggggtataaaagggagcagtcgggcccattccagctatactgtgacgatttgcgtccatctaatatacttgttgcgggacagaaccttacactgaccggtgttattgattgggaattcacttatgttgcgccggccgaattcgcccttactgcaccctggtggcttctcttcgagtgccccgaggcctgggagacagacttgaatgtatttttttggctcggtatacaccacgcttgcatctattcctcaatgcactccgattatgcgaggacgagcaaatacacaagggtgcaataaaggagtatcagcgactatcgggccgcatgtcagagtctatggagaatgggctgttttggttctgccttgctgcaaggaaaagcttcatgttcgatgatatctattggcaattgcttgacaaaaggtattttggacagggctttcttgaagatagactttcacttttgtcagaagaggagttggacgagctcgagatgtttgtttcatcgaagatggaacaaacccgtgagaaccgcttggacgaacatatatcaattgacaagcttattgacctttaatcctaatcctactataagcctttctgggcatggtatttatgccgttatctgattgctataagctaccagtactttaaattgtcaggaccacggaattttgggggcaaatctacgttaacccgcaccaatatgcgaagcccccattccttcaccgccatacaagctgccatgcggacctgtaatataagttgcaacggaaggaagatcctggtgatagctactatcattcgagtgacgggataattagtatagtttcttgatacaagctagctttaatccaaacccatcttcaaaggcacatgctttattgagaatacgaattacgcagctggattctattagccttgagtaaccgctgctttcacccgacgtttacaacggagcctgtaaacgacccgcctgacaaaatgctgtggatcaatcatctactatcacacaggcaagtcattggtgtcgtcgatgatgcgaaatgggagatgctgatgggagaccgcccgcaccatgtagatgcaagagggttgagatgggagtagcaccggggtagaaacttgtcggcatgggaggaatagtaaaagggctcgttgatggcagattaaaggtgaagtcagctgccatggttggcgcagcataggacctatcttcttgttagcaatttccgtggaaaagaatggacaagtcacatacggggtggcagttatagtttgtttgctggtaaaggtttccaaatcttttgttccctctgcactagagagacaggccccatctccataggcgttctcgcactgccaaaccacatagttgctgtcgttggcccacaggttcacgttttcgatggtaatatcgtagcacgggacgtcggagtcacattgtaggcggatgactgggcgtgaggcgctcacggattctccgtgccagttctatataacaaagcaaattaggatctcttaagacattgaaatattatcgtgtacttactcggaatgtgaggttggacacttgaactcctacggatcctcgatcatctccccaggcctcgtctatggccagcgggtacggaccgccgtggactatgacattctcccagatgatatttttgacaatcccatccccattgttggatttcagaaagcacgcatctgcttggttcatgtagagattgcggtagtggatgtcggaaatgttggtgcccgtgcctaaggatccaatcgcggtcccaccactgagattgcagtagatgttctcaatcagataattgtgcgccggagacttgacggtgacacattcatcgccgttgctcacttcaatgtcatggaaccacatgttctctccccatacgtcgatagcatctgtcgctcccacagatgtcacgccgcggatcaagatgttatatacctccccactggtgaccgtatcgaaaacaatgtagtaggaaggcgagtcaattagtgcgaatccatgcaccgagaaattgttaacctcttggatgcgcaagagtctctcgccgtaggtgtcattctgcagatattcgtaaccaaagccctgaatggccccgcgggaattgccgctgaaaaattcgaagtcattgcagtcacggataaggatcatctggtacgagccgcggtgtccgcgcataaccacaccgtctagctgaattgcagaggactggccgtgcttgagctcaatgtcctcggccagcgagtagttaccgggtgggatgtagaccagtccccccacggaacagtttccccaggcatcaagtagagcctgcgatatatccgttttaccatctgcgacagccccgtaatcgatgatattgcaggtctggtttctggctttggtgctgtagtccactagcgggccaacggggccggagagttgcgccccggccagagtggccaagaacagagtcaacggtagaatgctggcgcgcatggtgttgtctgaacgtcaaagaactattaggggcaggtaccgatatctttatatcccaatggaattccagcatgggctaatggtaacatcgtggcgagcaatcagtgcataggcccacatacaatcaaggggtccgaagcgcttggcggtgacgatcgcaccctgactggaaaggcctgcgcgtcagattgattaagggacggcgccaggcgcgggcgttgacgaaccaagtggagaatgacggggaagaggaggtaagcgagcagaacagcatatgagtttgccgaagtagtgaaacccgttgttatagccatccctgaccctatgtgcaaggccccaactacctaatggcgtatccttgaagagctatccttccgctttcggggtgatttacgtttaaggcactcgccttccttttcctaaggatgtgccggagtccatgaaacaatttctgatcaggccactcatccccttatttataaaccgtatcgaccatggtgatgtgatcagaacatcggtatagccacgggacgatagtatatggcagttggattttgatatgatgactgtaagataccatggtgcagcaggggggattgtatgagaaaagctttacaaggtcaccgttctgcatttccacaagtcaaacccactagtgagctttgcagaacgaatatggcaccaaatactagtgctgttaccatcaaggcgttctctattggtgtaaagcatatatctattccttgttctagtgaacatagaggggtggggaagcatggcgaagatgggacccatgggtgaaccccgaggtctgataacagtctccatatgtcaaggactgtcatgctttcactgttataaggcctgtatcaatacttcaaacaaggttatagttcacattattacaatctcaagtgatcttgagtatctcagtcagcatttttcatcgtcatatttgtcgaccaaacacttgacaagttggatgaaccggtagtacagtagtacgactggcacgtgtacccctgttggggtttcatagaagctatcagtttctggttattgcagcattaatatagaatgcgtggagaccccgctgcactattgatggtgcttacaaccatagaaaccttctgaaaataggggacgtcagaatggttgtcctaaaattcgagattttctctgtgactatgttagcgatcagagtgacagtagaatggggttcacctcatattttgccacttgcaattgatggtcggacgccattggtgcttgttcattttgtcccagataatacaaagacttgtactatcattaacatacaccattatatacaagattaatactgctggcacaggatatcaagctggtgctctgattctaagaccactagataaccatgataatgcttcatccataccgacgctatacaataagcacgaacaccacaatttaagtattttcaagagggaagtccaaattgaaatgtcaaaactgatctttcagtaaaggattataaatgcaaatcacgtgattatgtcatgcaaccatcgggcgtgccggcaattggatcggtaataaatcatttccatctttagttcacgtcacgagtcaggggatttccagattcttaaccgaagcctcattctctggccaattttgatcttcttcaacatgactgcatgaaaatatgtcgaaccaagcaggctgggtcaaaaccccatatgggcgagttcaggtcgagcctgtagagcaatgggttcctggccgtggggaactcttggttcgggttgaagcagctagctttaaccccattgacgccaaaatccagaggtaccgtgcccgaatatctgccagctggccgtcaaactaaaatctcaggttggatctattccaatctcaataccccctcatcctcggattcacctttgcgggaacggtagtctctacagggcccgagattaattccgtgcaacctggcgaccgggtggtggtggctcgctggggccagcaagcaggcgaggatccccgatttggggccctccagaggtatgcactggcactcgagcaaaacaccctgcgactagagcccgagaccacatttgccgatgccgccggtctgatcgccaatctggcgaccgtggtctccgccctcaccatctacatgggcctctctaagccgccagtcaccggcacgacaccacccataggaaagaaaatcctcgtatacggcggttcatcagcggttgggggcctcgcggtgcaatatgcgatcaatgctgggtatgacgttgtcactacctcgtccgcggccaacagatccatggtggagaaacgcaacccgacgcatatcatcgaccatagccgctccgacgaagacgtaatccgcgaaattcgggagaatgggccttacgagggaatcttcgaggcgatcggctccaccacaacaacccaacgcatggtggcattgctacgcgaaacagggggcaggttcttttctaccagcccttcccctggggatgagaccatccctgctggtatagtaaaggtatgggccggatattctgagaccctcgtatctgaggctgcccatcaacaactgcgcacatggtacatggaagcgtatttaccggctgcactgaagaaaggtacgatgtggccgagtccggcattgtggctggaaggcgggcttggctccgcccagaaggcattggacctcctgtatgaaggtcacatcagcggccgaaaggttttcatcaacccacaggaataagaaagctgtggttcgggaagcccggtatcaatctcttgtcaggctcaacatacaataggaatttagatgccaatgaccgtattgggctcaccaacttgctacatattgaagcagtaatactagtaggcttgatcatgtggctagatcatgctttgcctgccacgtgtgagacctcggccttcatgccttatcaaatgatccccacttggtacttagttacatgatctaatctactttaataaccgaagatgattttaaaagtctagagatctgcttgaaaaatagaacctgcagtgctgaaaaatcaattaaaaacattatagaattgacattccctcaagcgcactaaagtataagtctatcatacaactgggcttctcatttatgtacctggcccaagacatttgcgtgtagtaattttcaccaaacgctcataccgaacagccatggctatcttcgccagtattcaaacagtacatattatactacatggcaactacgaatctaggagaaggatttgttcaaaaatcgctaatttagagcaaacgcacctcgacgccgccagaacctcaggcgtttcatcataagaagagaaactcaaagaaccatctttccccattacccggaggtcacatcctcactgcaatgatcatagcccggagtagactgttctttcctagtttaacctcaaccacatccaagtgcgacagcagctcatcattcaagttggtaagtatgtctgcgacatattgcaagctcccggcagacttcatcttcgacaatatgaaagacttgtgctgatccgtaaggggaagaccattgcggcgtgtgaacataagttggtatatagccgtagtagctggagaatgcgtcaaagtatgtatcaaaggaagtgagaactttccctcggataagtcttcacaaaacccctttgttgcaatatactgtggataatcttagtgattatgtatccgacaccttgagcgtaggtcgtaccttatcgtccgataagtttcggtagtcattatacacctgaaaatatcgtcccaacaatgtgactagatggtgcagctctggtatcgcctttgtgccagcttcagcttccaggagccgcagggcgcatctgaaaaagcttccagttttacagtcaaccatattgatgtattccatgttgcttggacatctagcatgatatctccaatgaacctctagagcctggcctcggatactgtcggacaacgattctagtaggaaagaattagctcaagtctcactttcgctgacaaagtccccaccaagtagaatttgtgaatgctttccgtctgtactggcagcgagacttaacgcctttacaataccgtacaatgcactgtttgtagtctggctttctccatataatatgtgtgtagcaggttgcccccgtcgtagatccgacccgtcttgaatatcatccagccttcagatgatcagctttgcgttcggccaagaaaagaaagaaggaaaaagacaggaggggtgaccttacattacactagaagcacacaggtgagcaaaaatggtgtccatatacttgattgactgggcaggcagccgaagccagacattcatcgcccgcaagaactcagaccagtatttcttccctggaacactctcggcgtactcaagcggttgcaatgcaatactctcacctggaggacctgcgtatggctcgataaaacggctcatgtcatgtaaaatcctggaattgctgtcggagccaccggttgagtcaagtaaaatacttggtttattgtcccgcaagggagaatcaatttctgactgaacagaccttccctttcgattttgtggtggggggtatgcagggagtgtccagggagggtgcgaacacctacccaccagatgggaccgttcctctttggtcgcaacgtaatgagacttgatataacggggactgaatgaagcccagtagttttgacctccacaagcgaggatatagagagtcactaactttcgcaaatcctctgatctctgctcagcagatagccaaatactaaccatttccataagctgaacttcctgagcgagaatctcccgttttaggatttgaaatgcttcgtcttcggaatatgcgtagtcacacatcagaacgctaattgcattatatggcttgggcgattgtccagttccaattgcgtcgtcatactccttatgaaaactgtagtagtcattcgtcagtgccgaaacagaactaccctttttgattatttgcatgatggatttttcttcctccttagaaatctcgatttcgtgggcagcacggagccaggggaccatgacgctgatacgattagccccaattcatgaaatgcgaaggtaacaagcgaacctcaacccaaaaccaatgctccgttgttctatgtaagcgtcaagtgtgaggttatcaataggcaaacttcgagccttagtaaattcgtgaatgcgactggaaacgtcctcgaggtatgacttgtcaagggaagcaaaatgttgtaatccagcctccatatcttccaatccaggaacgacaacaggctttcctagtttgaagagggagataagggcgagctgtatatccgctgtatgctgatcggactatgtgctctcagtctttgttattcgacgttgatgtccctatcacctacaagtccggaaaccattcccgttcggtctaattattagcataatcgttggttgtcagaaggttttcaagtttggacacaccattccacaagatactcgcatcacatattttcaatacagcatcagccaagctcggcgggcactcaggcatcaaccaatgcatgtaatgacccctccctgaaatatcatgtccttccagatcgccatcgtagcttgcagaaagttccacaaagtcatctcttaaccttgaggtgcggaagggaagctggctaaagaatctgtcgggtggcgagtgttttggatcgcaagggtaagaatactgaaaagggtaattttccaagtcgagcaacttggaaaactccattttggactatggttggaaataccagagcacgagatctatctggagagagaagaccaactgaacaaagggcacaaacggtctttatgtagacgatactttcataagtcctgtgcagtagtgtcgctgacgcatcgccagcatgcctactgttggcagtaagatcatgtagtcttcactgcggtgaactgattcgtccaatatccagcaccactatgaaatcacactgataccatgatataccgtattgttctacgggataacttatcggagtttctcgtatgttcacgaacaataagataatcgaggacaaagttggatgatctgagattgctcctccaccactctgggtggccgaaagctccttggactgactgagagctatccacagcttccgtgccaacagttatatcccattgaaattgcaaatctcctactatatgtgcaaattgtattcatatatttacgattgaccggtctgcggaaaaagcaaaacagaagtcttaggtcactcttttatccatgctccatataactatggagattgcgaagcaaatcagcccaagcactagagatatagcaatacagtgtctaccgaatgggcccgttcaataatatatgaaataaattgatgaaagtgggaataattctcattgttacgtcaggtaatgcatacgtctattgtatcctatatgcaaccgtgctgcatacatcctgcatatcctaacaggtaatagcctatcacatttggaacacttcaccgctgctagcgtgaaccgtgatcctgagtgtgggatatttgtctaattagcaaaccaaatgtcaatcatggtcaccagcaccaagtgcacgaagaagaaacatcacgaaagttcttatttggaatcaagtcttgccatcttgtattctactgtaaatacagataactgactgaaggcgtatctatcttatgtctcaatgccatctagtagcctgcttccccccctttgttctctgaattatcatcaattcgttcatcatacctcgcaatacgtcccatcaactagttcaaaagccgcacgatctctttctgtccccgccacaccgcaaaccgcaacgctgtccaattcttatttccggataccatggcgacatctgcgccggcgtccaacaagagtcgcacaatgtccgcatggccgccttctgctgctgctgccagcgccgtgtagccattgtaccggcccccgggagcgttcacatccgccccggccgtcaagagtcgaaggacggtggtgcggtgaccgttgaaggccgcgccctgaagcgctgtaacgccatggtatctgcagggtggtgcattcacgtccgcaccgacatgaagtaaaaattctaccatgtcatcatagccaccaaacgctgcggcctgcagcacggtccgaccccggttgttcgcggggggcgcgttgatttccgtaaccggctggtgttgtaacagccactgtaagatctcgagatggcctccctccgcagcggcctgcagggcggtgcgccccacgtatttgtgggctggctgcttgacgtccgcacctgcggcgatgactagatggcgaacgatctggaagtggccggcacctgcggcgagggtgagggcggttcggccgccgttgttgcccccgggagcattcacatcggccccagcggctaagagcgtctcgaccacatcaagatgaccgttgagcgaggccgcctggagtgcagtctggccgtagtaacctctgggaggctcgttggggttgcttgatggctgagacaaaagagccttcacttcgggtaggttgccttgtgcggcggccagctggaggggagtccagattccctcctcgtctggttcctccaaggaagaaggcagtcttccgtgcactagacttggaacctgcgaaagagccattaaggggcacgacacgtctccgatttcagaggttgcccagagagcagattattgcgaggtccggcttaacgccaactagtgcttacgcggttatcacggcatgataaacaagcaggccaagacgaggcttgattgcatccccgccttaagggttcttgctgataagccccaatatgcatgaccgcgtattacggatgtaacgagcggagccccgtattaaacataattgttcacagggcatcgccaggaatcgtctacctttccctcagtcataatattccgcagtccgtgacaattctaaccttgattctcaccaaattctgatcatggaagccatgttgcccacccccaacaactgggacgagaatagtgacaaggacatcgaatctgtctctccattcactggcttgctaaatgaaaccaagaccaaaatcgcatcatcaccagtaacaaagacatcaaccttttttcggaaatatgcagatgcccgtttactattcgaaggcttccttgtgttttgcctcgtcgtggctctgatatcgaatgccggaagttcccacaaaacggatatagtcgacaagagaagctttggaccaacacgtaggcatcacctagtccccctatatgatttcatgattttcaaaagctttctgtgtgctgatgcctaaattcgccctttatttcatcagtaccgcgaaagcccgtcatatttggcaataccgccggtcttggccccgatctcgtctatcatgacactgaaatgatgtggaacaagactaggatgcaagagatccataggaactggcattccctgtttccgcgtgagtaatcccaactacttattgtacacatgtagaaaaatcttggtcttacatgtgttcttttattctcaaagctggtcgcggctacattactgtatccgccgaggaagaagagtttgaagtcctgcaccctgcattcaaaatggacaacgtcttcgaacaaggcgatcactatgagggccacataatggcggtttatcaccagctacactgtcttgtaagcttccttagccgtcatttgaacctccaatatttgcaactgactctgcttatagtctatcctgatgaccgccttgggcacttctcgagaagagtgggcgatgctggagacacagaaggtagagcatcgggctcactgtgttgaatatcttcggcagagcattctgtgttccgcggacaccaccttggagggcgagacgggggcttgggccaagagtacaggatggggacagacgcattcttgtgtcgactttgatgctctgacggagtatgctaataaacgggccatgtggaacctgacagagcgactgttgccggacagcttcgatcctctcaaggttcctgaacatggagagggccttgaagatgaacactagacactgcattatatctcaatctattaaacatatctcggatcttactaccatccacatcactgtctttagttattaagttggcttaatcacgtagtacacaagactttttcaattagtccctacttggtcagactcagaacacgcacatctacgtaagagtaaacccaacagtaactaacgtagcactctcagtctcacttgattcctatactactactagtatcaattcaatccagacaaataactacttggtgctatggaaaccattctgcctgcgtaacaagactcaaattcaattgctggtagattctcctgttcggctgtagtaagacaccgcgctgccagctgctcttcttgtgggagtcagcaatgagcaaagacggaaactagaacttcactgaccgtcactgattgaatcacttgcgatcataggtagggactgcctcttcagcaacagggccagaggccatagacctcttgtcgtaggtaggcacggcttcttcagcgacagggccggaggccatggatctcttgtcatatgtgggaaccgcttcttcagcgacagggcccgaagccatagatctcttgtcataggtaggcacggcttcttcggcgactgggcctgaggccatagaacgaggtatcgccaaggcggctacctgagaaacgccaattgagagagcgatcagagttgcgagaagcttcattgtggagagaatcgtagaagaaaacgagtgctcagatcagggtagaggattcgaatttttctcttagtcaaaaatccaaatggttctcggcacatggaaacacattcagatagcatcttatattcagcgaaatctatcctactgctacttttcaatatacttcgtctgcaaccccgcttattatgacactagcggtattatatgactactgccatggcagtggggagtctatgtcttattttcttgttgatatactccgataactcctgcattatccacctatagcatccacgatttgatatgcaaaacgatctaaccattcatgcaagggaatcctggaatagacgagctagccagtaacatcagaacttgcattatcaggaccaacgcatggaagttgaactgagtaagatatcttcccgtgtcatgctaaaggcccacaaatcctggaagtacatgtgaggttcaagatatcggaactataatccttcccagcctcgacctaaaatctcactcaaggaacgaacccaatcactctccaaattgaaccccgcacgataagctgcctttcagagaacccttctgaccattatcctcctatcttcctccccctcttctcaaacccccctcacatgggcgtcgccctacaatacggaattcccgacgtcgcaatcgtagttgaattcagcccccgtggccactgcataatcaagcgtgtacagtgaagcgtatgctcatagctgtacacatcgtcgtccagaaagcggtgctccagcacggcagaatgtaaccggcgccacaggtacaagcagtgcatgatgtggtagtcgttatccgggtagacagcctcgaactcgcctgccagcacccgctctctagccacctcttgggtatgctcgcgatcagcataccacctgaagtctacctcggtcagcatctcgtccagcaccccctggttaaagcagtcaggcgagtaccaccgcgacgccatcacgtcgaagtggcacccgaggcgcttggcttccgtccagtgcgtaccgcacttggcctcgccggtttgggcgtcaaagacgaagcccccggccacgggtaccgcgggtggggacgatgtgaaggcatggctgagggcgctggtgaggacttggggcacggtgagggggtggatagcggtggttagcgcaattccgacgaggaggccgaggaggagggaggctagaatggtgctaactagggctcgtatgctgataccacgacggtgtgctgcggggctcaagggggagtagtctggtggagccatggagggtgtagtcgctaaagtacacagtgacgacaagagtattttcacagcgacgaggtgtgtggtagtatgatcatcagctgggccttttttgacattatgtagtggacgctacctcccatgatgatgtgtgactctggacaggtaatcttactgtccataacctgcctgtctccactcattcctattgcatactatacaggccgaccacttcgctggaagtcattcattcacccgatctcttccatttccacacctgtagcctctttcccaatatcaacgatcggttgcgcgtccgtgtcgcttcaattctacgtctcagtgttcatttggaattcatcccttttgccattcatctcatccgtcccaacaatatgtatagagaggaagagtctgcttgtcacctactcgaagaaggtcatgacccaactccacgctacaagcagatcttgtcctcagcacacacacgaaccagtctgctagcaaccttcgtccacttgatgaaagcctgcctcctctactcgctagcactctggggcgcattcaacctcctcattctcctatcctctcataccgaccacgcaaatagtgcccacaaccgtgagggcactggatgcgactgcggcggatccgtcgccgaggccatctcgcgtgactgcaagttcgacggcctagccatggcttggctcccacctcactgtcgtgacgacgagttggccgcggaattcaacaccgtgggcgacgggcctaacggtacttggatctactacgcggatagcgagcgcaccattcccatggatgccagtgaggtggcggcgttggcggaccagccgacggcgttggtgcacatgagtgtccaatggcacaccctgcactgcattttctattggcgcaagcagttccgcacgcggttcaatgggaaaattgtggagcctcgatcggactcggagcatcatatcaagcattgtggagagattttcttatcgccagggtcagggaccaaatcgggggtagcgctggtgaccaacagcgagtaggagtggcagcttacacactttggtatcggggtggaaaggcgggggttttgttacggcgcatacgtcctccgtacaccgacggacgcccgacattcttatgtgagaccaaggacggggctgcgcacggtctctaggatgtatatctagtgtctgacatgaattgattaatctgacagtccgggagtgggggtccgtctagaatgggcatctgatcagatttcctctgccttgttgtttgttatactgcggtaatattgcgttaaggcggcgaccacttggcttgattgactgtacttgtccgagtagtatcattcaatgcttattgcccatggcgaggtggtcctatcagcctgtgaaaggcgacggtgacaatgaggagttgactctgtgtattctatgtggaccacccacagtaatcagcaataccactccatcatcgacgacaacgctgtcgagtctattgaaggcttgggcaaaagacctagtcttacagagctcttccaactgtggtgtcttagcttctgtcaatggctacggccaattcagactgtggctctctgctatcaatcagggctctttcttaacgttcgaggaaactgttgatcgggccacgaacttcttcctgcaagcggactccgtatcagcctgcttcagcttcaccgccgcttcgtcattcgattttggctgtttgctctccataataagagcccctgcagcttgtgataccttcgtgcccatcatcaatcactcattggtcctaaagaaggccaggaaggacctgtgtcggggtgccccttggcttgtcttgatcagcctgtcaatccttctatttgtgatatgtgtcgtcgtgtccgcccgcctccgacttacattccgcggctcaagtgccagcagctccccggacacattctggctgcagtggaacaccagccacagtctcggcctcgagcatcaacttcagttcacgcgtccctggtccagctttttggattatttcggggaggagcgacgggagcagccgtggttcgtccggttggacgatcaatccatggtaccgttcgacctcattgatgagagtgaacagaagtaccaacggtggtttcaggaacggtatccggagatggagcaaatccggcagagcggcgactatctgaacacctctttctgggagaatccgtacggggtgcagattgccacggacgcccttttccacccagcgcactgcctcctggcgctgcggcggtattggcgcgcgagggagacgggtcggcatgtctgcccgcgtgatatcgactttcatcacgtgaagcattgtttggattctctggatgcggtgctgtttgttgatgatgttgccaagaagagtcccctactaccacaggattcggataatcgaatgccgtggttggtaaatgcctgtttctagagctgagctgctaatcagagtcaaaatggatggtggactgatatctgtaggggttggttatgtaaatacaaaagactgactcactgggagtggcacgtcgcatataagatgtacaactctgataatctacccttattcgtggagccccttcaagaattaggccctcctttccttgagttaagaaaatgtcagagacaaatggctatattagaaaatagtagatagatcgaagtttagatcagtaacatatccttccaagggatatatgatggagaatttaagaagatatgaatcgactgaaaaaagcatactaatgatatagtgatgaaggttagttcagctgtccagctaaatggagatcacggccggagaagggaaggtgtttctctagagattatatataaaagcagtgcactgaaaatacacctatttcttcccttcttttcttcaatcgagcgacctacttgcacgggattccataagtatagattaatccttactacagtagagtctcataaatacacctgaagaagtatataaataataataagagtatattaggacatcaactagctaagctgaaaacagcaggacgaactaaagatgaaaactcacacatgccgtacgccagtctatacacaacgccgaagaagacagccgtccaaatactgaccgcgatggcaggtgtacagtacaccattataaaacatcaagaaaatatcgcgagggctttcgaactgcaatggatgaacaaaagtgcggaaaccggttcaaaacagagtaattgagtaacgttccagttctaagacagggggtattcacaagaaagaaattcagcttaccgcaaagccctctatcataaaagtctccagctagacatctagcaaagctgtctctgcccccaacagttgaatctgatattcctcctgctgattctcacgctcggttatatgtaacttgctctccatgacagcgatctggcctagagcaccgtctactctgttatgcagccagcgctccctaacagtatttaacagtctgtgcagcacatccccaccagattcttttgtatgtatacaacgtcaagcacttgacataggacatgatgaactcgcagcttcccacagagctacggagaggctgctttcatcttgtccagctcttcccaatcttggggatgcttttataacgagaaaaaaaagttcttaatgggtgcgtaatcaatgggctataaattatggaacggtgtcgagttcgtctgccccagaaaaaaaccccacggcgctgggggagatcatagcagagagtaggttgaccaactgctgtttcggaagagcaaattggggagaaacttggcagaggagtctgtggggaggctcaatggggtaattgcaaccgctggctgggggttaggaataccttcttggggcaataagctccacacaccgccggaagaaacaggcaaaacgggcagactcggcagaaacagcaagacagacgaaggaaattgcggagccgaagtgaccggctgccggccggctcggctgctgtatcgctcaatgcagaaaaggcagtggatgccctcctctgtcatactccatacaacaacacaacaacagaaaataacatcatgctttctcacctgccaagaagatcctcattcccgcgtccccgcaactcagccccatatagggtcccactcggctcctatatattaccggggcgggttccttgcttcctatcgagggtcaggccctttttcacatcgtcaccatgaaacaactctctgtcctgctgttttcatgcatcagcgccctcgtggcagacgccagtgcggctgtcaaccgctcctcgcttttgagctatgcgtcaaagccccgggttttcgttctctcagacatttccaatgagcccgatgacacccagtctttcgtgcgattcctgctctacagcaatccgttccaaatcgagggcatgaccgccgtcacttccacctggctgaaggacaaggtgtaccccgagcagatctcagccgtggttgatgcgtacgctcaagtggtcgacaacctgaatcaacacacttccccttcatccccgtatccctctgcggagtacctccacagcattgtcaaatgcggtcctgaagtaagcacccccgtggccgtctttacacggttcctgctaattagaacacagatgtacggcatggaaggcgttggccctggtaagaatcttagttccggcgcagagctactgctcagccaactccgccaacccgttgacgaacccctgtgggtcctcggatggggcggcgtgaacgtcctagcagagaccttgtactacgtgcacgacaacttcaatgccactgaggcggcacgtctgcgtgcccagctacgcgtgtacaccatctccgatcaggatgacagcggcctctggatccgcgagcagttcccggatatcttctatatcgcatcaatgcacggatggaaccagtacaggctggccacgtgggcggctatttccggcgaggagtactacaacttcgatgtgggcgggccggacttcaccaaagtctccgccgcgtggctaaaggagcacatccagatcggcgtctatggcaaggagtatccggactacaaatacattatggagggagacactccgactttcttgtatcttatccagaacgggctgggcgtgcgcgagcagcccgactacggctcgtggggtggccgctactcgctggtggatctgtcccagcaggtcaggtaccggcagtacagtgacgcggcagaccgggtgatcggccagaacaaccgcacctacgcctcaaaccacgcagccatctggcgttggagagatgcgtatcagaatgactttgctgctcggatgcaatgggctctcccggccaacgagactaaggctgccaaccaccaccccgtggtcatagtgaacggacacatagagctgagcccgctgttcatcgcgtcgacgcctaatgctaccgtgtggcttgacgcctccgagacgtacgaccccgatcaagacagccttttattccggtggttccagtacaaggagcctggatcgaccgactggaacgttggaaaccagatcccgagcttggatgtgactgtgtctggcgacggtcgacgcgcgcaggtcacaattccctccgaagacaaggtctgcgatggcaagagcttcaacgactcgggctgttggaccttgcaccttatcctggaagtgacggacaacggcgtatatccattgacgacgtacaagcgcgtcctgttcgagataacgaactcgacacaggcagctactgattgactcataccagatggaatgctgtgaactgagtgggccagaagtatgggaatgggtgggttatgagatctacctggatatctatgatgtcggacatgaccgggatgagccgacccttggacgtgattgccccatgcagtgcaccatgacgagcaccatgaatatgatgcctaacggatattcaaacgttgaatgactgtatattaagtccgatgtatgtgtatgatactagtcagttttgagaatttggattgtttctttttagcctcccatttttgttcactgaagttttccatttgtagatttatcgtcagtaatacacttaaatagtgtgcgcttatgaactttcgttcattctacttttgccaatttattagcgtggtggcatagtcaaactaaagttacccaaaatggagatcgaacaagtcttccagtaactagtatttatgtgatgcatgatgtggccctgacttccaccaagtatggcattgacagaatggaatcttgatggccagtcggtagatgactctaacacattgcgtgggtgggaaagaaattgatgttgcaaccgtgacggcacctgcaggcgccctgtgatcggcctgcattgctgagtggatggacaggatctgcaacaattttctcgccccccaattactgcctctgcttcctgaccaatccatatcacacaaaagcagccatactgtgcattccaccacatccaataatacaatagcatccgtgcagcaccgctatgatccgaagaaatgcagttgcagggtactcgcacatcctttccttcggctgatcatggcttaggctttctccaaggatagcctttgtcctatattcctacgtaacggtttaccacgacagtcatacttctccctcaagttttgcaaagctgaaaaagtgtgttagatcagattgcgatactactagtaggttccttgtcatgcacgccagaaggaaggggagggggccagttctacttcgcatttacccgtgtttttctgtgttagatcgagtatcagcagctggttttcgatttaaacgtaaggagctggggacaaagtattatatccatcgacatcaactaagcgagtggcaggcacagaggtttggtggtagatacagacggttgagtgaaattgttcagtactgccactgatgaactgtacagttatatggttctccagaacatatctatatggtattaaaccagaatgccgttttgtcacatccttggatatcctgccattgtattcttgtcgattttagtgatagccctgaatcggcatctctttcgctataatggttggtccggcttttacaaaggaatagacatcggttgggagcaagaaagcacttcatatcaattagtgcatggttccaaaagcctcatgcgtatcttgactgccacgattttggaattacctaggtgtgctctctccttgaaatcaccccatatactgcgcagctagtgtcttctcatttccgcgttcccagcaccagatttgccgtccactggacgtgtagccgcccactcggacattcttcctcaaatacccggtcccagtcagcgagcaggactttcgcagtctcgccctctagcttttgctgtggtggcaacgcggtattcagaaacataatgagccactccttgtctacctcgaactcccacccctcagcttcatcgtcgatgccagtattatatctggctttcttgtctctgtcacccacccgattgtattcctcgggccgaaagccagcgggatagtgtttcgcaaaatactcttggtaggccaacctgccatccttggcggagttgatgtacacccggacaggatcctcgaacaagtcttctggcacaggaagtgagtctaacactccttcaccagctccttggcgccgtgccaggttgtacatcagttctccctgagtcgtcagaggggcatcctcctgtagctgctgcatgagaaccttttcaaagacggccgagaagaccttgtgaaagttttcagactgcttggggaacgtaggtagccaatagctaaagattgccattgtgccacccggtcggagcatctttccaatagaggtaaccaggccgtccgggtccatgaaatgtgcagcagttgcacatatcaccatgtccacctggctttcaccagtatggaggtacgcttcttcacccacggcttgggagtactcaaaagtgggttgtaggccatgtttcgcagcccacttcggaagaaataccctcgcctgggactcgttcgatggactgggatctgagatatggatgatttgaaagtcggccataaagttggtggtggctatccccgagccagcgccgatatcaaccaggcgctcccagctagtgtgaggatggaggcgtcggtaggtatagataagtgaagtcaaagaaggagggtatgggggacgaccctgatggtagtattcccagtccatggtcgcaaaagcggtgttggtgtgagggtcgatggatgtcatagtgtcagtctatgttctctttatcttactaagtgatcaaaagagtcgagttgagtcttcgagcgatatgttaagatagccttgtacaccatgcagctgtgtggtctataagtagattcacgcacaacccgttctttgcccgatgatggggaatttcagtgcggggtcctggccggggccggagtaggttttcggcagaagtattgaattgtcataagcaaaaacttgattctctctatatagctaactcctttaaattaggggctcacagatggagggaatagtcttgaagatctcctatattgctttttctccagcgctctatacggtaggtgatcgcttaagcacatgtgtagatacgtatgttagtgcactatttggctttagcagtaatgcaaaatattgatagaaaatgaatattcgaaaccgtaactgctgatagatcccagacaatccctaacccactgggggtggtgcaccccatatgcggcgggattggatatggctgatatttatgagctgaaatcctgggcattaggtgcaacagaattgactatctttagtataaagggttggtctttggtggtctcaaccaccagaatgacttattgagatatttcttgaactcgtgggataattaataatagttccaagtgtgacggccagtaacactactaataagtcggggcgtgaccaggcttggtactacacaggttggacctcaattagcaaccggcagccctaacccgaatagagctgtctgaaggcgtcactccaaggccaaagctaatgcagtctactttactggtgatttcctgctcggtgactgtggaccatccggcaataggtacttgttcttctcttagctttggcctcggcatgcgtgggcttttattggtgttttgatgacacaaccatgcaatggggcgacctccatgtctctgacgggtgccagattttgcctagaggtgagtattattctatattgcccctttccaagagcatgcacctcagacgagccctccaagtcgggcaagagaaagggtaaccaaccacccaataaagaagtacagttatgaataaaaggctatcatcaagtcaaagcagcttctcttctatcgtccgtgagagacgaattatgtactggagtggtttgaagctacggaccacagagtttactatggagcagcgatgttcgtttatgaactacggggacggatagtcactacctcgttaccgtcgtaacaacggccatggcctttattgttgaaataattcgacccaggaaggggcgtttcctgcgacttgttcttaggcatcgtcaaaccacacatgaatataactactgggaggaaacaacttctagataacgggtcatcttcatgtggagaaggcaaacaacattacttacaggatataccctacccaactttggcttcctgattgtaaactagctcgtagtccaaaaaggtagaggcactggcatctaaggatggctatgacctacgtctatgtttagacaacaaaggatagtcgatagggaggatctcagtccaaccccacacattaattcggcggtttgggcatatcaatatataagacgtatacagtcatgtggtgtggccttaccatccacatttgcgtgtaatttacttcaggagtcacctcatttccacagaatctaaccgcatgcatttcatttacaatatctttttttttttttttttttttttttttttttttttttttttttgttttgttttgtttttcatgtcgataaatgtagatcaaatgtagatcaagagtatctaaggatttatgttagaagtcatgtcatcctttattggaggcacccggggggttgttcgttcgtgcagtcatgttgtcacatgatcaccgctccttcctagctagtatggtttaaccatcatgtatctaccatcatgtatctataggaggcacggcctcttcgcttcctacacaatcaacataataagatccaacacgctcatgtagtttgctacacatgttcaggtgtagttggttattgccttgaagaactttcaaactgcttgccataatcttttgataaatataggatataattttatactttacaggtaatgaccatatgggtcaatttatcaagataatcaatgtcaactattcatgtcctcaacggccacgtgaatatgggcttgatgatttgacctctaagaaaggacaacaggacatcacatgactcgtgtcatccttaggtgagcattgaggacaggctgtgcgagcttggccagcgaaactaagtattatccccgcaactttttttggtagcgagacgcgttagtgtgatggagcaggctaacccacgataattagttcatgttccctattttactagacaagttgtaatctctttccctcggtcatggatcgagataacttatcactattggttggttgctgataatgatcacgacggttggaatgtgcgacaaggctgtgcccagggaatatttcgtactagtaggacgatagctgactcgtagtatttcccaattgagtaaggtggctgaacggttagtggctcttaaggctgcgccgggccgtcacggctttcccccttatcgtccaagcgcccaatcccgactggctagatcgacagtcctgataactgtctcatattcagacttgcaagcagcacgtacaaaggaagggtctgcctggaatgcttgaagggtcaccggcgcacatctgggagatagaggaacgctttgccatggtccattttgtctaattacttttggcaccgggattgacagcaagacatgtattgtgggttaccaggtgacaaaggacagcggtaaaatatgtggtttcagagaatttttaccaggcgttcatcaaaaaggcgtttcacaagaacgtatttgttttcatagcccaagtatgtgaggccagaagaaaagagataacctggagttttaatcatcaattcgacgcaaggagaagctttatatggacactcttgtctcccgcagataaaagcacgcaatcgtttcagctccaggtagtctaccatgcaccaagcacgtcaaggtcggccatggtattttgactataatggaatgcatgaaggtcacatattgaggttcccagtaaggcccaaatcccctgttattccgatacccaattatcaattggtagcaatgggttcaggttggaggaagtatccttgttacgagtgcaatttcagtgcataccagaaggagggtcgaaacgaccaaaaaagtgcgactctctttgtaattttactagtgcttcatgcttctggctgggaatggttggcgccgaggctagcagagacggctctttctctacgcagcactaccccaccacatgagacgctcataagcgccgtacaaagccgcgcttgctcagcctccttttcagccttttaacgacggcgagtccccaggtactgaaattcccgacaactacttactgcatagtgaacatcaggtgtgcaataacagcgccatggctgacaacgcggatcacctcaggactactcccaccaggagcgcggagacccccccatcttccatagacagagatcggcctcttccttctgtcgagtttaccttctcctgcagcccatcgtcccccgaatgcctgaccccgaattcgtcggtcgacggcttcagctcagccatcccagaaggtcgccaatcctctacaacgccaaccgcgcagttgctctttgaaaacctccgactgagcgatagcatctctcctgcagcacaacagccaccaattaatccatctaatataactcataacgagtctggcttaacacccacccgcagcgctcatcgaacgacctaccgagatctacacaatgccacacctagccctatagggccctcttccatacgaccgagccaacaacggtcaccaactcctatctcaccccctggggatgtcagctctcatttccagaatctgaatctggaagacgcagatagttatgtttctgactctgacaggagctctacgctcaacactgagagtgatgtagcggaagacaacgacgaggatgcttacaacattcgtcatgatgctcttccccgggagcctatctatgatatccgacttcagaatgcactgcgagatgttagaagcgagcttacgagcctcacacaagtgatggtttgtaatgcccttgcccacgacaatactactgatttgtcgaagctatacgagaaaacgcttgaagcgagtcgattcgcttatccagcgacacgcacggtaggcttcatcggcgactcgggtgtaggtaagtatgggaaagatggctgatccagagtgttgattcgcctacgttgagaggctgatttgtatgaacagggaagagtagtttgataaactcacttctagatcaagagagcttggcgcggtcggtgagttgtcgaaacaagacatcgtaataggccaatgataactaattccccatggtctacccttcgattagagcggagacggcgctgcctgtaccactgtcgttaccgaattccggagtgtaaacgacacttatccagagaactacaccgttgttgcggatttcatggacgaagacgagatctgtgagctcctcgaggagcttttatccagcgttcggaaatactacacggaagcctttcgtgaagtgagaacgtcggaagaacaggagaatatcaaggttgcggctaaaagagcctgggacaccttgagatccctttttcctcatgagcaagagttggacattgactttcttgcccaggaaggagatgaggccgtggccacaattatgaccgccttactgcagtgggccacgtcgggcttagataaccgaccgggggggcgtgataacctacagtatacggttgtgtctagccatgctgatcaatgcatgaagcatcttgacagactgatggctaatgacagtgacggtgataatcctgcgttgtggccttttgtgaagttgatcaggtacataacagaagtgaagtgtaacaaattggtgcgttatgtggcttatatatatcagggtctatttgcgctcgcctgtcctacgcacaggtttagttttggccgacctcccaggtaccgtaccgaagtttcacaacggtggcgtcaggatcaagctaagaacatgatgttcaggattccgcgatttaaactacgctcgggtgcgagcgacggaaaggtatctacgccacagctgcgacgaggtgtttattgtgaccactatcatgcgttgtacaaccgatcagtcaataggtgatatcattcgtcgatgtgcgcgggatcagcctattcgcattgtgtgtactcgctcagaggtaagtacttctttattcattgtctaggtgatatcaaagtgaccagtgaaatgcaggacgtcaactccgaagagactgcacgttccgcacccgcagcagatgcagtacgtatccagaatatgaataaccaaatccggcaactcgagcgcaggatcggacagacaggtactcgcagacgaaaatcgcacggaagtaggatgcgaagtctcgctgcagaggaaagtgacttaaggtaagtggctccgatgcacagtacctcatacctttctttttctcattcattacagggatcagaaagacgcccttgagcttcagtaagaaaacttgactttgattgccccaactagaagattcgtctgacccgaatcttgccaggctgacgcatttcctcatcacgcgaagaaatacatctgtgactaactctttgttgagtgcctggggggaaatggctcgcgtattctgtgtgagcaataagctctattctgaccatcgagaggacgatcgacgacagaccaatgggtacttggcactcagtggtatccaagaacttcggcggtactgccaatcagtacccgcagatgcgcagttccaagccacggtgtcttatcttcaaaaggaagtaccagcgctcctgggttctatcacgcaatgggctttatcagggactagcaccgtgactatggcccgggctgaagtcttgcggcgggttttggctgaagctgaaagcactctgacaggggtacggtaattgtcctgatgtccaaactcacttgttctgtttcggtgcagactctacactacttacatctactgttggccgcttagtcagaaatgagaggtttgctaattcgcgtagagcaccactcgtgatggctcgcaggtacacttgttacaaagtagcctcaggaggcaattctccgatgccattacacatcaaattcgtacgcatcgacttacaagccagttttagtgaatgaaggagtaacacctggtacaggcagatgtcgacgcgaatggagggaccatgcagtcgatgcgagcttggaatgggcaactgtaagtggaactcacagtaccgcaaggttattcatacctaatttggctacctgcagtggcaccacatgacatatgcagcattctgtcgcaactatggaacgcatgaaacggcaaaacagccgtatcgctgctggaacaaagagattctcggtccgggaataaaccagctctctctggcgtgggataccttattgaactggcttgaagaacatggtaaggagcttgaggacgaactcactaggatttttcaaggggtgcatgattctatacgcggtaagccattctccaaacctcctaaagagtaaatgcatggtttcattgactttagacttgccagagcaacacgatctggccccggaaaccctagggaacttgcttctgaacctccggatgcgacagatatgtgtagttgacgccgttcataactccatagaacgacttattgatgacactgagtattgctcacgattttgtatgctactgtaagatgaactaaattgctttgcagaaaaatctcggatgacacagtgggtgggcacgcgagctcatatattgggggagtcatgcgtccagtctacaacctttgcatgcaacaaagtggtatgatatctcccatcttctatccaactacagttttcgcactaatgccaaatggctcttgtaggaacggggagtgattcgcgtcggaagcaaactatgaaccgtcatctcagttcttcgggtctgttccaagagtttgctgacaatattgctctcgactatggaacaatgatcgacagagcatttggacagttggataacaagcttcgtgaggaggtttctaatattacccgagatttacgggctacggtcacggttgagggagaaatctccgaagctggagagcatcctgaatatacagaaggagtcaagcgaggggtagaagcatgccaaagaaccttggcaaatgctcagacaatagtgctagagatgggcgagtaacagcaaggattactttgtattcagtgattggagactatgtgaatagattgttgtgatctactgcaatggttcgacgtgaccggagggctcatcccgtgaataactaaggaatgcaagaggcttttatcttttcactataaaacgacccaaaatttttcatcttcacttgcatattcccatgcagtctgtagtggtcattagatgcgttactgaggcatgtcataccttgtcgtcacttcctgttgtgtgtcatatgtgtaataatctgagagcataggcggcggagaacatggacggtattattaattgaagctttttccaagtggaactacattgacaagtatatccatttctgaaagccgagtcatcaacaattgtttcaccaaccctccgggaaaagaaagacgcctaggaatgctgttggcgcttagcacgtcagccactataaatatataaataacattatctggtcgaaactgaaacgtgtatattccgaaatccttaataactgtagacctattaccaaatcatgaaaaatttataaaatacatacagctgctgaataataaatcgaaatatgataacaattagaaatgttagtttatttatacgtagatgttttgttgctgtatatttaacctgtgtttgattaggtgtttgcaacatataagctctgcggggttctgttctaaagagcattgtaaaacagttttcgaactgttaaccactctgaatctagttacaagtatttagttatagactatagctatactctttcacttcagtatcgcatagtgtgtatacagtatatttcacatgataagctaaggatctaagatagatgaaagattttatgatttgatagaataagcagaggggtaaacaaaaatagaaacaagaaaattagcaggtgttactcagccgcaccggggaaaaaaaaagaaaatctattgaaaacatgaataatttcttacatacataactggcaggattctctagctgatagtgttataccaaatcctgctgtacaacctttctttctataagcttcggctgtgatcggaagtgtacacctcgggcgaccgcttccgcccgcaagcgacgccctttcgcagtacataacagagcttatgctccctacacatataatagtcgaactggcagatattcgtatctaaaatagtttctttactggaaaaaaaggatttttttaagcgcacaaattctctacaaagtcgatttccaggctcccacactcatggctgagccatgctatgctggttgataccgagcttttcgggcgagacctgccatgtctaaggaggtgtgttcgaaaagtcagtaatatgcactgtcacgttacagtatctcagcagtaatgcatagtaaccagtacaggcaaactattcacgtgatacatgtattccgtcacgtgctgctttagacagtgtttgcgagtcatttaatggaccacaacatacttgtgcatggtcatgtgatgcataacgtatcctatttttcagcaaaattactagtgctgctaatcactcttgacgcaaacctcggttgatcgcttgaattatgcggagactaaactcaatggagacaagtttctctgatcctgagttccactgctgagaaagttagccaagcttcggagttatgtggtttggtccaaccctagcggggaacgggtgtttatggttgatagctagacttgtataccccgcataacttgacgaataatttaataattctactacagactgaaaccgagtaagccgcgagacggggtaatattaaatcacactcttctgttgatcaacgtttgactaattccagaagtatgtagctggaccggcatgtcctgcacaactactccagcaagtgcagcgttcggttacatggaaggattctttttaaggtctatttacctgctgtatcccgatagtgaaaacaagcttaaaagatttatctgtgcgataagaggagtaggcattatcattggaagaataggggaagagatcttcatagacatctcctacctagaatatcaggcacattgccgattgcgacccccacataccagccccaccacctcgcccgagccggattctaatcataagggattcgtcatcgatgatgagaaaggaggacaagtatcagcttagtatatctacctctgctgtcctaaggtataaatgtccactgtcctcaacatcctgaacaacactctttcacccgccactcgttttcatcgtgcttcttcactcgttttaatcttcaagctggagccaacatgagactcgccagcgcctcagttctagcaatgctgcccgccactggcctggctgcctgcggcactgcatactccggtaaccagatcaatggtacgctgctccgcactgttgtgcttgacatgggcagcgacgccgccaatgtcaccgccactcagtacgaccagtactttaagcaggggagcgctcttgagggtgtcaagtctgtcattgccgccagtgaattctacatcaacctgtgggccatcccgggtaccgagtccgcttttcaaagcgtcagccagtgcctgagcgacggctatctggtcaatcaagtggcctggctgtattacaacactaccaccgcgagctggtggggtggctacgaggctgagactgaggcagacagttacaacgctgccgccctgtcggttgtcacaaacctcgtagccggccttgaggtgcgcttctgggacaccaacggcgatggctacaccgacgtcatcgatgccgactacctcgagggcgttggtgtcgacaccgtcactcagaatgccaacggtacctactcggtctatcgcggaaatatcgacatcgccgacaagacgagctcggaaggcactatttttgacgccgaccttttcagtggctccggcccagctattgctgcggaaaactttgacaccagtattgcatctggcgatgtcgcgctattttggtacggccccaagggctgggccatgaagcgcgctcaggaggttgccggcctgtttgtcggcggcgccgatcacacctcctacaacatcgacggggtcgtctatgaagacgccatgcgcttttcacgggacaacctattcatctccaaccggcccggcgagttcaccgacgcccaaaagttcttcaagttcaccaacgactccgcagctggcctcaatgtcagcctctggcttgtgcccgttaccaacaccagcgagtacggcgctcccgtgggcatgacgagcgacggcaactcgcgcagcttcctcgccagggctatcgctcaggcccaagcgcagctagccaacgtgactatcagtagcaacggctcgaacgtcccgtccacccgggagtgggttactcaggccaattatacccaactcgacgacgccatcgctagggccaacctgtcgctcgcccttgctaacagttcgtccttcctactcgactaccagacctacttgctgtacctcactctcaatggcagtagcaccgacattggcgccgccttcgccggcttcagctacactggcttcgagaatgaagagcagctcgggacagcctaaacccatctttcttatgcccccaaacctccatatctttccatccatgaattgcccataatttcgttatagatagacaagtcgaataccgtagtcaaatttatctaaactatcgcaattagacccctgtggagcaatgtaacacggcaagggtattagagtagaatgtatggcatagaaagctaatgagatgcaggccaaagtaataaactaagctcaaagaggtaaccaagtccgtacttatgcgtacgtagggcttcgttcacagtattcatgtaatatattcgcttttcctggacgtctacaaatcggagccatactatgatttctactgccccaacatggccgtcgatgccacttttgtctatctaggtacataaggttgactactcaatcgagttgttctgttcaattgccagttctgggagttcagcgatgcgagtgtattgggtgggggtggggggcgagaccgggacccagaagggcggtataatatgtggttaagacttttctatttgttcaagctgtacgttgtgcttgtcgttaagaatcttcaattgttgattggatggacttgtggatgccattgttatccaggggtgagagtcaactgccgtctagccgtggtccgaacggctccggtgatgatctgcgccgcgccactcctgacctcggagattgcagtaagcatggcttcgccttgtcttttcccttatctccgagggaataccacgcagagcagcgttacagaatctgaggtaagatcgtcgcttcacatacgtggcagagattggttaagttggcgatccatgttgatggcgtcagattcaggggctatggttcagcaaaggtttaggcttatttttttcttcttccttcctcctcctcttcttcttcttcttcttttttttttttttagtttcttgtcatcatatcactattaccaccacaagttttatcaataagatcatgtcgctcaaggactaaaggaagagcgtttataaagcaccctgggttgtaacgtaatcgggcagtgaaccaccaggaccacacaccaccggcggatcctcgtgatccatgcgatcaattcaatggaattatggagattagtctcagaggcaaagaaaatctgttctttgataccacagcctcaagcccttggtctgggtccgtcccttagtcggctcggttgagatttgacaagatgtgtgccagagagagcgtagcgcatagtatttatgataaacagtagagaggtgtgctctcgttgccgtccaataatatgattgctgaaaaatctatgctagttaaattagtcagttaactgacgtcagctttgtgagtcttagtcagcaggctgctgagcccagctatcttgagccttttcggtgagctttgccatgtctattacagctatttatagaaagaaaatgtgagctgttatgtcggagcctaacattgactcagtcatcagtctgttattagtattacgccttggccgttaaattggcatgtatgagtcttgtataacgtgggcgcacatcagtcatctgtatcaaaacatataaatagttatgataaagtaagagaaagactaaggcaaagataattgattgctttacatattcttctctcatcgtcttttcatgaatgttagtaaggactgctcatttggagtataaaggatatggagcattcggcacaagaagagaaaggaatcatcaaagttctccagtatacgttgtacacagctgagtaggtaccccaaagcagttcctcacccaagcaataactagtacatgtgttagtagaatgccatgtgctactactatcgagataattttagtaagtgataaggtacacaaatactagaagtggcatatgattggaccagctacagtcgaaccccgcgaggcggaactaccaactagtgagattcatgacaaggctgtcagacacatctaagatcagccgcaacgccccaacaaaatcctgtcccctaattctgaaagaagggcaccgatattattacaatgagagaacgccaacctcatcgcgaagactacaccgtaggctgggtctgcgctctgccgatcgaactagcagccgcacaagcaatgctagacaccgaacactccagcatacgcctgcagatcgatgatcccagcatattcatcctaggaaatatagccgggcacaatgttgtgattacatgtctcccagatggacaaataggcaccagctccgctgcgaccgtggcaatccaaatgcgctccgcgtttccgtcaatcaggttcggtctcatggtgggaatcggcgggggcgtccccagccctgagcatgacattcggctgggagatgtggtcgtcggtcgaccggataatcaaactgggggtgtggtgcagtatgattttgggaagagcacatcgagtgggtttgtacgcacggggtttttgaatgcgcccccggttatcttgctgaatgcagtagccctgttacgggcgaggcattttctggggaggggaacgatgactgagtatacggaaaaattgaaggaaatgcctgcttttacgcgcaataaagataaaaatagggatatcctgttcgaggcggggtataaccatgctggaggtgcgacgtgtgagaaatgcgacgaggaacgatcaatccaacgcgatgaacgtgaaggtcatggcattatggtgcattatggaacaattgcgtcagggaatcaagtactcaaggacgcgcatgaacgagaccgactcgcagcagaattgggaggggtgttgtgctttgagatggaggctgccgggctggtgaataatttcccatgcttggtaatccgagggatttgtgactatgccgattcgcataagaataagaattggcaaccttctgctgccggcgtcgccgctggttatgcgaaggagttgttgtcggttataccaccagggcatgtggagagaacgaagcctatgaggagaaatggtctgtattcacacttggtttgttgcgagagtatatgctctgctgactgtttgtcgcagcacccagaaaaaccttcatggttccctttcagaggaatggaaatttcgctggcagtgattctataatgagcgagcttgctagaagatatgatacagccgcgtttgaacattatctcggtatagctctcgttggaaataaaggcatagggtgagaaagtcactctcataccaatcatgataactctcactaacactgattcagtaaaacatacatcgccctagagtatgcctaccgaagccaacaacacatgccctggctatccgtattctggatatacgcaagcagcatctcccgatacagaaggtcgtatcaagatctagctgaccgtcttgatctacccggaaaagacgacccagcagtcgatattgtggaactggtatcggactggctcactgatgaagaaaatgggccatggctgatgattctggacaatgtggaaaatgtaggtctttcccaagagacggggcttcctgttctgctggagaatgacgtgacggagaagattccgattttatcgttggctccagaagcaaaacatggctctttgctggtgacgtcgcgcaatttggaggcagcgatgagtatcgtcggttcagctgagaacattgtccatgtgcagcagagggatgaagggccaaaaagcttacttgataatgggaaagatctactagcgaaccttgatctgaacagccccaaagatggtcggacaccactatcgtgggctgcagaagcaggtattgtgccagtcgtgaaattgttgcttgctactggtaaagtggacgtcgacaccagagactcacattatggtcgaacgcctctatcatgggctgcaggggctggtcatgcagaaattgttcagctccttctggaaaccaacaaagtggatatcaactccgtcgattaccaaaaccggccgccactgacctgggcgctatttaattctctagagcgaatgaaaccggttgtcaagctgcttctagccaccggccgagccgacctaaacatccgtgatgaatcatcagaccgcacagccctttcttgggtgtgtggagggggccacctggaaatcgttaaatggctgcttgaaaccggtaaggcggacgttaacaccattgagaaataccacgggcgaactcctctttcctgggctgcatttgacaggcatcaggaaatcatgaaggtgttaatcgcgacgggacaggcggacctggaagcaagagatagagaagagggtcggactgtgctatcttgggcggcgggcaatggacttgaagccggggtgagagctttgttagaaactggaaaggtggacgtcaattccaaagatcggaatagaaggacaccgctattctgggcattaagcaatgggcatcagaatacggctcttcttctagaggaggctttgagcggataaatatacacatatagtaccacttttgacacactaggatatctcatgacaggagttacatcgtttgacaccactttctacaatatagagccaagcagtcattacgagcaaaatcatgattagtgtcgaacagtaagcgaaccacctgccccccaaccccttagaccgaagataatgataggtgcgtaggggcgaggcccagatcactcacttcagccatcagaagggggaaaaggagcgcgggggtggttcgggagttctatagggtagatgagatcaaataaatagggcactgcagacatatcaaccatctacatataacacgtcccaaagagaatatttcaggaataaagtttgtagtttgacaggacacacttccagctctatagtggtttgatttcagtgggcggggtatcatgcgaggatagccttaagtgccatcggcaccgtcaaggagagaactgtcaagttccttgtgtcgcagttaatactttcgggccatgtcgaaacatatgaatagtggctatggttctgcactgttcaatagattcgtagccgcctataggatgaagtgcaagaggacatggttgtataagtgctggctactagcacaactatatatcttgtgaagcgaaatataacatccccttaaccagcgtctatcagaaatatggaacttgttgggtcaaataatgacctcaacacgtaataaaaagcaaatgcggaaggaattgtaaatgcttgtcagtggaagggctgagccttcaggtctcgacagccatgctacgggccacagagaagacgacagagccaacagcaaagagaaagaaagccgtatagatcagaatcttttgtccgaggatgtcagggacagtagtgtatattggcttaacagggacaacagcgagggtgaaagagatgctggcccagaatggggtaagagtggtaccagaaagtttactggtaatggtctaggaggacacgacaagactagactatctcacgactgttgaaggagatgtactagtgaccaacatacagaaataaaaaccgcctaagtagttgcgtcaagtgagaccagaaaagccatcaacaaaaaagctaggaatagcaggtagaaagaacaaggcttccagcagccagtccacacctccgtgctcacgggcagagacacatttggatgtattcacatcatttcctttatctggactcgaatccgtttcccctattggctcgacgaatgaagtgtcatcgtagcattgagatactgggatctggtacataactagctagtgggcggggagggggctggataagcaaaaccatatggagtacagaatacagggggaagaaacggagggtttcttcgtcataaactcttccttagcagccgatggattacgatagactgcagcgccatattagtaactcagatttggcctaggactgtgattgggcgagctgggcaatgcttatgatgagttaagagtcctggtccccagtcatgcaccggactccggtttatttcctccgtcgaatcctgccctataacatacccctttttttaagtagccagtcattctaggatgatgtctgtattcttctcgaagtgtaggaagatttgtattttctgtttctattacgccttcaccccatcacagtatacgggagtagttcctctttttctctgtctttcccgcttcgtggataaagaggatgcctcatcatttcaggcttttcactaagtcaatccactacagtcgatcttttatttgttgtcgtttcaccgtcttcaacataacattgcactttatacactctcgtcacctcgacctgatctcaatgatcttgataggggcttaatacttctcatccatctcttctgcctagtctggaaagcctgcacctaccgtgctgcactgggaattttaccatatttattcccgcctggttcaatgtcaagcatttcctgagccgactcgcagagtgccactactaatgtctcagcctcgcctacggtgctttccgcgtgaagaataacgcagaggcgatcttttcccttgggcaccaccggatagttcaatcggaaagacacacagttccgccaactgcaggtggcgacaaaggaggtgatgtacgtcctcgtgtcatcactggtaccacttgttttgaagaatggacgcgaatcccagtcctctgccaagaaaggaggcgttctgtccatttttgtagatgggttccgctgtgattgtcgcgaataagtgcgtaacacggtgctggatatcgtcttggagcgattataaaacgctaggtttgtaagtattcgcaaagccgattgtcgttcgaattaagggttgaggtggtatctgctgggagagagggtggtgggcgcgggctactaccgataatcactcacatgttccgtttggcttgtcttcgagagtttgtagccagctctggcagccgcgactataggcgaggcggggtgtgatgggcagcatacgtagtgaaacaagttattttcaccacctttagagaaacattgacctgcgttccttcaactcggcagacgttgacgacaccactttacttgtccgtttgggttcacagtcaaatgtggggaggaatgcgtcagatgaaggtaatgaatagatgtttttccaagaatgaaaccgaatctggatactggacgacggccgcccagtctctgtgggtatcgacgcaggaagcttgagctttgctaaactggttaagccaggattagcttctcttctggtcctccaccgacacagtgatcttccaggaccgggccagttcaagttatgaggagaggcacatgaacgatatcgtatagggttactatgtgtcgggtggctacactccatatactcaccgcaaggaatgggaagttccaaggaacgcaatacttagagggcgggggcccaacaagttcgtggatgtagagggattttaagttatctcaaatgagacccgtcttggaactaatggggccgaatgataggtacaccacgaactgggaggttttgtctcaaaggaagctcagccgtagaggcgcccaggcctcgtatgaatcccggtatctcaagatttctaattaccggttgcggcgatgcataaaacaaacatatagattctgacatcatcgcgttgggcgtggttatggagcggattgcactaagtctccagtagggtgctcttcatggcgctcgtagatgcggtcgatgatggtcgttgaatgttatatgagcaagtctacgaagccatctggactggcacccttggctcgaccgtgcagacaatgctacgctaaccttctgaagtaatacttagagctacagatattcattctaatacgcgggttgtactcctaattctgcacccgagaagaaagcatgggcttcaaacaccccattcagtatttgctggatccgatgcttggccaaaacctacttgtacgcctcgaccgtgcggaataaccatgcgccttcacatcagcgtgtcatgacggccccacccttactgttcgggcagatgttaggctggttcagaaccttgcgcatatacagagcctgagcgggagaattaaccgaccagcaatatctgcacaagaaaaagaagagccaggacttgcctggtgcggagatccttcttggcaaagctggtaccactgagtgatgcccctaatcaggccaatgttagtactctaaaatctagctattcagaagcaattttagcaatgctccaaaaatgttctgcttttcaattaataggcaattgtttgtgcatcttgggcatgaatctagaattgtctcattccatgctcagaccatactgagtttgccattgcagcgtgacatatttgtagactggcctaaagtcatatagtctatccttgccagcatagccggcacctcgctattcaagttgtctacggggctgtatttagcctctatgatctacaaagctgcctgcccacggcctagaaccttccaagatgacacttcacgcagagtccgatcggagaggacgtatggcccttgctgggtacccagcaacagactccagacttctgaattgcattgttctcgggacggtcccaacaaaggcgggttgggcggggtaaccccacgcgaagttgtgacataagctttaaggtttttgccgctagcagaacttcaaacaggaaatacgaagccgctctggatcataataatttaatgcagatggctgtaggcgctctctctaggacagtactggtgaataacagctgcccggtcgacaatcatcatcccactattacgagtgtgagtacaggttttactcatgggtggatctcgtatctcagcatcttacggaacaaggacttcacctgctggagttcgattaagggtcgataggggtcttttatgattaggttctgaatacccatgggaagatctataccttttaaagatatgattttgacggccctcggttcgtacactacccctcaccttgttcactgtatgtttgaagcttctgattccgtaactttaatttaggattccgttttcataaccctaattttacatgtacttgttctagatcctctagccctcatcgggccctgttcattgctccaaaatggcagtctcgatgaatcaacatcatactataaatctgaaggaacatcctgtttaaatcgatgttcttcttcataacacagcatcaattcactacaagtgtctcgttcttcgatttcaaagatatctgacatatatctttcactgaacattaaaatgaaggtcttttacaccctcctggttgcagcccttactggcgctgttactgcttcgcctgtagcaaatggtgggtcgtacaaagatgttcaaggtacacaaggacacctccctctaaacccccctgtcccgctaaggtatcactaggtaattatcatgattatgatgatcatcagtgcaccagggtagaccgcgaatgcaagaagtgggactcccgcgaatgcaagtgccttgataaagataaacacaattaccgccggcaaactgcaagcatcaccgcgccgccaacaccgacagacaccaacgcgaacaccaacgcaaacaccaacgcaaatgttaaccaaaataccaatgttaaccaaaataccaatgctaatactaataccaatgccaatgccaataccaaccaggcaaccactggaccttcttcaactacatcggcgcctacgaccagctcgacttcaacttcaacctcgacttcaacatctagccaggcaactagtaccagcggcaacgcgaacgccaacgccaacgccaacactaacaccaacaccaacaccaacacaaatgtcaatgtaaacaccaataacaacgtcaacaccaacatcaataatattaataatgctgcacccgctacaggtggcggatcaactgtaggcggagtcggcggaggcagtggcaacccctctgattatcggtgccacggacagtggtgtcccaactactttccaggttgtgagatctgggactgggatcactgcaggtgtggaggccgcttctgcatcaatttcgacaccaactgccgcaactgggattgggacgcatgttcatgcagataatggatacctaaggtagggcatctaatgttatatttgtcagttattgcagcttgcttaagtgatcactaacaacatagacattccaggggagtctcctggttagttgtggatggaaagggttcgtttgcatttatatcatttccacagggtcaaaaaagtattggacttaggaggactgaggcttcataatctctatgtctacatggtcgaggtacaacaccctgacccgataatgtgtatttcttttcccacgggggtgaagtaagggttcaacacccttactggttagcaatgtttgcaatttatttatgtacctaggcagaatgtaaatcaatggagttattgcttttttaaaaaaaaaagatatgcgagccagatccatcagtgtagacccgccactctattctattaatggacaaattattactttatacggtattttaagcttcactgtatatataggtattgttctcatctcccacaagatacatacagaactggttaatgtactgattgtattatttatcagtgctatttcttttctatctccgcacggctcctcttcctcgttcttggccttttctaaatcttgtgtttaccagctgttgggatgtctgcacgttcttaagatagatttgctctagactgttctccagcgatagttctaataaatttatataattatagaagatgacacagtcttgaatattaaacttacatttaaaaaatttaccatctcacaaagctttaatattcttttcgataaagttatctaccgtgtctcgtctaatattctgaaaagatgctttaaataaatcagtctgttatggatatccgtaatagttttagtctggatattagaaggcaatagtagataagagagaaagacagcggtataatcaaaccttccttagatttgctaatagttgcgggtagtcaagccatgggacgatgggcttagtatagataatctctggatcggccgagtcggcctggattgtgagggttgtgaggattacaagaatcctatctatcttaacttagacagtagcttgggatagagaattatagcaataattaagaaggtaggatagtatactagattatacttagtgttctgctgcttcttatactggtctttctttgttctcgcggtgctccgctgcttctcgcagtctttgttattctgtgacatgacattgcaattcggttattgttttctctatccctttttgaaagtagtactcaatagaagattgagtataataaactcaatagtgttgaggggtggtgttcagcgggcgcatgaaatagagtataggagagtgtgtctagtcgtttatcagtctatccttcggttggagtccacagctgcgtcaggcagcgacatacatcggtctgcggccctttcgttcgcgaaatcatgcgccggctataatgcctagatttgccataagagcaactataaaattcgatccctctttcatcagcaagtaaagtcaccgtagcgagacgactatttcgattgcgtcattcgtgaaacccgcattccgtctaatacaagcacttaaagaatattcctgttgtataatctcactgatagaagttgtacagctgaggaatcagtcagcaaaagctctttccagatacaaaatatactaggcttactcctcctgttgactgcccatatgcgctaacaacgctattatatataatctggcttttgaggattacacgccatgcagtcattacccaatggatcttatcaataaggaaaaaaatctcatataaaagtcattggtagtttgaattacaatacatagtttaactgtcttatttaaattatattatcataaaaaaaaaaaaaaaaaaaaaaaaaaaaaactggcatcacaatcccgacagaaatcaaagaatggcgaattcgaagctgacagtataaaatatttctccagcaaaatcattctatctactttacttatagtattaataacatatccgcgcagggaggctacattctcattataagcaccaacaccatcaagcagctggataatactctcccatacccatggcgcgttgacatggagattcactttagctataataattgcatatcctttatataattactgctgggtatgtctttatattctgaatacagagagagagatttacccacgtttttcaccagcttcttcgcgctatcatcacacaatatatcttcatgtcattaccgtgcagcagagattagacttgccttttgcagtacataagtcattcttcagaagcagttaacaatactttcatcttttattaagtaaagcgtaaccgcacctccacttcaaccgcaattgcgagtaatttttgcttccttttatttctacaagattattgaatatatttgtattcaacggccaaatctacaccatctgggcaggttatatgactttctcccagtatagattgggcaaagataatatatattatctattctatatccatctctaatgtgcttcaaagaaatagtaactctaggtactaggacagtgatttaagtagacacgcggaaagcggagacgcaattctataagagattatcaaatataagattcagagaaaacgggcctatatttatctgaaattattcatatagtttttgttaaatgatgacgccaatcagacgacagcaagagacgataattgatcgggcttccctatatattcgacacaatctctgctgactatgggcacatgtctggacccatgattcaatggccaaagatggtgttgagccccgaggaacacacaagttcgctccagaagaggaggtcaatactggtaaacacgggttccaggtgagctatcaggatactgttgcagaagcttttgcgatggagaagaatttatgcagttagcttccataggccactcctggtagaagaaacggtatatatgtgttgccgtcctcaatcgtggaggatgtgtcctaccccaacctttagaaatccagaaatctatgacttggtctcttagctgtggcagcacctcccagactgtatcgaattttttccgtggcaacaagccaaaacgagcccttgttgtcatttggtgcgtacgcaggcttgctgcaactcctacttcagcatatagtactgtatctgtaagaaaggctcgggggtattgttgaaacatctcctgtcccaatactaccttatttccactgggcctggaggtgtcgactcgggcttaaaccaagtcagccttctcactccaatgagaggactagagaagtgtaggaaatggaaagcacttctatagcaataattattattctttgaggaagagaatgattcaaaaatgggacaatatcacacaacagctggctggctttggtgggtccatgaagataactttatataccgcgcatttcgatgccaagcatgatgctctatatctaattagaaataatatactggccaggatatttgcagatatcaaagtcctctaattcctcatggcgcgtacccgttctaaagaagacggttaaatggaatacctgaccatgcctattttaaataagaaataaatggtcattaatacgtcctactaagcgtgagactatatgataatattggtcaatagaaaagcagaataaaatctgtcaaaacgagtgggcagttttatcccacaacttgaccgttcgcgtaccagcaagggataccttggcttcagtcgagcacagccctagctggtcatctttagaaatccgtacttcgtttgaattacaaacctaccttttcctcacccagttaattctacaactcatccaactgaatgtcatgactttgccgagccacttgagatgagaaagattctggaggttaatcagtgcctccatggaaaacgcgcacatcagtctcattaattcgagtcgatatttgacggtgattgctgagcacgggagcttctaacaagagctttacccacaaagcctggccctctagctgagctaaccgagaccagtactgtaggaggtcatggcagagaaccacggtcgttgatgactggtctcgcgtcatgtggtcaaaaattcatccattatcaacagagtcaacgcaacatcctcttatctgaccgagccagctacgcatggacttcaatggctgaagcaagaatttaaacaaagtagaagcaatgcatgtcatgtatgtagacgttgataacgtaggtgctgtaaaagcacggacaatcgtagctgaaagcagcatgataatgcgatttacgagcacagcctcctgggtttgaatagagcagtatataccaaggcaaagcaccgcggcaacactccctgttcccaacggacaggccctcaatgactgggatacgttccgtctcgagcacacggtaccagccagtatgttacccaccattactctctgtgtaccatgactaccgagcaagaaagcctagctaaccttgtttgggcgtgctggtcaccattgcctaggaactcacactcattagacccaggtcaatgagacaaagatacttcaaatggctaattgatcactttccaaatcgggttgggtccctcgatcacgaggaacggaaccaaccaacgagttccgccgagtcatgagacagttggctgtctccgcactccccattcctgaatagcacggaattccctgataattcacagaggagcatgaagatcaactcagtctcaacttttggtggttgccatctgttgccacctgttgcttgccgggcaactccactttgctagtattccgatcgttaaattgttgcactctagccgctggcgttctaggtctcttatggcgatagggtaaacaattctttaattcctggttcttgtataccgggacttccatttgccaacttccattgcgaacttccacggcgagtcctggatcggcggattgccaagaccgccatgttccggttcaggcgtctctcgagtttgattggtccatgtgaaccaagccagaccgtggccaagactaaagcagactggccaagaagctttttcgcggggcctggaaactctttcccccgtgcgtgtgtggagattctctccacggggaagcgtcgcgtctcgtacaatgcagaggtcaattgacttcgcacgtatcgcaactgaatgatgcaataaattggttgcattttttgtatccgcccaaatgcaccgtatcatggggcgacggaatagatgtatttagtggcgcattcagatcccaaaagatcatcaagtcggtttagtgttcaacacctgccatctacttggccccaaattgattttgtgcccaaagcaggctccacacaatttccctggtcgctccgaaaagcctggatggtatctaggggcaaggtccattggaggggctcttacgcgattgccactctcccaacgaagactaccccactgtgcccttttgcgtttttctctttggaaggtttggagtgtgtcattcaaccccacacggaccgtcttggcgaccaggccgactctgcccaatccgggcttggattgcgttttgggtggtcactcccgtcaagtccatactttgattgtcggcaggcaggttagcacagtcgggatcccaagtgcttagcaaggactgctatcccgctgcgcacactgttgcagtcctcaatatcttgttatacatgggaaggatctctcactgctttgtgggacaatcatgaattcgatgaactgcttaagcgacggctatattattcaaatgttcccccaatgaaaagggggctgcgtcgccagccatctgggtaggtttgttcgcgtcctctggcagtattctgtatggccacgacactgggaccatcacgggtattcagactatgctctactggctcactgaattcaagtattgatcaataagctatacgaaaatgaactgagggcctggaagagcccttgttaccgttccgcactgggaatgctctctgtttctgaagtacatgacatgagactagccaatgaagatacgaagcattcagagttggctctggaggatgttgaaaaggcctaatcagccaaacggtcccgacaatggattcagcagcaccgatatcgaagcaccggcgagtttcttcggggaaactcaaactctcaccccgcaagttgaccaacggcagcatggggctaaatgaactagtaattcggattcgggtgttcttgaaacttcttaaagccatgtaggttcgtgtctcaggcacaagcactactgtaggacggcaaattaaacctgggaaatccaagccggcaacggcttagcaagatgctaagtcgctgaaaaggctgctatatctgatcagtatattcccttttcttctcagggattttactattaggtttgggtggcgaaatcttgacctcgtcaaaagcgcgagttgggttgggtttcgccgcctgacctagaacccgtcaagataaataaaatcatgtggtgcaggcgcagttattacagcgagcatacacgccgaatactacccagttgccaaaattttccctataccgcgaatcacatcgagttccggccccatccggcctcactgtgcgaattggacggcgtaacgacgatagcttgccctacttctagactagcttctgccactaccttcaaccgctgccagggaatcatcccggaccgcatttttttagacctaaccctgccggtgttttgcacacggccaactttaactagcttatcccgcgtccggtctgccgtagacattcgtaccattctccgagacacaaataaaatagatcaagtgactcttaatgtagtttgtcacgaattgttactacctttctgactgtgaataagctccatgctatatcctacactgcgccacgtggtagcggcctaaggtcgctgcgaacgcgactcagacaactatatgaactatcgtctgtattactacgtctgtcgtttcggttatatgtgctcatggatccctggcgggttggtaggtacccgtacggcatccgaaaaagcaaaatgaggaagtctaggcaccaacaacttccggagaaatatcggtgctttacccagcttcctcacgcggaggaagcccgaagaagggcccaaacaaagcgggattgaacacggttagccgagaactcaactgactttacagaagcctagcaagtggggccccgaagtaggtacgagagagattacgacgcaagttagacccttcgccacctctccccccggggaagtaccgtcgctgcgagattaatcgcgcatagggtgctgagacaccccgtggagaagggttgtctggtccggggcaatgggctgctggcgatacgggccgaattacgtattattgcctcgcggacatattgacgctctccgcaagaatgaaattgagctgctgtggaatgaactcacgcgggattctttgcaacaacgtcatactcgagatcccttttgctaatctaaatcttcgcttttctctaggcctagggatcttcgagaaacttgaatacgaccgagaaacgcccagtcgttttgaccccatgggaggcacacctaatgtacgaaggtatcgcctagtatttctcaaatgcttcgagtagtctaaccattacatattgtggcagagtacggagtacttagtgtgctaccagttccgaccgggcagtctccggagaaaattactcgggtcccagtcaaccccggtcctgctgagccgtccgacttggcaattgggtgtgagcccgtaaaactttgcccgtgcacgttccttccgagcggggaagggcatggaagtttctttgctaaacggactcagagtattgggggcgtcgctcacttgctactactcaatcaagttaggcatgtttggccttgagggtttccgggggtcctgtatttctaacgacccgacttctgttagctgttcaagaacccttgacgtcgagcctttcacgctcgctgcgattaaaagaaccttttctccatggcgtgggttggatttgatagtcgttaggcgcgttgcttttcttattcacatcaccccataataatacaaacctgatacaccttgatgcaaccgcgtttgggtccagaagagaaagaaaagacttgattgtcggatactctggggacttgtggggtcgaggaagtggggtctgggacatggaggccggggattggagagagggacaataatggtacggagtacaataatccgcagacaaccttcccggctaaacaggcattattatatagagggcattggggtcgtctgactatttttcttccaccctgaccacacataatccttttatcatattgattcgacaaactcgaaatgggcgataattatgaggaaaagcctgacgccattggcaaagagttcagcgatgaactcacgcccgaggagcgtgagcacgagatcgaggcacgcgatctgcaaagcaatcagtatctcgacaacgaaccattgtatgaccggatagcgttcgcgcagataccagtgcacatgaggagccctcgcatgctagtcatcacactgggcgtgttcgcggcgttcagcggcatgctgagtgggttagaccagtcggtgatctcgggcgccctgcctggtatccgcaagcatttcatcgcgtcaggcgagtgggcgagcatggacgacccgaaactggcgaccgacatttcactgatttcgtcactgatgccgctgggcgccatggccggcgcgctcatcatgacgccgctgaacttctactttggacgccgcaactcgattatcatctcgtgtttgtggtacacactgggcagtggactttgtgcgggctcccgtagtgtggggatgctgtttgcgggccgcttcattctgggcatcggtatcggaatcgaaggcggctgtgtcggtatctacatctccgagtgtgtgccgccagaggtgcgtggcaacctggtgtcggtataccagctgatgatcgcattcggagagatcatcggatacgccgccggcggcgtattctttgacgtcccgtcaggcagctggcgctggatgctgggctcgtctctcttgttttcgacgatcctcctggttgggatggccttcctgccagaatcaccgcgctggctggcatccaagggcaagtacgggcgcgcgtggcgggtgtggaagtcgctgcgcgacatggccgaccccaaaagcctggacgagtaccttgcgatggaagttacagtcaaacatgatgtcgaccagtccgcgaacgtgaaatggcatcagaggtatctggaggtgtgcaggacgccgcgcaaccgacgggcgcttgtatatgccacggctatgatatttttcgggcagatgacgggcatcaatgcggtcatgtacaatatgtcaaacttgatggccaagatgaactttgatgaccgcgagtcagtgctgatgtcgatggtgggcggtggcgcgttgttcctgggaacaattcctgctgtgttcacgatggacaagtttgggcgccgggtgtgggcgcaaaacatcctgatgttcatcgtgggtctggcgctggtgggcgtcggctacctatacacgaacaatggtgttgattatttcaatgagcataaggcaacggccttggggttgtttttctccggtctggtgctgtacatggcgttcttcggggcatattcgtgcctgacctgggtagtgccagcggagagctttagtttcaacacccgcagccagggcatggcgatctgctctgtattcctttatctgtggtcattcattgtgacatacaacttcgaagggatgcagaaagcgatgacctacaccggcctgacaatcggtttcttcggcggcttggccgcgctaggcttcttttaccagctgttctttatgcccgagaccaaagacaaaacattggaggagatcgacgagttgtttctaatgccgacaagtaagctggttgcgctgaacacaagcaatctgcttaagcccctccggcggcgacaccggccagagccggtcgataactacaacgcctaaatagttgttcttgtcacctaccagaccaacgttcatggtaccaataacgagcgacaaggttactcaagttgaatgtaatgaaatcatgaggactaatacatttctgccactgcataacacatgttgtgcctatcaaagaggaagcaacagcgtagagcgagaatctgtatatctgataaacatgttttccacctactaccttccatgcgaagcctatcatctgatcatgatttgacttctgattctcttattttataaacctgatataagaagtatcaacgcttacagtctcaaaagcaagttcggccggtacctgataaaaggctcaacgctgtttctgtagccgctcttcacccgcaggcctcttgtggagcggagtgcctagctaaatagtgttcggtatgagcggcaaccaatcaactgatcacagtgatggccatggtatgttcatcgaaattggcaacagaacatgaaatatgatagactgaggcgttgatgctggtacaaaataataagaatgttcgaaggggcaagactgatcgaataaacaattcggcacacagttcacgtggggcaacggatcaggtcgcgattgaaataataagtcacgattgaaacggttcttattgcatttaaactgtaaaacacaaccgattgcacaggttcagccaagggacgtgttctggattgcatcatgcacgaaactcatcacggctatctgctgcatgcaacttgttgagcgcggacatatctctcttgatgatgcggaagtggtagagcggctttgtccagaattgaaggatgtgcgtgtcttacgtggtggggagcttttggagaagaagagggggattacgttgaggatgcttcttactcatactggtttgtcaacatcacctacaccgcgaaaactacctaatagttgcaggagtgtgaaaagggaaggatgctgatagtgatagcgcagctggcttcggatactcgttttcgaatcacgccttacgggactacggtcgaccagcagggtatgatgagttctcgggctgttttgtggacttcatgcaaccgttagttaaacagccgggggacgtgttcgagtatggtgcacgtcctgtttttttcttcttttttacttctttcttcttgacctgttgtgcactgcaagatatatacactttctatcgtcctgcacgtccctaacgatatcattcagatcagcatggaccgggctggtatcgtcctcgaactgctgacaggccagagactggaccactaatatggaagagaatatttttcgtccgcttagattaactaatacttcgatgattccatcgatggaaatgaaggctaagttggaatacatgcatcaacggacgcctgatggcaggatcacgataagggatcacctactccacaggggttgacggtgatacagacagaaacagataataaatcattctttcatagtggtggcactggatgcttctatactgcttcggactacgctcgtatgttacttcttatccctcctttttcgcttagataatcccatgcgcagcatgccttcctacctaccttgcctgtcgccagggaagtgaagaacacgaatacgctgaggctcctgtggtttgtccattaacagaagaatgcgggccatatggtaggtctgcattgtctcagcacacatcgggatagtatatgaagtggcatcgagggtttcagtataggcactcatgcccaatgttagaccggaccgatctatagttctccgggcacatcctgtaaagttgggaggcaggtagctgttccaagtctgcaactggactttcagtcccttccacctttcaagtaggtcctgggtcgccccaattcgtgcgctgtggcctggtcgccggggttcaagctatcgccgaaagtgagaaagttcaacttcaagcgacgtatgatctgtgttaaattaattcccgggaggatgtgataatagcagtctgtaggtgtttatggagaggccgaaatatcgccaaagttcgaaattgtaaagatctaaccgagtctgggtctcactaatgactatgtctagtcagcaaagagcagagaacggagtagtgaggaaggctaaggtggatgtcatgacacttgataacatcgttcccatcgccgccatcacaggcgctttaatcgagaagtgcgcgctcgagtcgaagaagcccatcctagccatacgtttagagggagttaaatgcagtttgtaacgggattaccattgcgcgggagatttcgtgaagtaatgtagtagctgtgcgatgagaacaccggttcccccttctgcggtgttcccaccagctgaggaagctttatcacattctggaactgggagggacgtatattcggccaacccatgttcatctgtaatggagggactgggcaaggcaggagaatgggctgttgcatcgtctaatgaactggttccagtgtccacgaaggggctggacacttcgacaaatgtgactataccgtgtcaactccggcccttctttttttaagcggggggatagcaggatgtggagcaatttacgacgggatggtggtaccttgacccaagtattctccgaccgaaagagtggatactcatcagagggccaacgttgctgttggccaaacttcctagtctccttttggccattttgactgtcaaagtggcgaaagatgggacgatgggactggacgtgaatgtgcaaacacgggttgttctagcacatggcccgcagacaggtttaatttcatcacacttgaccttgcactgcctacaagtgacaccgtgacagtattaggagactttccaaatttgacatgcggaaaacgacccgatttaccagccgaacgcatgtcggctttgttgcaattgtgacaggagcaatctagtgaggaaattgtcgagtggtccgaatgttgttaccagcaatggaagttggagaaattgggaattacgccagctacggagcaccgtagaagaggcaatattgccgaggtgagtgactgtgtccgttaccggattgtcctacacggcaaaagttccgacggcagccatttcataaatcacgtgtcggttaacagaattagaccactgcctccaaccccaaatgtacttgtagcttatacaatatgcaatcagttccttggaaccaggagagccaattagttatatagctatcataaaaaatttggtgttaagtgcttaacactattaaggcaccaccacagtgtcaaaccctagatcgcttcgtggcttgctcgtattggactgcccttgaggtcttgtactgcctcgtctccagacatcaacctcttttcgttccagttgtcgttcgaagtatcgattgtccatcttgactgctaactctgcgacctcagctaaggtctctggtcgttccatccgcgtcatctcatccttgacgtgaacctttagtccgctgatgagggccgaaatgtacgccgtctcgttccagttcatgctcgagatgatctggtaaaactccgatacatatgccgacgctgtgatgagttgtctgagtcgcctgagtcgtctctctgccgctgcttctgaatcgatgtctcctaaagttcgttcaagattgtgtcggaagttgtcatagcctctgaaaatgttgaccgtgatgatactccactgctcctttggttctgataatattctcggatgtacggtccaaaccagttccatgcttatcatcgtaggtgactggatccaaagatgaccttgtctgctttgttactgaacttcaactttattgataccgagatacatgtttatctgagttaaaaaatcctctgagcttcgacctagccccgacgaatagctctactttgagtaacttcaaaccggttgccgtgcaggccggtgcggatgctactacctgagcttccagctgaccaaggtggtcatcgacctccttgccccgtatcctagtgtgtccggcgattcgttcaatgtaactcttcagttcaagggtttgtgctttcagcatgcggatttccctctaatcttctgagtcgcagtcatccttcctgggaggagtcttttgcttgattgcagaggcttgcgacatgggttgcagcgtagtgtcgtcgaacactcgtactgactggtgctcaatgtgtcaaacccttggatcgcttccctgtccctgttagcttagcttcactagtatacgtgccctcgaactgggtcgaggggtatcaagtccataactatctagggaacaactggtcctggacgagagaagagaagtagagccgaatagtgccgcgtagccgttctgggccgtctcctggcagattgtagttctgccgtagctagattgctcatttgatcaggcgaagtcgttaccggcgccttctgcctggcgtgtccgcctcgctagtaagttaactaacgggggttcgtaacattcatgtaactgttgagatatgatgtatagaaaagctatctcttatatggcattacaggatggttcgcgcgattgtggattacgttattgcataaagtacatcaggacccgataatggcaggttgccactgcggaattagcctgcccttaacactcggaggcgcagatcggcgcaacaggcatctcgccggcagatcccagacggtggggtgttcttccaggtttcgagaacctcgggcagatggagggtataatcaagggtttcgcactggtgcgaaccctgctagcattgtggagtctctgcaggtttattcccgcggaacgaaaccaggccctttcatgaacataaactcctgtgcggaaaggcgtaatcgtttcaattatccgaatgatggcattaggtggactatatcgatctatacgtatacgtcccagggtcgtggagacacccagttattcgtacctgggcgttgacatcccctccaggtgcggagtaggcttcagcaaccacttctcacgcccctcatttatctcgtatgatctgatttgccaaacagaagcaaacgcgagccataggtcaaccagcatacgaagtaggccgagtgggcagaaagggacctcctacgaggaatcgtgacgcccaagacagcgacggctttcatgagtaatgtaccgagcacggtggtcgcgccatcgaggcttctgtccaccactgcggatagctatatgtagctgcgaagatccatagtagatttagtatggattgacatgctgcagttacagttatcaaggcaacacatgcccatggttggtctcgttcgagtctaccgtgtgcgggcggtcaacatcctgctcaatccatgtgcgcaccacgatgccttgcagttcaacatccgagctccatcgactggaaccggctataacattaggattcttggaggcctgagaatccaacacgtcatcaagttgtcgaaaaccatcattattgtgtgtggcgctcgaagggtagtacggcttcgtgctggatgatggatgggaacgggctttagaaaccctacttcggaccttgcccaggaagccctggatgagaggcttcatcagcggaagacaaccgcagatcacagcgatatcaagttcgagacaggtccagatagattccttggcactagatgctgtgccgtttagtcaatagaaccaaaagtactacaaagattagttactcacaagctaaatcagtagtaataaacgtgcggaattcaatcaggcgcattaaactgaatatacagaccctgtcgagcagttagcactattcccctacacaccaacatggaaaacctacaggccacccagagaaaacaggagtatcactgcaaacttctgtcgaaaggtgatatgtaatccccatataataggtataggcaaacataaaataataatatcctctatcaaggaaatggctcccattgtctggaaaaactgtcgctgtccactcatacaatgtccacgcagctccttgttgtaatagtactgaacggggcggcactgaaaaatgttgacaagaagagctgtgagggctcaacagctaatgaatataatcaggatattcgagataatggcgtacgcgcgtacggttccgagcagccgcttcaggaacacgataatggagatctttataaacgcggcggacggcgcccaaaatttctggatcatccatgacgcctgcagaaatcatatcatatcagcggaaggtttcgtggagagttcgcggggcgtagaaacgtacaaattgaactcgtcgccgttcgtctggaggcagatcaccgactggcaagccaacgccattgaatgcagctgccgaggaatgttagtatgcccggcgtgccagccatctggcctggaggggtcgcgccgactcactgtttacgacaaaggcagtagcgcagtacgacagaagcaacccagcgcccatcaaccagtcctccaatttcagcccagcggttgtgaagcgacgggagtaaagccgtagaacataggacagggttgccagggcggtgccgacgatgggcacgatagtcagcacatttctccagtgacgattctcttcggaagtcatcctgcactgccagctgtataagtcaatcttgcaagaagaggcgacggcgcgggtaggaattccatatcaggtcccattttagaaagggcattcgccaaatgagattaccaccgcggtgctgccgggttaatatacgaatgtggtggtcgtcgccaccaagccaaaacctaaaaggttggaaaggcggccgctagttcctcatgggctatttccagctcgggaggtgatatctattgactgaattcccatggctcggcgggttttatacttttgattcttctccgccgttcgatggacgaaatgttacatcttgatctgctggtggcttcgtgcgcccgtggttggacgatcagccagcccttttggatccgtcattcaccggcgttcgacatgttgctggtacgctggctggtccgcaccacgatcatcaatatcagatgcaatcccaccatgagtcgacttggatttcggggccacaaatatcgtcgacccccgcgaacggatttatcacgtggccatcagggatgccgtgccttcaggggccttttgcttgccggagaggaaaacccgagagtgtaatcaaaatgagacgttggtcgtagcagataccttgtgctctcctgtgcatctgccttcaagtcctgcactttcttttgtggcttaaggacaggctatgggttaccaagtagtctagtcctgttataaagatagaggtagtaagggctataatatatccatttaattagttattatataatatgtatcatggacaaaacagcattcttgaaatctatgtatattagtccagattcttgataagtttacttggaataaagtgccagtagatttcagacctccagccaagtctgttataccggaaggccctctaaagagtaaatatatattatggatttatgtgccattcgaggcccattggatatcttcaagttgttagtgagagttccctggagcaggcgcaggaccggctccgagccttgagttcccgtggcatttccaaagtaaggcagctagttgacgggctgatcgggtcgtgctccgaccgtgccccagcaatacatgggatgggacacaaggggactcttgcgacagtgttaccgagagccctgcctggccgggaatgccttcacatactacccacgtgatgcgtcgctttcccccggtgggccgtcatcgttgtcttttgtaaggtctctctaatcgccccaggtctgctccgtagatccctcgttcgagtatgatccgtgtcttgcagcagcccagcactggatgaagggcaaccgcataattaagcaataagcttctgctcatttgggatgcaactgaaactgacagttcagagctagctagacaatgaagaggattctgactctgattgtcacatacgtcaacatcgaccgaagaatgtttgtggtgaacagataacagtactctaataagatagtaggatcagaagcatgatcagcaagaggaacatgattaaggatctcaccgcattcccgtttcccccttcaacaaatcgccccaatttgttactgttacctaccatagatacttaagtattccaaattatcatcataatctgctcgctgaagccttctaaagtgaggtgtccgagctaacaccaggaaaaccatgttccgcaaagggttgcagctggtgatgagggaccttctcatttcgaccctcctcatttgcagcctgtcgtctgctatgaatgatggcatttttatatctactgtcattggctggtaaaatatgccgtcgtgaagtttccgttggtgggcagactgggggtgtgcgcagatctgctacactgactagcagcgggagcagcaacccccgtggcaggagtgcccacatataagacttatacgtaaagctgccatatcaccgaacgtgtagtggcccagatcctgtggcctgtatatgccgtccacttcatactagatgcaaaatgttcattcacggttcacaggtgtcaaagttccttccgttcttacgcggtcagtcgagggagctagccagcgtgattcctcgaggcattttgtccacagcggagggtgaaataaagatttgttctttggaatcggcattgtctggaactgtgttagagaggttatcggaggttccaatgatatcttttgctaacctgcccatctctgctcagtccaagtgtacaatttttccataaacatgctcaggtccatgctcaggctctcgttaatcccattcgcaagctaatgagaaccaggtctaaggtgtttgatgtagtgtgaaaagccaatcctgagcgccagcgagttgtgctctgccaaagcagaggtagtagtgcgtcagagaggggcttggttcctataaaagcctgaacgttcgtgtggcacacaaaagaagtgtagtaaatggccgacgccgtccaatttcataaaaggcattattgcaaccttaatataggccctcatgttaaagttaggacgaccagatcagagggaatataagatttcgaccccacgtacagtaccaagttggtggccaggagtggctaacgaccatataagtagtgacgaatagaataggggacgactcgagcaaatattattggaagttgatcaagtgttctgctgctatcgaattactaacgaagcgcaggggcttattattacctagttatcatgcctgtattgatggacccctggtttatcataaacgctacgcagtacaatatcgaaaataagaaggtaacataccattgtagttccccatgggcgcggtagtgggtgaaagccgccccatctgttttgtatgaaaaatgtaaaaccccgttagtataataatgacgactgagcacatgtatgtttcttaggcattgtgttgcatacttattggctggattcagagtagcttccgccactataacttggagtgttcgacattgacgcaggattgagccacctcctatttcaagctagctgccaattttacgagcaagtgatatatgaagaatgaactacaagcgccaccgggaatcaaaagatataagtattccttataatatgaagctcgcacgtgcacgggctgtatgtagcgtcatgcacaatgactgcggcgtccgtgcgacgcagccatctattgtacatgcctcatttcctctcagaatacctggaagcgctacttctgcttcaccatttcgagacatcaatgctacttttctcactttagccttcttctttcccagaatccaaccttgtcgtgccacaatcggcttacatgaaactgactgaagtcatcaccaccctatagttccgtagtgatgcgcctagagatagagaagctaaatcggccagacagcattcgacaccatcgccagttgtgtgcagtgaccgagttgcccgaacagtgtttgcggtcactgcctcggacaacgtgaagctaacatcctaatcttttcccattgttgctgggttcggtattacccaatatcgtcgggctcacttgccgtgcccgcatttcgactcccacttggtttctcgagagataacgacatttggtctcttatggcatgacatagtcacatacgtgcgtaagaaggccacagtgtcatgttagacttagttggctagtagacgcggttacactaggcagaaaaccttagcaatgacgaccctccacacatttcgcttgactcataatcggaataactttcgcgtaaaaattcccctgtgggagaggcgttaaatcatctttcgtcgggatggaccaataaaaccggcaaactaaatagtacgccatgggcccctcttcaaggtttgcgtgagaggaaagacgaacatgccggctggagaacgctggagtctcaagagacattgtttattttaatgaaggctcgcaaggccttcatttccagtcgcgcagcaagaagtcgagttcgttatagcaacgcgtgattaggggaactctgatcaataggggtttagatggcaataataagggaagaacaccgttctgtagtccctcagtgatgattgcttgtttgcagtgcccaggctcagtaggcaaaataataacaagataaggaaacccaatcgagcgggccaagtgcaggggcagtatcatagagagtccaagtgaaatggctttcagctaatttagtgtattctttccgcagcacccgggctggcctatgatgattttttcttgcatttattctattctgcctttctcgtttgcttgaggtgcagaccagctgcaagtccgtcacgccaataatactaagggtaaatagactttcgggtccttatccggaaagggaaaaccgtattattacgcaggatggcacatctgacataccaatcagagtagacatgcacttaagtgaacggatccctttctagccttctttcagcagggcgctcgggtaaatttcctctactacgcagatcactggctgaatggtgttcataccgtcgtactttgtctcactccttcaactccgcttggcctctggggcgttctcacccttacggtcaaaactggtcgctctcggtattgccccatcccgcctgcgctgcagcggccctccaactgccagtttcagtttttgactgtcgcccagtcgccttcccctcagcctgaactctgctttcggtttaagcccaggcttggtgccaaggattatctacttgttcctggggtagaaagaacaccatgaagcttccgtatgtgctcagagtggcgtcggtcgtccttggaatcctttttcacttctcactgtttttgctgtgtttcgtttgttcgcttaatgaataacgtatccgccactgagtcgggtctgcgatgtggccgaaaggaccatgatccgccgggtggacatcagtactactaagtaccgtacgagagatgcttctccagatgcggattcggattctggatatgtcccaggacttacaggaccaacaacaacccattaattttctctctggtttctcggggtaaccggcataacggtgtcggtacttgactgttgctacgctgccaccacgcaacccgtcccagccgtctagggtcttgaggggaacccccgagttgcgaattagagcatgcttgtagatcaagagggtcgaaaggtgcttatagcgctgcgccgcagacccatcgtaagagctacctgaaggaaagcactgcaccaggccgtgtgctgctgccaccccccttcctgggattgcctgctcaaaggatttgctccttggcgcaacttcgggcctcaaaccaacgattggtaacgaaagtgtactgtgtgttactgctagtttactactgataactgatgagatttggagagctcgagactccaagctgtcgagaggacagggactatctggataccaagccaggactagattctcctacgccgtacgtgcctaaattgcctgcgccagtctgagtgtgtctgacttggaatcggccctagcagctatgcccgttctgggcagtttcctgatcctttctccttaaagcgcttgacgaagataatttcaggtaagtaatctctgtctaccgacgtatctactcgcccaccttgttcctataagacggcctctgtcctcccccttaatatatatacctagtttagcgcgattctcgcccttggaacagctatagtcgcatattgggaggtgggatcgtgtaccactgtgatcaacacactcgcctgggatacatcaggttgcttataccgttcacgcccgtcaactgcaacgactttcttttgctgccctcttctcctcatcttcctaaatacgagttgttatgcatgatgatccctccaaagcccccgatgaccaaaaaacgcgcgtcccgtgctgaggcgcggaaagtgacatcgctctctgccgaacgactggagaggaagcgcgccaacgatcgggaagcccagagaatcattcgacagaggaccagggagcatattgagcggctggagcaccaagtggccaagttgaaggccgagagggaacaatttgatgatgtcgtccgacggaatgtgacgctggaacatgagattcgggccttgaagcatcagctcgccctggctagcagacaagggtatctgggtatgattgggtggcagatcttattcctttactacagctacgggaagaatcttgaatggctgacagttgtttcctgtgaggagcagaaggaacgtatagtaatactcccgagtctatgctccccgccatgcaattcgctgagcttttgggattaagtcaagcttctagagcagggtcagtcctgtctacgtccagtcatgtatcggtagggtcggagtggcaatcttacggcacagcctggtccccttcaacatgcgaatcaaccaagacgaattatgggaaccgggctgagtcttacctgttcgagaaccaagttcaactgtcgagcacgataactgtcgcgccgtcgcaggtaacctacagcgcgcctgtcggagctcaaccgggcccgatgtttaaattctatgcacaggcatactacactggcaataccagtcctggaccggtggatggccttgcatcccattctccgcagccagtaccctacgtgcccggacatcagctgatgtagatgccagtaataccaatagggagactagctgggtatcctgttgtgcatatgatacagccatatcgtcagcatacacttccgcctcagtcaaggaatgagtacggctatggctggaacctgcatcagtcgtgatttgcagacagacagacggggttctggaaagaaagtttctcgcatgagccaaggcaatcgcagctgctgcctgaaggctcagcaagcccatgagatgacggttgcgatcaatactttccgacttcgggcatggggaggacatattacgttctaggacgcgaacagcgctgtgttcgaccacgcagaacaacactcactcactcacacttcggacaggtcatactgcacaacggatgcggaagttttctgcaaagttgtggtgtgggactttcattggaaccagaaatgcacgacttctgctgacaaaaccgagggtccggattatgtctagttctggcagtccccaaaccgtatcatggaactgcgctgatctgccccagccgactcgcgccttttatatttctaactattcctgatatcaaaattgaaatatagattaagcctaatggaacataatatttatacagctaacaatccacttttataactaataaaactgtgaattttatctcagaaattctttcttgaacccggatccctaactgaacattatataatttaaatgttatagcagaattttatctctacaatgctgaggcccgggcgatatcattatagaaagaaaaaaaagaaaaaaactatatagagagactccgatacttagagacagaaaaccattttttggatttataaaataaaagtttttattattttcctagtatatcagctgttattaccagcgcaaatactgcggggattctgaacttgatttcatcttctagattcagcatacttagttatctaacctgtgtctccgcccattgcccctgcaaatcctgaaccctatactcgattacccaccctcgcccttatgctaccaatatgcggccagtgacatgcactatatcacaccccactcgccctgaaggacatatctaagatagccaagcagttctaagaattattctttgaattcttcttgtgacacgcgccttctagtatgattgctatatctctcgcatatccttatatacacctctgaacattcctcatctggctgcgagaaaaagcggagaagttcttcataaggtctttgggatgatgcgtcgaagtgccatgtaaggagagccaactttaatatcgtgtcaacatcgaggttgtgcatgagccgttcaatatgatcgtcaagtaatctgttattgtccaagagttccatgtctaccgaacgataataccctcggcagacggccaaacttatacgcagaatggagatactgtcagggccaaagtcatgctgagaatcctcaatttcgctagctgtggccctcaagcacaatacctgtaaacacttcaatgctgacttggccgcgaagcgaagaaaatattccggcagttgggacacttgatgtggctgctccatgtatctttgagttcaatggatgttatgggatttggcatatgaactgatgctcgttattctcggttagatagtcatttgagtaagaagcttggttacgtgattgcagacaggccaacatacggtgtatgggtttccattgagccattccacactctggcctgatggcaaaggtccgaccctttcaatgacctaagtaggaatattcgctggtaaataaatctgtcgcaatcaaacatctccatcccaccctactgcttgtgtttcttgtgcattgcttaaccaagtgagggcttttagaacttgatttgcaggcttccgttttgtaaacgggaccgacgggcctagacctcatcaccatcactcaaccctgggccctgtggaatctcgacaaaccccgagccggataaaggggcacgtacggtgtgacgagagctcgaaaagtggaccccgatagtccacgttactggtgactgagcgagacaagagtggagtgtggctctggggtccaccaaagtctagctggattaaggtttgtagtcgccatttcggcatcccggacggaaggtgatacctaaaacgtatacctacagatatgggtgaatcttttattggctcccgagcatcctgtctaaattaaaagaagtccggcctgggtaaagagtttctgtttaaatggaaagccttcataattgacgccgtaacatagagaaaatgcttctgcagctattactcttcttgcctgtgtcagaccatccaccgggagagatatattcacctcatgagcctggtatacagtgagcgatttaaatattggccgtcataagattttacctagatctgctatttatttgatgcgagctaacttagttgaaatcatctctcttagtccatggacatgcagaatttgagcgatcatatcatctgtacctgccactctaagttgttggctggataggtgcgattattctgtatattaaataatattaatatctaggcctaataatgataaatactaacttattctatttggaactctaattgtcgccgccggttcttgttcacacaaacattactatccgaaaaagcctgaccaacagcgctcaaagctgctgtctctcaatcctaatgcattgctccagttttttctagagcatatatgttctctgtttctcacaccagtcaccactctctgccataagttcagttatgttgtaatgcccgcaagacttggcaactatcatgcacttttctgccaatgccagactaaggaacatctagtctttggttgtcgggtggaattgatctatcactctcggttctgcgcgtaagaagaatattcgaatagctactttctctttactttctatcaagataaagcagcaatatatctttcagttagggttaagttgggctgtgtagaaccaaaaggaattctgtaatttattctagttttttaatagtatctaacttcccagctctattggtggaatatataattgaccagtcacggtatgaagccgtaaaaggtttaccagataatacttgttgatttggagaaggcaaggatggtgcagcctattatacacaataaggacaatatcaggacagtatagatatatcttctaaaagtcagtattaatttctgtatgctttatctcagctgtgtggtaataagaatacttttagtagttgatagtacgccaatggaccagtttagcaggttttttgaccatgtagtacatcatgggccggacttacgacctaaaatttctgctgctctatctgttatatatattgttctagttggcatctaaggagggcgagactgtctagtagaacggtactattataagagttaatatataggtaatataagtaagacagcttcgttttatgagaacagtggagtaatagttatatgttaagtaacagtcactccccattataaaactacgtgcgaactaattattcttattgctgagtttgatcctgtttgaattgtgtcaagtattcatcaatctactttctattttatatatctccttccgataatcgtccatattttccagcggcgcttctcatctggatctgatcctgaaatatcaactgaaactgtcctcacctaaaatacaaagattgaaaaacctggaggcctgagcgcaagacacgtgattgcaatatccaggatttcttgcctcaaaacttaaaatgccttttctgccagattcacatacaagtactgggaaatgttcttctgagctggaccgtgatgcccccgaaggagtttatctcgaagattcaggcgattacgaggacgaaatgcacatacaactgagtgttgccgaaataatcatatacatgaagccaaaaaatcgaccatttatggtacttctcggtgcggacagtgagaacgggtcctcgtggaaacaaggcaaggtggagaacggttatatcttcaacgacaaacgagcatcatgattctcctgcatgcatcgcagagttgtgtctgggaaattggtagtatatgtgtcgaaagggcggaaaggaaatatgtttgcattccgaatttgactgctgctaagtcctactttcgattcagtcattgagttttgtccgcttaccaacttcggaggctatgggatcgcagacttcaaaaagactacttgtcagaaataataataataataataattggtcacaatagttagtgaatcgacagatcgaaacaattctcactagctcagatcatccacctgttcagttaaccgagcagctactttttaccctgcatagtggaggactgctacaacctgctcttttggcttcgcttctcttccagtgctgctgtcaccaatccttggactttcagagccacaccatagctgtacgtatatccgagagtattgaagccgtaggcatgaacgacactgccttccctttcaagtcgatatccccctttcctgctcggccgtagacccactaggtctttcatgacatgcttgttcagatccagcgacctgaagcgatcgtgagtaatgacgtttgttcgtcgtagtatatccgcacgggttgcgagatctaccgactcatcggttaccccctcttggctaactccaccaataataacacccccactgtacatacgggggatctgatacgtgtagtgggagccttggaacatcaccatctcatgggaatcactttcaaccaacatagtctggccgcggactgcaacaactttctcgtcattggcgagaacacgagctcccaagccagatgcattgacaatgatctctgtcttcaacaaagaccgagtgtggtttatcgattcgatctctgcacgaatgaactttaccccctccctttcgagaagtatcttaatccagggtagaaaaactgctggattgactgtcattgatttatattggaaaccaagcttggcattggcggggaggttctctgatggcaaacggcgatattttggtaccagggtcttgtaccaaatcgtagcatcgtcgcttcgatcgtcataatactcggtcacatctgtcacctaaaaaatgacccagtcattagctccctgtaatatccagctatagtatatgaaaggcaaattgaaaacgaacttggacaccactggtagggtcacgatgggcaagagcccaatagtacttgaacgtttcggcttgtagatcatgtcctgcactatccgggtaaggcaagatgccagcgccggccctggttttcttcggattagcaggcgcacattctcggcggtagttatacgtaccatggacttgcccatctcagcgagtcgtccccgggtagttcacgagcaacgatcgtcactgagtaaccagcctgcacaagggcaagggccgacgtgagcccgattactccacatccaatgatgccgacttccattctgatgacactttggttaagcccctgaatgcgtttttgatgcgtgtaggaaacccacccataccggagattaactttgacgaactgggttgcctttaatactgatcatgcactcagacgagaaacacagaattagcctccggtccggtcactgattgccttttcttaggtaatacgaaaagatcatgaaaggaaacaggtaactgtcacaaaagcgtccgactgaaaataccgattgcagccgggtatcggtacccgagcctcttgttcacgcctcaacccctcttgattcttgcgcgcgagctaaacactcactgaatggaagccagagctttgcagcagagaagagtttagactgagaaatgtcggtttcaagtggctcgaaagtggtatcggcgattgtggccagtcacggcgtatcgagcagagccctcaccgcgggtaagaagctctgcagtatccgtccctacccgctgcacattacccaggatagttaccatgtgcagctgaggtgagcagcagtgacctacgaggaaagaagggtaaatttaaaatggatgctcatgggaagagacctaacctttgaagattcattgaattcccatggttttgctaccttacctgctgattttgctgggcaaatttccgatctgcatatatggcgtctccaaagtcaaaagtactacttcttggtagcggtggcgttggtactattgctgctttgaatctcgagattggaggtctggctcaggtcacgtctgtcttgcggtctaattatgcggcagtgagtctcctgggatttacaatcaagtcttgtgaacacggagaaatccagaattggcggccatctgaaagtcagtcagccctctattcttcaacctagcctacacctccttacccttcattaagttgaagaccgttccttgctgtcgctaataccatagctttttgatgcaatagtcctcaataatgttcccagcgttgcggactcggtcactgtccgaccctttgactacgtcgtgtgctgcacaaaaaatgttcccgatgcctcgcccactgtgtgtgaaattatcgctcctgcaatctcgcccggtcacacggtaatcgtccttgtacaaaatggcttaaatattgagaaacccttcctccgcagattcccatctaatatcatactgtccggtgtcagtcgcatagatgctcatgaggtcgcccccggtattatagaacagagacagaaggacatcctgtatgttggggcgtttgaaaactgcctcataccttacgaagagcagcaaaaggcagctcaacacttcgccaaaatctacagtgcggggttgaagacaaactgttcctacaaaccgaacgtgcgttatgatcgttgggttaagttggtcaacaatgcctcgttcaacccaatttgtgccctgacgggtttaacgacgggcgagttgcagcggacatctggggccgttgacaagttgcttattcccgcgatgaaagagatcatatctgtggccgaagcagatggttactcgcttccaggagttataataaaggagaccattcagagtaacccaccagaggaggatatatcccctagcatgttggtggacatacaaaaagtatgttagctttctatctgtgtatcggactgattttactaaaaaatcccatgtcagggcaatttcatcgagcacgaaaatattctgggggaagtcattcgcgaggccagaaagggcgagggggtaacaacacctattctatccaccttgtacgagttatgctgcatggttcaatggaggaccaagaaggaaatgggccggcttgagcctggaatgtgaatgtccttgggtcccattttcagaagacgcaaattccatagtaggaactgaagaacggaatatacctgctgaagcaatcgtgcttataacagaaatgctactgacaagtgtccgtcccttggtgcgttacgaagacttgactgcacccctgtcgacctttagcgatgttcgttatgatctttcatgtgaatctttattggatatctggtatcaagaaactgtatcatgaggagatgtagttatatatataaatgtctttctagtacagtgtccataatttggttgccggccggggggtttaaatgtcctagtaagtagtcctgccgttaaccccatatatcgctttgtcgcaaccagtataaaatccgttctgcggcttcttcagctttgcttgctttgaaggcagttccaagactctcatctgggccaggatcattaagaacctcaacacgccttgtactattctttcccacctccagaattgcacccccttctaggtcctcgtcatcaagacatcttaacattgccatagccacttcgtcagctgtggcccatccgtccttttcctggtctagttgcagaagcttctctggatgctcagtccatagcggcgttcggatgatgccaggtgcgacagcattaatccgtacaccaatggcttgatcgagcggtgctagacagcggacgaatcccgtaattgcgaactttgatgcaccataaatgggcgcgttgaagtttggtatctggcctgcaacggaggaaatatggatgatacgttttggattttcgggactgactggctcagcaaccggatggaacgacgagggtcggcttctcggatgtaaccagtaggatagagctagctgagttgtccggatgggatgggtgaggttgatatcaagcaaataatagcgatttgaatccaggccatccttgctttctggggaacccgggggatgccaaaaattcgaccaatgcggttcatatatacccgctcccggacaaagtatatggaaatcgccgaactcttccagtgcaacttcaaacatctgcgtcaatgctgcccaggaagtcacgtccgtctgaacaaagacggcccgcggtgacgattgcaatcccccatactgagcgatgagcttctctgcttcaggccggaggctgatatccgcaatcacaacattgcaattccgtgacagtacaggttggcaaacgcgagatttatgccttgctgcttcagcttccccggcgacggaaacgtctctagctggacaggactcttacttacctgaacctgcaccagtcactattgcagtttttccggatactgcaaatggccttcgtgcctgcttttgagacatattctcttatgttctgctataagctggtcgagtgtcttgggcattaatcaccgacggcagttgagactctctaggcaatccgcgtccttcttctgtcgacagagtgagatacgttctgattattctcacaagtggaataagaggagcatacctttcagacagtctgaatatgaaggccgagacagcacgccaggcttatctaacaatggggtaagcatgttcctaacgaattataggtcactcgcttatgaacaacacgtcattggcgttatatcacgagagtggtctatccgtagaggaggaaatatacccgagcaccctgctgaaagaaggcgaaaagaaacccgttcctacttacgatcgtgagtgccctgattggctactccatgtcccatgtgcccatcctgcgaataacacgaattttttctgttttaggaaaaaggaccgagatgataacccagcccctattattgacagcagaggtgaaacccaattaggccgcttggtgccaagtttcgaagtggcaaaagaagggactttgggtacatgtgcagttacgggcggtcttagagcatgaaccagagcacatcatgtacctgcacagtattgctttcatcgtcgttggtaggaatagtaattttagcctgaactatggaaggcagaccaagtaacagccgaacacgtagcgcataccggtctagaattcagcttagtatggattatcgatattttagtagcgaagcgcaagcttatcccttgaggaaacgaaccgaggtacagccgtatatcgttttctgcaatgcgagtttactaaagggaagatgggaggggccacacgtcatgcaggatgcgcaacaggaagaagtaaatcttccgatagatgttcggttcttattccggaattcggtgcccggttcgggagcttaaccgccttagtatcacaagggaaaagcggaagaaagtctttctcaatgggtaatataagcttggaggaccttttgggccgcaggcccccacggcctttgaggaaacatctaatgtcaaagtcggattgccaataactatcctagttgcgaatgtgaactacatcttatcttattagagggactggaagataattttattgataatgaaggctcatgtgtttgattttcttaggaattactacatttgaatcttccttggctgggaacgtgttatagtcagatggttactcggcaacagatattctgggtgcatgtacccggcgacgcttccgtcgggaagccgagtgaagcaaatagactataagcatctgcgtgtaatacgcgccatttatttaattcaccaaatcaatcaaagacttgattagtccaggcacttattaaacgcgaaatcttacagatgcgacaaaacatgtttactgcatcatcaaagatgccgctccgttttgtagatgtaagctccttatccgctccaggacctcagtccacacagacaacttaatttgaaggcactgcaggctaatatgttataggttgcagtcacctacaccgccgatcaatttcacggcatctatcgcggcaaaaagtaccacgagagtgacttttcagatgttatcaaacgcgcgcagcaatatggttgcgagaagatgattctcaccacaatgaccatggccggcgcacatattaacttgcaactggcgaggcaatatcctcgtatctgcacaatgacgttaggcgtacatccctaccacgtcgagcagatctacgctaccgaagatggtggtgtatcgtatctccaaagccttcgagaactcggaactcggctacttgccgaatctccttcgtcagtggtggcattcggcgaaatcggactggactatgagcatcttgaccgcgccgacaaagaaacacaacaacgagcattccgcgatcaactgaatttagccgtggacatgcaactgccactcttccttcatgtccgcgactcctgcgccgattttatagacatcatttcaccgtatatgtcccgctttcctcgtggtgggctggtccattccttctcaggatccagagccgaaatggaacagttggtcggtttagggttggatattagtgtgaatggaatcagcttccggacagacgatcaactggatatggtgcgccatataccgttagacaagctacagttggaaacggatgcgccatggtgcgaggtgcggagccaggatgagaagatcgcgtcgtacttggagagagcacgcccactacctccctcccggaaatatcagaagtttattgccgggcagatgatcaaatcgcgcaacgaaccttgtaccattgagcgcgttgcgatggtcgtcgctggccttaaggggattccggtcgaaactgtggcggaagcagcgtggaataacagtgtgcgtatgtttggttagatgcaaaacatgatggtgtctaaggagagcgaagtcagggcttcaggtagaaaatgcactgctatctaggacggataacagcgtccatacgggaatgaaattatcatcggtgtttgctgcccgcgcacctctagaggactgactggttctagcctcccgtccacgcgggagctgatgacaattgcctaaatgagccgcttccacgacagtccaatcgtatatttcattggtttaccttatccactaaacccaaaggaacgcggaacgcatctcgctgtcaccccgcaacaacttgagtctcgcggaggttctccgcttttccgcgagagcaagtgcggggatgtgccgggtacttggggtctcaataatacggcgcatttttcgtcttccgcgattcccttcaagcctccctacgtagtacgcttctgagtgctacctatttgccgatggataatgcccacccaagtaagcgcagacgcacgacgttggcatgcgacgcttgtcgagcgcggaggaccaagtgcgattcgcggcgaccggcatgtcaatactgccaaacccagaacatggtttgcgtctatcaggagccaccccccgcacagcctagtcggtaagtgactgctctttccgcggcatgcatacagacagcaagtaagtactgatgtctggatagggttgaagcagaattaagcgcgatgaataaacgcttagaccaattattcagcttgctggttccagtcgcacccatttccccggatcctcgtgctgcaggtctgagcgatgaatacgatgcttcaaccgaggcaggtgcttccccgtttgatctaccttccaagctcctcggcaactcctcggtcatggatgtattggggctggataccgattttgccaagtccttgattcgaggagaaaggaccgctcaagccgacgagagttcggaaggcgggagaccacacctgcttattgttcatcatcgacatgcagtaaggtgagtggaggccagtagaatatagcgtaattaggatatccactaatgaaagtactagcgcactggctgcgttctctgcccgagttcatatctggtatccgattcttgcttcggacttttcgtcggagtacttccgggtgctctctggccccttgcaaccttgttccgaatcttgcctctctcttttggtggcagcaattggccacagtgttgcggaagacatgacagtctcgagcgtcccgtatttcgaaaccgctcttgcgtccctgccgattatcatccgcgagtgcagtatccgaagtgttcaatgtcttatgctcatcagcttgtattattgttgcctactgagaccttgtcaggcccatgactattgtttgattgcgtcagctaaaattgtgaatattattaagaggtgattctcccatatctgggcgtagtggacttgagtctgacaaaactgtcttagtggcttggaaggacatgacacaaacacagttgaaatgacgcggcgcgtatattggggggtgttgttactggagaagtatgcaatttatttcacccactacgatcgtgttcttactgatcttgatcatagtgaaattgctggccagttggacctcgccaggagtgatatttggtgcctggatgaatgtgttccacttcctctatgccaacaaacgtgggaattcactcccgagatggcctcaaaggctctcgcaacctcatcccccccacatgatgcgccattgcttaatgcgagtgaagacgcaacacgatcatacttcttagcagaggtcgccatgagacgtatgctccatcgatgcaatacagcagttcaagctacctccactgggaaatatgtctatgccccgtatatcgcagtagagttggaacgccaacttgaggaatggtactgccacctactcaatataagtcgcttcgacaagggtgacgtatgtcagccattagagatagccaatgtaccagcttgccctctatcgaatttcctgcgtgttcaatactactgctgcaagctttctatatattggcctgccgtttaccaggctatgcaagatgaaggaagtgcaggtctccttcgggatgactgccagaaattctttgattcctatatcttgttaaccccaagtattgtagcagcttttcaggactgcttagtgaaccggtggacattgtttgttaggtaagttccctaagccctacccaatgtgagtagaataccctgctaaatgtgagcgatagcctctttatcacttcagtggctgcaatatcggcagcaagcactccatgtttgactgggctatgttctccgcagttctacgaatgcatccgagcagcaggacgtgccgatcaggccatcatacgaagaagttcatccttgatgattctgcaggacattttaggggagaggatacaacaggttggattgtcatagaagagtgtgaaagcgtataagatgagtagtggcacgtctatccagagccgatattccctgtcctatgctctccagtcttcttgactgggactctcgcaagggttacgcgacagtctgtcccagcttcctcggcggaaagccagctatgctatatttggcatgtttttggggagtaacaccttgcgcgctggtgtaaatatatcatccatttgtagaagacttccaggacttctgcgtcggaaatgatgcgaacgtgggcagtgagttgagcttctaattatgacagtgatccatgtgcttgacttatgggaaggaaccgttatatttgcgcatggctcgaccagatgttgagtatccattgttgaccgtgacctccacttgttgaaggggcgacctacgtaacggtcgttcgtattattcgcatgttactattgtcatgaatgtaggagcaacactttgggccgatgtttgacggttgacccaggctactaagaagagagcggagtcgagaccctttcctgtttagacgtcaactcttagggagggtcagcttccgccgcaaaatttaatcagttccttgtgatatccagaatgtataaataatggctgaatttcaatacacattttcttgatagagaaagctcatagaattatgggggatggcgttcaacaggtggaaaaagtgttgtgctcagcatagaagcagctctggacgtagacgtgttgtctgatgctatgatcccgcggtatgggtaaaatttcgtgcctatgtcggaactattgccaccgtggcgccacatatctttatctggaatagatggcacggtgtgggactatcgccttgcttggagtaacaagcaagggtcgtcaactccagtagtcggcagtttctcatcagaccacatcgcggaatcccaataattctccgcgatgaggggctcgtgatactcccccggagcccccactttctcccccacggggtaagtcattctggctccatatatagctgaatgcactaccctaggggatgtgaattcagcgtccaccaatatacgactgagatcttatctttcaaaatggacgccgagtacgagagccataaccccccaaatagtacaggaactgatctccagccagaattgactatactatcatcaaccacgataagaagtggcgcatgcttcgcttgcaatggcgcttcgctctttggggtaagtctgagttatcgcgagaagttcacattttcttatcttcttcagcactctggatatcctgcggcgtcattatgcagggcttcgacatcgtggcgggagggcaattggcagcgctgcccgctttccagaagcagttcggtgtccttcagccgtcaggagactatgtcattccagcgctatatctgtcggcttggagttcaattgctccagcgtgtgagattgcagccaccttcttcgtcgttccctcactagaaaagtatggtcgcaaacccgggattctggtggcgaacataatatcagttgccggtgtgctcctgcaacaattggcaactgattggcgaacgcatctcgctggtagaggggtgaatggtgggcgaaagctcttcagtagccttccttaatctgactgaaacccagggatcgccattggcatcatgtttaccatatctccgctctggatcggagagacatgccgaccagagctccgaggctttttcctctgcttcttcaacaccagcattgtgtttggccagttcgcaatgtcagcatttccttcgtctccacgtccgtgactattattactaatacattgtgaagtgtcataatggcgaatataggaagtcatatcgctggaaaatggtagggcttgaacctacatgatacaggctcttgactgactcatttctcccaggcaatggtggttgccggtggtttctatgtacttcttcccacgtacgtgcggtagctgcgtggtacatctactgtcattaaccgcctgagtagttattctcaccgcaggatggtacttctttcctgaatccccatattggctgattaggtgcgggaatagttctcgagcacagaaggagttgaagaaaatttacggtttcaaagacaacaacttctatacgattgaaattcg

SEQ ID NO: 71 - DNA, 1761 bp, Aspergillus oryzae
ggattgtttcgtcaaggatacgaagattcttgcagacgaaacgtcccaattcaacggcgaaacggagaagactgagaaggatgtcgccaagagcaagatcgatgatcttccattctactgcattggcttcaagtcagcagctccggaatacactcttcgcacgcgtatttggtcttccttgcgttcgcagaccctctacaggaccatttccggctttatgaactacagccgtgccatcaagctgctttaccgtgtcggagaatccggaagttgtgcaaatgttcggtggtaactctgagaagctggagcgcgagctggagagaatggctcgtcgcaagttcaaaatttgtgtttcgatgcagcgttatgccaagttcaacaaggaagagcgtgagaacaccgaattccttctccgtgcataccccgatttgcaaattgcctatctcgatgaggaagcgccggaaaatgagggcgatgagccccgcttgtactcgtccttgattgatggacactgcgagcttctggagaacggaatgcggaagcccaagttcaggattcagttgtctggaaaccccattctgggagatggcaagtccgacaaccagaatcatgccattatcttctaccgtggtgaatacatccaggtcattgacgccaaccaggacaactaccttgaagagtgtttgaagattcgtagcgttcttgctgaatttgaggaactgacaactgataacgtttcgccttacacgcctggtctcccttcgtcggacacccacccggttgctattcttggtgctcgtgaatacattttctctgagagtgtcggtgtccttggtgatgttgccgctagtaaggaacaaacattcggtaccctcttcgcccgtacacttgccgaggttggtggtaagctgcactacggtcaccctgatttcctcaatggtattttcatgtgtacccgcggtggtatttcgaaagctcagaagggtcttcacttgaacgaagatatttatgccggtatgaatgctatgatccgtggtggccgtatcaagcactgcgaatacttccagtgtggtaaaggtcgtgatcttggttttggctccattcttaacttcacgaccaagattggtactggtatgggtgagcaaatgctgtctcgagagtattattacctgggtactcagctacctctcgatcggtttttgtctttctactatgcgcatcctggtttccatctgaacaacatgttcatcatgctctctgtgcagatgttcatgatcgtcctgatcaatctgggagccctgaagcatgagaacattacttgtagatataacaaggacttgcccattaccgaccccctgcgcccgaccttctgtgctaaccttgtgcctatcattgactgggtcaaccgctgtgtcatttccatcttcatcgtcttcttcatctcctttgtcccactggcggtccaagagctcacagagagaggagtttggcgtatggccactcgtctcgcaaaacatttcggctctttctcgttcatgttcgaagtctttgtctgtcagatctacgccaatgctgtccatcaaaacctgtcatttggtggtgctcgttatattggtactggccgtggtttcgcaaccgcccgtattccattcggggtcctgtactcacgtttcgccggtccttccatctacgctggtgctcgattgttgctcatgctccttttctccacatctaccgtatggagtgcggctttgatttggt
